United States Patent Application Publication US 2026/0226133 A1 - sequence listing, part 13

SEQ ID NO: 31191 - protein, 262 aa, synthetic construct
DTYMKFSWLTVPEKSLDKEHRCIVRHENNKNGVDQEIIFPPIKTDVITMDPKDNCSKDANDTLLLQLTNTSAYYMYLLLLLKSVVYFAIITCCLLRRTAFCCNGEKSKRGRKKLLYIFKQPFMRPVQTTQEEDGCSCRFPEEEEGGCELRVKFSRSADAPAYQQGQNQLYNELNLGRREEYDVLDKRRGRDPEMGGKPQRRKNPQEGLYNELQKDKMAEAYSEIGMKGERRRGKGHDGLYQGLSTATKDTYDALHMQALPPR

SEQ ID NO: 31192 - protein, 261 aa, synthetic construct
TYMKFSWLTVPEKSLDKEHRCIVRHENNKNGVDQEIIFPPIKTDVITMDPKDNCSKDANDTLLLQLTNTSAYYMYLLLLLKSVVYFAIITCCLLRRTAFCCNGEKSKRGRKKLLYIFKQPFMRPVQTTQEEDGCSCRFPEEEEGGCELRVKFSRSADAPAYQQGQNQLYNELNLGRREEYDVLDKRRGRDPEMGGKPQRRKNPQEGLYNELQKDKMAEAYSEIGMKGERRRGKGHDGLYQGLSTATKDTYDALHMQALPPR

SEQ ID NO: 31193 - protein, 260 aa, synthetic construct
YMKFSWLTVPEKSLDKEHRCIVRHENNKNGVDQEIIFPPIKTDVITMDPKDNCSKDANDTLLLQLTNTSAYYMYLLLLLKSVVYFAIITCCLLRRTAFCCNGEKSKRGRKKLLYIFKQPFMRPVQTTQEEDGCSCRFPEEEEGGCELRVKFSRSADAPAYQQGQNQLYNELNLGRREEYDVLDKRRGRDPEMGGKPQRRKNPQEGLYNELQKDKMAEAYSEIGMKGERRRGKGHDGLYQGLSTATKDTYDALHMQALPPR

SEQ ID NO: 31194 - protein, 259 aa, synthetic construct
MKFSWLTVPEKSLDKEHRCIVRHENNKNGVDQEIIFPPIKTDVITMDPKDNCSKDANDTLLLQLTNTSAYYMYLLLLLKSVVYFAIITCCLLRRTAFCCNGEKSKRGRKKLLYIFKQPFMRPVQTTQEEDGCSCRFPEEEEGGCELRVKFSRSADAPAYQQGQNQLYNELNLGRREEYDVLDKRRGRDPEMGGKPQRRKNPQEGLYNELQKDKMAEAYSEIGMKGERRRGKGHDGLYQGLSTATKDTYDALHMQALPPR

SEQ ID NO: 31195 - protein, 258 aa, synthetic construct
KFSWLTVPEKSLDKEHRCIVRHENNKNGVDQEIIFPPIKTDVITMDPKDNCSKDANDTLLLQLTNTSAYYMYLLLLLKSVVYFAIITCCLLRRTAFCCNGEKSKRGRKKLLYIFKQPFMRPVQTTQEEDGCSCRFPEEEEGGCELRVKFSRSADAPAYQQGQNQLYNELNLGRREEYDVLDKRRGRDPEMGGKPQRRKNPQEGLYNELQKDKMAEAYSEIGMKGERRRGKGHDGLYQGLSTATKDTYDALHMQALPPR

SEQ ID NO: 31196 - protein, 257 aa, synthetic construct
FSWLTVPEKSLDKEHRCIVRHENNKNGVDQEIIFPPIKTDVITMDPKDNCSKDANDTLLLQLTNTSAYYMYLLLLLKSVVYFAIITCCLLRRTAFCCNGEKSKRGRKKLLYIFKQPFMRPVQTTQEEDGCSCRFPEEEEGGCELRVKFSRSADAPAYQQGQNQLYNELNLGRREEYDVLDKRRGRDPEMGGKPQRRKNPQEGLYNELQKDKMAEAYSEIGMKGERRRGKGHDGLYQGLSTATKDTYDALHMQALPPR

SEQ ID NO: 31197 - protein, 256 aa, synthetic construct
SWLTVPEKSLDKEHRCIVRHENNKNGVDQEIIFPPIKTDVITMDPKDNCSKDANDTLLLQLTNTSAYYMYLLLLLKSVVYFAIITCCLLRRTAFCCNGEKSKRGRKKLLYIFKQPFMRPVQTTQEEDGCSCRFPEEEEGGCELRVKFSRSADAPAYQQGQNQLYNELNLGRREEYDVLDKRRGRDPEMGGKPQRRKNPQEGLYNELQKDKMAEAYSEIGMKGERRRGKGHDGLYQGLSTATKDTYDALHMQALPPR

SEQ ID NO: 31198 - protein, 255 aa, synthetic construct
WLTVPEKSLDKEHRCIVRHENNKNGVDQEIIFPPIKTDVITMDPKDNCSKDANDTLLLQLTNTSAYYMYLLLLLKSVVYFAIITCCLLRRTAFCCNGEKSKRGRKKLLYIFKQPFMRPVQTTQEEDGCSCRFPEEEEGGCELRVKFSRSADAPAYQQGQNQLYNELNLGRREEYDVLDKRRGRDPEMGGKPQRRKNPQEGLYNELQKDKMAEAYSEIGMKGERRRGKGHDGLYQGLSTATKDTYDALHMQALPPR

SEQ ID NO: 31199 - protein, 254 aa, synthetic construct
LTVPEKSLDKEHRCIVRHENNKNGVDQEIIFPPIKTDVITMDPKDNCSKDANDTLLLQLTNTSAYYMYLLLLLKSVVYFAIITCCLLRRTAFCCNGEKSKRGRKKLLYIFKQPFMRPVQTTQEEDGCSCRFPEEEEGGCELRVKFSRSADAPAYQQGQNQLYNELNLGRREEYDVLDKRRGRDPEMGGKPQRRKNPQEGLYNELQKDKMAEAYSEIGMKGERRRGKGHDGLYQGLSTATKDTYDALHMQALPPR

SEQ ID NO: 31200 - protein, 253 aa, synthetic construct
TVPEKSLDKEHRCIVRHENNKNGVDQEIIFPPIKTDVITMDPKDNCSKDANDTLLLQLTNTSAYYMYLLLLLKSVVYFAIITCCLLRRTAFCCNGEKSKRGRKKLLYIFKQPFMRPVQTTQEEDGCSCRFPEEEEGGCELRVKFSRSADAPAYQQGQNQLYNELNLGRREEYDVLDKRRGRDPEMGGKPQRRKNPQEGLYNELQKDKMAEAYSEIGMKGERRRGKGHDGLYQGLSTATKDTYDALHMQALPPR

SEQ ID NO: 31201 - protein, 252 aa, synthetic construct
VPEKSLDKEHRCIVRHENNKNGVDQEIIFPPIKTDVITMDPKDNCSKDANDTLLLQLTNTSAYYMYLLLLLKSVVYFAIITCCLLRRTAFCCNGEKSKRGRKKLLYIFKQPFMRPVQTTQEEDGCSCRFPEEEEGGCELRVKFSRSADAPAYQQGQNQLYNELNLGRREEYDVLDKRRGRDPEMGGKPQRRKNPQEGLYNELQKDKMAEAYSEIGMKGERRRGKGHDGLYQGLSTATKDTYDALHMQALPPR

SEQ ID NO: 31202 - protein, 251 aa, synthetic construct
PEKSLDKEHRCIVRHENNKNGVDQEIIFPPIKTDVITMDPKDNCSKDANDTLLLQLTNTSAYYMYLLLLLKSVVYFAIITCCLLRRTAFCCNGEKSKRGRKKLLYIFKQPFMRPVQTTQEEDGCSCRFPEEEEGGCELRVKFSRSADAPAYQQGQNQLYNELNLGRREEYDVLDKRRGRDPEMGGKPQRRKNPQEGLYNELQKDKMAEAYSEIGMKGERRRGKGHDGLYQGLSTATKDTYDALHMQALPPR

SEQ ID NO: 31203 - protein, 250 aa, synthetic construct
EKSLDKEHRCIVRHENNKNGVDQEIIFPPIKTDVITMDPKDNCSKDANDTLLLQLTNTSAYYMYLLLLLKSVVYFAIITCCLLRRTAFCCNGEKSKRGRKKLLYIFKQPFMRPVQTTQEEDGCSCRFPEEEEGGCELRVKFSRSADAPAYQQGQNQLYNELNLGRREEYDVLDKRRGRDPEMGGKPQRRKNPQEGLYNELQKDKMAEAYSEIGMKGERRRGKGHDGLYQGLSTATKDTYDALHMQALPPR

SEQ ID NO: 31204 - protein, 249 aa, synthetic construct
KSLDKEHRCIVRHENNKNGVDQEIIFPPIKTDVITMDPKDNCSKDANDTLLLQLTNTSAYYMYLLLLLKSVVYFAIITCCLLRRTAFCCNGEKSKRGRKKLLYIFKQPFMRPVQTTQEEDGCSCRFPEEEEGGCELRVKFSRSADAPAYQQGQNQLYNELNLGRREEYDVLDKRRGRDPEMGGKPQRRKNPQEGLYNELQKDKMAEAYSEIGMKGERRRGKGHDGLYQGLSTATKDTYDALHMQALPPR

SEQ ID NO: 31205 - protein, 248 aa, synthetic construct
SLDKEHRCIVRHENNKNGVDQEIIFPPIKTDVITMDPKDNCSKDANDTLLLQLTNTSAYYMYLLLLLKSVVYFAIITCCLLRRTAFCCNGEKSKRGRKKLLYIFKQPFMRPVQTTQEEDGCSCRFPEEEEGGCELRVKFSRSADAPAYQQGQNQLYNELNLGRREEYDVLDKRRGRDPEMGGKPQRRKNPQEGLYNELQKDKMAEAYSEIGMKGERRRGKGHDGLYQGLSTATKDTYDALHMQALPPR

SEQ ID NO: 31206 - protein, 247 aa, synthetic construct
LDKEHRCIVRHENNKNGVDQEIIFPPIKTDVITMDPKDNCSKDANDTLLLQLTNTSAYYMYLLLLLKSVVYFAIITCCLLRRTAFCCNGEKSKRGRKKLLYIFKQPFMRPVQTTQEEDGCSCRFPEEEEGGCELRVKFSRSADAPAYQQGQNQLYNELNLGRREEYDVLDKRRGRDPEMGGKPQRRKNPQEGLYNELQKDKMAEAYSEIGMKGERRRGKGHDGLYQGLSTATKDTYDALHMQALPPR

SEQ ID NO: 31207 - protein, 246 aa, synthetic construct
DKEHRCIVRHENNKNGVDQEIIFPPIKTDVITMDPKDNCSKDANDTLLLQLTNTSAYYMYLLLLLKSVVYFAIITCCLLRRTAFCCNGEKSKRGRKKLLYIFKQPFMRPVQTTQEEDGCSCRFPEEEEGGCELRVKFSRSADAPAYQQGQNQLYNELNLGRREEYDVLDKRRGRDPEMGGKPQRRKNPQEGLYNELQKDKMAEAYSEIGMKGERRRGKGHDGLYQGLSTATKDTYDALHMQALPPR

SEQ ID NO: 31208 - protein, 245 aa, synthetic construct
KEHRCIVRHENNKNGVDQEIIFPPIKTDVITMDPKDNCSKDANDTLLLQLTNTSAYYMYLLLLLKSVVYFAIITCCLLRRTAFCCNGEKSKRGRKKLLYIFKQPFMRPVQTTQEEDGCSCRFPEEEEGGCELRVKFSRSADAPAYQQGQNQLYNELNLGRREEYDVLDKRRGRDPEMGGKPQRRKNPQEGLYNELQKDKMAEAYSEIGMKGERRRGKGHDGLYQGLSTATKDTYDALHMQALPPR

SEQ ID NO: 31209 - protein, 244 aa, synthetic construct
EHRCIVRHENNKNGVDQEIIFPPIKTDVITMDPKDNCSKDANDTLLLQLTNTSAYYMYLLLLLKSVVYFAIITCCLLRRTAFCCNGEKSKRGRKKLLYIFKQPFMRPVQTTQEEDGCSCRFPEEEEGGCELRVKFSRSADAPAYQQGQNQLYNELNLGRREEYDVLDKRRGRDPEMGGKPQRRKNPQEGLYNELQKDKMAEAYSEIGMKGERRRGKGHDGLYQGLSTATKDTYDALHMQALPPR

SEQ ID NO: 31210 - protein, 243 aa, synthetic construct
HRCIVRHENNKNGVDQEIIFPPIKTDVITMDPKDNCSKDANDTLLLQLTNTSAYYMYLLLLLKSVVYFAIITCCLLRRTAFCCNGEKSKRGRKKLLYIFKQPFMRPVQTTQEEDGCSCRFPEEEEGGCELRVKFSRSADAPAYQQGQNQLYNELNLGRREEYDVLDKRRGRDPEMGGKPQRRKNPQEGLYNELQKDKMAEAYSEIGMKGERRRGKGHDGLYQGLSTATKDTYDALHMQALPPR

SEQ ID NO: 31211 - protein, 242 aa, synthetic construct
RCIVRHENNKNGVDQEIIFPPIKTDVITMDPKDNCSKDANDTLLLQLTNTSAYYMYLLLLLKSVVYFAIITCCLLRRTAFCCNGEKSKRGRKKLLYIFKQPFMRPVQTTQEEDGCSCRFPEEEEGGCELRVKFSRSADAPAYQQGQNQLYNELNLGRREEYDVLDKRRGRDPEMGGKPQRRKNPQEGLYNELQKDKMAEAYSEIGMKGERRRGKGHDGLYQGLSTATKDTYDALHMQALPPR

SEQ ID NO: 31212 - protein, 241 aa, synthetic construct
CIVRHENNKNGVDQEIIFPPIKTDVITMDPKDNCSKDANDTLLLQLTNTSAYYMYLLLLLKSVVYFAIITCCLLRRTAFCCNGEKSKRGRKKLLYIFKQPFMRPVQTTQEEDGCSCRFPEEEEGGCELRVKFSRSADAPAYQQGQNQLYNELNLGRREEYDVLDKRRGRDPEMGGKPQRRKNPQEGLYNELQKDKMAEAYSEIGMKGERRRGKGHDGLYQGLSTATKDTYDALHMQALPPR

SEQ ID NO: 31213 - protein, 240 aa, synthetic construct
IVRHENNKNGVDQEIIFPPIKTDVITMDPKDNCSKDANDTLLLQLTNTSAYYMYLLLLLKSVVYFAIITCCLLRRTAFCCNGEKSKRGRKKLLYIFKQPFMRPVQTTQEEDGCSCRFPEEEEGGCELRVKFSRSADAPAYQQGQNQLYNELNLGRREEYDVLDKRRGRDPEMGGKPQRRKNPQEGLYNELQKDKMAEAYSEIGMKGERRRGKGHDGLYQGLSTATKDTYDALHMQALPPR

SEQ ID NO: 31214 - protein, 239 aa, synthetic construct
VRHENNKNGVDQEIIFPPIKTDVITMDPKDNCSKDANDTLLLQLTNTSAYYMYLLLLLKSVVYFAIITCCLLRRTAFCCNGEKSKRGRKKLLYIFKQPFMRPVQTTQEEDGCSCRFPEEEEGGCELRVKFSRSADAPAYQQGQNQLYNELNLGRREEYDVLDKRRGRDPEMGGKPQRRKNPQEGLYNELQKDKMAEAYSEIGMKGERRRGKGHDGLYQGLSTATKDTYDALHMQALPPR

SEQ ID NO: 31215 - protein, 238 aa, synthetic construct
RHENNKNGVDQEIIFPPIKTDVITMDPKDNCSKDANDTLLLQLTNTSAYYMYLLLLLKSVVYFAIITCCLLRRTAFCCNGEKSKRGRKKLLYIFKQPFMRPVQTTQEEDGCSCRFPEEEEGGCELRVKFSRSADAPAYQQGQNQLYNELNLGRREEYDVLDKRRGRDPEMGGKPQRRKNPQEGLYNELQKDKMAEAYSEIGMKGERRRGKGHDGLYQGLSTATKDTYDALHMQALPPR

SEQ ID NO: 31216 - protein, 237 aa, synthetic construct
HENNKNGVDQEIIFPPIKTDVITMDPKDNCSKDANDTLLLQLTNTSAYYMYLLLLLKSVVYFAIITCCLLRRTAFCCNGEKSKRGRKKLLYIFKQPFMRPVQTTQEEDGCSCRFPEEEEGGCELRVKFSRSADAPAYQQGQNQLYNELNLGRREEYDVLDKRRGRDPEMGGKPQRRKNPQEGLYNELQKDKMAEAYSEIGMKGERRRGKGHDGLYQGLSTATKDTYDALHMQALPPR

SEQ ID NO: 31217 - protein, 236 aa, synthetic construct
ENNKNGVDQEIIFPPIKTDVITMDPKDNCSKDANDTLLLQLTNTSAYYMYLLLLLKSVVYFAIITCCLLRRTAFCCNGEKSKRGRKKLLYIFKQPFMRPVQTTQEEDGCSCRFPEEEEGGCELRVKFSRSADAPAYQQGQNQLYNELNLGRREEYDVLDKRRGRDPEMGGKPQRRKNPQEGLYNELQKDKMAEAYSEIGMKGERRRGKGHDGLYQGLSTATKDTYDALHMQALPPR

SEQ ID NO: 31218 - protein, 235 aa, synthetic construct
NNKNGVDQEIIFPPIKTDVITMDPKDNCSKDANDTLLLQLTNTSAYYMYLLLLLKSVVYFAIITCCLLRRTAFCCNGEKSKRGRKKLLYIFKQPFMRPVQTTQEEDGCSCRFPEEEEGGCELRVKFSRSADAPAYQQGQNQLYNELNLGRREEYDVLDKRRGRDPEMGGKPQRRKNPQEGLYNELQKDKMAEAYSEIGMKGERRRGKGHDGLYQGLSTATKDTYDALHMQALPPR

SEQ ID NO: 31219 - protein, 234 aa, synthetic construct
NKNGVDQEIIFPPIKTDVITMDPKDNCSKDANDTLLLQLTNTSAYYMYLLLLLKSVVYFAIITCCLLRRTAFCCNGEKSKRGRKKLLYIFKQPFMRPVQTTQEEDGCSCRFPEEEEGGCELRVKFSRSADAPAYQQGQNQLYNELNLGRREEYDVLDKRRGRDPEMGGKPQRRKNPQEGLYNELQKDKMAEAYSEIGMKGERRRGKGHDGLYQGLSTATKDTYDALHMQALPPR

SEQ ID NO: 31220 - protein, 233 aa, synthetic construct
KNGVDQEIIFPPIKTDVITMDPKDNCSKDANDTLLLQLTNTSAYYMYLLLLLKSVVYFAIITCCLLRRTAFCCNGEKSKRGRKKLLYIFKQPFMRPVQTTQEEDGCSCRFPEEEEGGCELRVKFSRSADAPAYQQGQNQLYNELNLGRREEYDVLDKRRGRDPEMGGKPQRRKNPQEGLYNELQKDKMAEAYSEIGMKGERRRGKGHDGLYQGLSTATKDTYDALHMQALPPR

SEQ ID NO: 31221 - protein, 232 aa, synthetic construct
NGVDQEIIFPPIKTDVITMDPKDNCSKDANDTLLLQLTNTSAYYMYLLLLLKSVVYFAIITCCLLRRTAFCCNGEKSKRGRKKLLYIFKQPFMRPVQTTQEEDGCSCRFPEEEEGGCELRVKFSRSADAPAYQQGQNQLYNELNLGRREEYDVLDKRRGRDPEMGGKPQRRKNPQEGLYNELQKDKMAEAYSEIGMKGERRRGKGHDGLYQGLSTATKDTYDALHMQALPPR

SEQ ID NO: 31222 - protein, 231 aa, synthetic construct
GVDQEIIFPPIKTDVITMDPKDNCSKDANDTLLLQLTNTSAYYMYLLLLLKSVVYFAIITCCLLRRTAFCCNGEKSKRGRKKLLYIFKQPFMRPVQTTQEEDGCSCRFPEEEEGGCELRVKFSRSADAPAYQQGQNQLYNELNLGRREEYDVLDKRRGRDPEMGGKPQRRKNPQEGLYNELQKDKMAEAYSEIGMKGERRRGKGHDGLYQGLSTATKDTYDALHMQALPPR

SEQ ID NO: 31223 - protein, 230 aa, synthetic construct
VDQEIIFPPIKTDVITMDPKDNCSKDANDTLLLQLTNTSAYYMYLLLLLKSVVYFAIITCCLLRRTAFCCNGEKSKRGRKKLLYIFKQPFMRPVQTTQEEDGCSCRFPEEEEGGCELRVKFSRSADAPAYQQGQNQLYNELNLGRREEYDVLDKRRGRDPEMGGKPQRRKNPQEGLYNELQKDKMAEAYSEIGMKGERRRGKGHDGLYQGLSTATKDTYDALHMQALPPR

SEQ ID NO: 31224 - protein, 229 aa, synthetic construct
DQEIIFPPIKTDVITMDPKDNCSKDANDTLLLQLTNTSAYYMYLLLLLKSVVYFAIITCCLLRRTAFCCNGEKSKRGRKKLLYIFKQPFMRPVQTTQEEDGCSCRFPEEEEGGCELRVKFSRSADAPAYQQGQNQLYNELNLGRREEYDVLDKRRGRDPEMGGKPQRRKNPQEGLYNELQKDKMAEAYSEIGMKGERRRGKGHDGLYQGLSTATKDTYDALHMQALPPR

SEQ ID NO: 31225 - protein, 228 aa, synthetic construct
QEIIFPPIKTDVITMDPKDNCSKDANDTLLLQLTNTSAYYMYLLLLLKSVVYFAIITCCLLRRTAFCCNGEKSKRGRKKLLYIFKQPFMRPVQTTQEEDGCSCRFPEEEEGGCELRVKFSRSADAPAYQQGQNQLYNELNLGRREEYDVLDKRRGRDPEMGGKPQRRKNPQEGLYNELQKDKMAEAYSEIGMKGERRRGKGHDGLYQGLSTATKDTYDALHMQALPPR

SEQ ID NO: 31226 - protein, 308 aa, synthetic construct; identical to SEQ ID NO: 30657

SEQ ID NO: 31227 - protein, 307 aa, synthetic construct
QPHTKPSVFVMKNGTNVACLVKEFYPKDIRINLVSSKKITEFDPAIVISPSGKYNAVKLGKYEDSNSVTCSVQHDNKTVHSTDFEVKTDSTDHVKPKETENTKQPSKSCHKPKAIVHTEKVNMMSLTVLGLRMLFAKTVAVNFLLTAKLFFLKRGRKKLLYIFKQPFMRPVQTTQEEDGCSCRFPEEEEGGCELRVKFSRSADAPAYQQGQNQLYNELNLGRREEYDVLDKRRGRDPEMGGKPQRRKNPQEGLYNELQKDKMAEAYSEIGMKGERRRGKGHDGLYQGLSTATKDTYDALHMQALPPR

SEQ ID NO: 31228 - protein, 306 aa, synthetic construct
PHTKPSVFVMKNGTNVACLVKEFYPKDIRINLVSSKKITEFDPAIVISPSGKYNAVKLGKYEDSNSVTCSVQHDNKTVHSTDFEVKTDSTDHVKPKETENTKQPSKSCHKPKAIVHTEKVNMMSLTVLGLRMLFAKTVAVNFLLTAKLFFLKRGRKKLLYIFKQPFMRPVQTTQEEDGCSCRFPEEEEGGCELRVKFSRSADAPAYQQGQNQLYNELNLGRREEYDVLDKRRGRDPEMGGKPQRRKNPQEGLYNELQKDKMAEAYSEIGMKGERRRGKGHDGLYQGLSTATKDTYDALHMQALPPR

SEQ ID NO: 31229 - protein, 305 aa, synthetic construct
HTKPSVFVMKNGTNVACLVKEFYPKDIRINLVSSKKITEFDPAIVISPSGKYNAVKLGKYEDSNSVTCSVQHDNKTVHSTDFEVKTDSTDHVKPKETENTKQPSKSCHKPKAIVHTEKVNMMSLTVLGLRMLFAKTVAVNFLLTAKLFFLKRGRKKLLYIFKQPFMRPVQTTQEEDGCSCRFPEEEEGGCELRVKFSRSADAPAYQQGQNQLYNELNLGRREEYDVLDKRRGRDPEMGGKPQRRKNPQEGLYNELQKDKMAEAYSEIGMKGERRRGKGHDGLYQGLSTATKDTYDALHMQALPPR

SEQ ID NO: 31230 - protein, 304 aa, synthetic construct
TKPSVFVMKNGTNVACLVKEFYPKDIRINLVSSKKITEFDPAIVISPSGKYNAVKLGKYEDSNSVTCSVQHDNKTVHSTDFEVKTDSTDHVKPKETENTKQPSKSCHKPKAIVHTEKVNMMSLTVLGLRMLFAKTVAVNFLLTAKLFFLKRGRKKLLYIFKQPFMRPVQTTQEEDGCSCRFPEEEEGGCELRVKFSRSADAPAYQQGQNQLYNELNLGRREEYDVLDKRRGRDPEMGGKPQRRKNPQEGLYNELQKDKMAEAYSEIGMKGERRRGKGHDGLYQGLSTATKDTYDALHMQALPPR

SEQ ID NO: 31231 - protein, 303 aa, synthetic construct
KPSVFVMKNGTNVACLVKEFYPKDIRINLVSSKKITEFDPAIVISPSGKYNAVKLGKYEDSNSVTCSVQHDNKTVHSTDFEVKTDSTDHVKPKETENTKQPSKSCHKPKAIVHTEKVNMMSLTVLGLRMLFAKTVAVNFLLTAKLFFLKRGRKKLLYIFKQPFMRPVQTTQEEDGCSCRFPEEEEGGCELRVKFSRSADAPAYQQGQNQLYNELNLGRREEYDVLDKRRGRDPEMGGKPQRRKNPQEGLYNELQKDKMAEAYSEIGMKGERRRGKGHDGLYQGLSTATKDTYDALHMQALPPR

SEQ ID NO: 31232 - protein, 301 aa, synthetic construct
SVFVMKNGTNVACLVKEFYPKDIRINLVSSKKITEFDPAIVISPSGKYNAVKLGKYEDSNSVTCSVQHDNKTVHSTDFEVKTDSTDHVKPKETENTKQPSKSCHKPKAIVHTEKVNMMSLTVLGLRMLFAKTVAVNFLLTAKLFFLKRGRKKLLYIFKQPFMRPVQTTQEEDGCSCRFPEEEEGGCELRVKFSRSADAPAYQQGQNQLYNELNLGRREEYDVLDKRRGRDPEMGGKPQRRKNPQEGLYNELQKDKMAEAYSEIGMKGERRRGKGHDGLYQGLSTATKDTYDALHMQALPPR

SEQ ID NO: 31233 - protein, 300 aa, synthetic construct
VFVMKNGTNVACLVKEFYPKDIRINLVSSKKITEFDPAIVISPSGKYNAVKLGKYEDSNSVTCSVQHDNKTVHSTDFEVKTDSTDHVKPKETENTKQPSKSCHKPKAIVHTEKVNMMSLTVLGLRMLFAKTVAVNFLLTAKLFFLKRGRKKLLYIFKQPFMRPVQTTQEEDGCSCRFPEEEEGGCELRVKFSRSADAPAYQQGQNQLYNELNLGRREEYDVLDKRRGRDPEMGGKPQRRKNPQEGLYNELQKDKMAEAYSEIGMKGERRRGKGHDGLYQGLSTATKDTYDALHMQALPPR

SEQ ID NO: 31234 - protein, 299 aa, synthetic construct
FVMKNGTNVACLVKEFYPKDIRINLVSSKKITEFDPAIVISPSGKYNAVKLGKYEDSNSVTCSVQHDNKTVHSTDFEVKTDSTDHVKPKETENTKQPSKSCHKPKAIVHTEKVNMMSLTVLGLRMLFAKTVAVNFLLTAKLFFLKRGRKKLLYIFKQPFMRPVQTTQEEDGCSCRFPEEEEGGCELRVKFSRSADAPAYQQGQNQLYNELNLGRREEYDVLDKRRGRDPEMGGKPQRRKNPQEGLYNELQKDKMAEAYSEIGMKGERRRGKGHDGLYQGLSTATKDTYDALHMQALPPR

SEQ ID NO: 31235 - protein, 298 aa, synthetic construct
VMKNGTNVACLVKEFYPKDIRINLVSSKKITEFDPAIVISPSGKYNAVKLGKYEDSNSVTCSVQHDNKTVHSTDFEVKTDSTDHVKPKETENTKQPSKSCHKPKAIVHTEKVNMMSLTVLGLRMLFAKTVAVNFLLTAKLFFLKRGRKKLLYIFKQPFMRPVQTTQEEDGCSCRFPEEEEGGCELRVKFSRSADAPAYQQGQNQLYNELNLGRREEYDVLDKRRGRDPEMGGKPQRRKNPQEGLYNELQKDKMAEAYSEIGMKGERRRGKGHDGLYQGLSTATKDTYDALHMQALPPR

SEQ ID NO: 31236 - protein, 297 aa, synthetic construct
MKNGTNVACLVKEFYPKDIRINLVSSKKITEFDPAIVISPSGKYNAVKLGKYEDSNSVTCSVQHDNKTVHSTDFEVKTDSTDHVKPKETENTKQPSKSCHKPKAIVHTEKVNMMSLTVLGLRMLFAKTVAVNFLLTAKLFFLKRGRKKLLYIFKQPFMRPVQTTQEEDGCSCRFPEEEEGGCELRVKFSRSADAPAYQQGQNQLYNELNLGRREEYDVLDKRRGRDPEMGGKPQRRKNPQEGLYNELQKDKMAEAYSEIGMKGERRRGKGHDGLYQGLSTATKDTYDALHMQALPPR

SEQ ID NO: 31237 - protein, 296 aa, synthetic construct
KNGTNVACLVKEFYPKDIRINLVSSKKITEFDPAIVISPSGKYNAVKLGKYEDSNSVTCSVQHDNKTVHSTDFEVKTDSTDHVKPKETENTKQPSKSCHKPKAIVHTEKVNMMSLTVLGLRMLFAKTVAVNFLLTAKLFFLKRGRKKLLYIFKQPFMRPVQTTQEEDGCSCRFPEEEEGGCELRVKFSRSADAPAYQQGQNQLYNELNLGRREEYDVLDKRRGRDPEMGGKPQRRKNPQEGLYNELQKDKMAEAYSEIGMKGERRRGKGHDGLYQGLSTATKDTYDALHMQALPPR

SEQ ID NO: 31238 - protein, 295 aa, synthetic construct
NGTNVACLVKEFYPKDIRINLVSSKKITEFDPAIVISPSGKYNAVKLGKYEDSNSVTCSVQHDNKTVHSTDFEVKTDSTDHVKPKETENTKQPSKSCHKPKAIVHTEKVNMMSLTVLGLRMLFAKTVAVNFLLTAKLFFLKRGRKKLLYIFKQPFMRPVQTTQEEDGCSCRFPEEEEGGCELRVKFSRSADAPAYQQGQNQLYNELNLGRREEYDVLDKRRGRDPEMGGKPQRRKNPQEGLYNELQKDKMAEAYSEIGMKGERRRGKGHDGLYQGLSTATKDTYDALHMQALPPR

SEQ ID NO: 31239 - protein, 294 aa, synthetic construct
GTNVACLVKEFYPKDIRINLVSSKKITEFDPAIVISPSGKYNAVKLGKYEDSNSVTCSVQHDNKTVHSTDFEVKTDSTDHVKPKETENTKQPSKSCHKPKAIVHTEKVNMMSLTVLGLRMLFAKTVAVNFLLTAKLFFLKRGRKKLLYIFKQPFMRPVQTTQEEDGCSCRFPEEEEGGCELRVKFSRSADAPAYQQGQNQLYNELNLGRREEYDVLDKRRGRDPEMGGKPQRRKNPQEGLYNELQKDKMAEAYSEIGMKGERRRGKGHDGLYQGLSTATKDTYDALHMQALPPR

SEQ ID NO: 31240 - protein, 293 aa, synthetic construct
TNVACLVKEFYPKDIRINLVSSKKITEFDPAIVISPSGKYNAVKLGKYEDSNSVTCSVQHDNKTVHSTDFEVKTDSTDHVKPKETENTKQPSKSCHKPKAIVHTEKVNMMSLTVLGLRMLFAKTVAVNFLLTAKLFFLKRGRKKLLYIFKQPFMRPVQTTQEEDGCSCRFPEEEEGGCELRVKFSRSADAPAYQQGQNQLYNELNLGRREEYDVLDKRRGRDPEMGGKPQRRKNPQEGLYNELQKDKMAEAYSEIGMKGERRRGKGHDGLYQGLSTATKDTYDALHMQALPPR

SEQ ID NO: 31241 - protein, 292 aa, synthetic construct
NVACLVKEFYPKDIRINLVSSKKITEFDPAIVISPSGKYNAVKLGKYEDSNSVTCSVQHDNKTVHSTDFEVKTDSTDHVKPKETENTKQPSKSCHKPKAIVHTEKVNMMSLTVLGLRMLFAKTVAVNFLLTAKLFFLKRGRKKLLYIFKQPFMRPVQTTQEEDGCSCRFPEEEEGGCELRVKFSRSADAPAYQQGQNQLYNELNLGRREEYDVLDKRRGRDPEMGGKPQRRKNPQEGLYNELQKDKMAEAYSEIGMKGERRRGKGHDGLYQGLSTATKDTYDALHMQALPPR

SEQ ID NO: 31242 - protein, 291 aa, synthetic construct
VACLVKEFYPKDIRINLVSSKKITEFDPAIVISPSGKYNAVKLGKYEDSNSVTCSVQHDNKTVHSTDFEVKTDSTDHVKPKETENTKQPSKSCHKPKAIVHTEKVNMMSLTVLGLRMLFAKTVAVNFLLTAKLFFLKRGRKKLLYIFKQPFMRPVQTTQEEDGCSCRFPEEEEGGCELRVKFSRSADAPAYQQGQNQLYNELNLGRREEYDVLDKRRGRDPEMGGKPQRRKNPQEGLYNELQKDKMAEAYSEIGMKGERRRGKGHDGLYQGLSTATKDTYDALHMQALPPR

SEQ ID NO: 31243 - protein, 290 aa, synthetic construct
ACLVKEFYPKDIRINLVSSKKITEFDPAIVISPSGKYNAVKLGKYEDSNSVTCSVQHDNKTVHSTDFEVKTDSTDHVKPKETENTKQPSKSCHKPKAIVHTEKVNMMSLTVLGLRMLFAKTVAVNFLLTAKLFFLKRGRKKLLYIFKQPFMRPVQTTQEEDGCSCRFPEEEEGGCELRVKFSRSADAPAYQQGQNQLYNELNLGRREEYDVLDKRRGRDPEMGGKPQRRKNPQEGLYNELQKDKMAEAYSEIGMKGERRRGKGHDGLYQGLSTATKDTYDALHMQALPPR

SEQ ID NO: 31244 - protein, 289 aa, synthetic construct
CLVKEFYPKDIRINLVSSKKITEFDPAIVISPSGKYNAVKLGKYEDSNSVTCSVQHDNKTVHSTDFEVKTDSTDHVKPKETENTKQPSKSCHKPKAIVHTEKVNMMSLTVLGLRMLFAKTVAVNFLLTAKLFFLKRGRKKLLYIFKQPFMRPVQTTQEEDGCSCRFPEEEEGGCELRVKFSRSADAPAYQQGQNQLYNELNLGRREEYDVLDKRRGRDPEMGGKPQRRKNPQEGLYNELQKDKMAEAYSEIGMKGERRRGKGHDGLYQGLSTATKDTYDALHMQALPPR

SEQ ID NO: 31245 - protein, 288 aa, synthetic construct
LVKEFYPKDIRINLVSSKKITEFDPAIVISPSGKYNAVKLGKYEDSNSVTCSVQHDNKTVHSTDFEVKTDSTDHVKPKETENTKQPSKSCHKPKAIVHTEKVNMMSLTVLGLRMLFAKTVAVNFLLTAKLFFLKRGRKKLLYIFKQPFMRPVQTTQEEDGCSCRFPEEEEGGCELRVKFSRSADAPAYQQGQNQLYNELNLGRREEYDVLDKRRGRDPEMGGKPQRRKNPQEGLYNELQKDKMAEAYSEIGMKGERRRGKGHDGLYQGLSTATKDTYDALHMQALPPR

SEQ ID NO: 31246 - protein, 287 aa, synthetic construct
VKEFYPKDIRINLVSSKKITEFDPAIVISPSGKYNAVKLGKYEDSNSVTCSVQHDNKTVHSTDFEVKTDSTDHVKPKETENTKQPSKSCHKPKAIVHTEKVNMMSLTVLGLRMLFAKTVAVNFLLTAKLFFLKRGRKKLLYIFKQPFMRPVQTTQEEDGCSCRFPEEEEGGCELRVKFSRSADAPAYQQGQNQLYNELNLGRREEYDVLDKRRGRDPEMGGKPQRRKNPQEGLYNELQKDKMAEAYSEIGMKGERRRGKGHDGLYQGLSTATKDTYDALHMQALPPR

SEQ ID NO: 31247 - protein, 286 aa, synthetic construct
KEFYPKDIRINLVSSKKITEFDPAIVISPSGKYNAVKLGKYEDSNSVTCSVQHDNKTVHSTDFEVKTDSTDHVKPKETENTKQPSKSCHKPKAIVHTEKVNMMSLTVLGLRMLFAKTVAVNFLLTAKLFFLKRGRKKLLYIFKQPFMRPVQTTQEEDGCSCRFPEEEEGGCELRVKFSRSADAPAYQQGQNQLYNELNLGRREEYDVLDKRRGRDPEMGGKPQRRKNPQEGLYNELQKDKMAEAYSEIGMKGERRRGKGHDGLYQGLSTATKDTYDALHMQALPPR

SEQ ID NO: 31248 - protein, 285 aa, synthetic construct
EFYPKDIRINLVSSKKITEFDPAIVISPSGKYNAVKLGKYEDSNSVTCSVQHDNKTVHSTDFEVKTDSTDHVKPKETENTKQPSKSCHKPKAIVHTEKVNMMSLTVLGLRMLFAKTVAVNFLLTAKLFFLKRGRKKLLYIFKQPFMRPVQTTQEEDGCSCRFPEEEEGGCELRVKFSRSADAPAYQQGQNQLYNELNLGRREEYDVLDKRRGRDPEMGGKPQRRKNPQEGLYNELQKDKMAEAYSEIGMKGERRRGKGHDGLYQGLSTATKDTYDALHMQALPPR

SEQ ID NO: 31249 - protein, 284 aa, synthetic construct
FYPKDIRINLVSSKKITEFDPAIVISPSGKYNAVKLGKYEDSNSVTCSVQHDNKTVHSTDFEVKTDSTDHVKPKETENTKQPSKSCHKPKAIVHTEKVNMMSLTVLGLRMLFAKTVAVNFLLTAKLFFLKRGRKKLLYIFKQPFMRPVQTTQEEDGCSCRFPEEEEGGCELRVKFSRSADAPAYQQGQNQLYNELNLGRREEYDVLDKRRGRDPEMGGKPQRRKNPQEGLYNELQKDKMAEAYSEIGMKGERRRGKGHDGLYQGLSTATKDTYDALHMQALPPR

SEQ ID NO: 31250 - protein, 283 aa, synthetic construct
YPKDIRINLVSSKKITEFDPAIVISPSGKYNAVKLGKYEDSNSVTCSVQHDNKTVHSTDFEVKTDSTDHVKPKETENTKQPSKSCHKPKAIVHTEKVNMMSLTVLGLRMLFAKTVAVNFLLTAKLFFLKRGRKKLLYIFKQPFMRPVQTTQEEDGCSCRFPEEEEGGCELRVKFSRSADAPAYQQGQNQLYNELNLGRREEYDVLDKRRGRDPEMGGKPQRRKNPQEGLYNELQKDKMAEAYSEIGMKGERRRGKGHDGLYQGLSTATKDTYDALHMQALPPR

SEQ ID NO: 31251 - protein, 282 aa, synthetic construct
PKDIRINLVSSKKITEFDPAIVISPSGKYNAVKLGKYEDSNSVTCSVQHDNKTVHSTDFEVKTDSTDHVKPKETENTKQPSKSCHKPKAIVHTEKVNMMSLTVLGLRMLFAKTVAVNFLLTAKLFFLKRGRKKLLYIFKQPFMRPVQTTQEEDGCSCRFPEEEEGGCELRVKFSRSADAPAYQQGQNQLYNELNLGRREEYDVLDKRRGRDPEMGGKPQRRKNPQEGLYNELQKDKMAEAYSEIGMKGERRRGKGHDGLYQGLSTATKDTYDALHMQALPPR

SEQ ID NO: 31252 - protein, 281 aa, synthetic construct
KDIRINLVSSKKITEFDPAIVISPSGKYNAVKLGKYEDSNSVTCSVQHDNKTVHSTDFEVKTDSTDHVKPKETENTKQPSKSCHKPKAIVHTEKVNMMSLTVLGLRMLFAKTVAVNFLLTAKLFFLKRGRKKLLYIFKQPFMRPVQTTQEEDGCSCRFPEEEEGGCELRVKFSRSADAPAYQQGQNQLYNELNLGRREEYDVLDKRRGRDPEMGGKPQRRKNPQEGLYNELQKDKMAEAYSEIGMKGERRRGKGHDGLYQGLSTATKDTYDALHMQALPPR

SEQ ID NO: 31253 - protein, 280 aa, synthetic construct
DIRINLVSSKKITEFDPAIVISPSGKYNAVKLGKYEDSNSVTCSVQHDNKTVHSTDFEVKTDSTDHVKPKETENTKQPSKSCHKPKAIVHTEKVNMMSLTVLGLRMLFAKTVAVNFLLTAKLFFLKRGRKKLLYIFKQPFMRPVQTTQEEDGCSCRFPEEEEGGCELRVKFSRSADAPAYQQGQNQLYNELNLGRREEYDVLDKRRGRDPEMGGKPQRRKNPQEGLYNELQKDKMAEAYSEIGMKGERRRGKGHDGLYQGLSTATKDTYDALHMQALPPR

SEQ ID NO: 31254 - protein, 279 aa, synthetic construct
IRINLVSSKKITEFDPAIVISPSGKYNAVKLGKYEDSNSVTCSVQHDNKTVHSTDFEVKTDSTDHVKPKETENTKQPSKSCHKPKAIVHTEKVNMMSLTVLGLRMLFAKTVAVNFLLTAKLFFLKRGRKKLLYIFKQPFMRPVQTTQEEDGCSCRFPEEEEGGCELRVKFSRSADAPAYQQGQNQLYNELNLGRREEYDVLDKRRGRDPEMGGKPQRRKNPQEGLYNELQKDKMAEAYSEIGMKGERRRGKGHDGLYQGLSTATKDTYDALHMQALPPR

SEQ ID NO: 31255 - protein, 278 aa, synthetic construct
RINLVSSKKITEFDPAIVISPSGKYNAVKLGKYEDSNSVTCSVQHDNKTVHSTDFEVKTDSTDHVKPKETENTKQPSKSCHKPKAIVHTEKVNMMSLTVLGLRMLFAKTVAVNFLLTAKLFFLKRGRKKLLYIFKQPFMRPVQTTQEEDGCSCRFPEEEEGGCELRVKFSRSADAPAYQQGQNQLYNELNLGRREEYDVLDKRRGRDPEMGGKPQRRKNPQEGLYNELQKDKMAEAYSEIGMKGERRRGKGHDGLYQGLSTATKDTYDALHMQALPPR

SEQ ID NO: 31256 - protein, 277 aa, synthetic construct
INLVSSKKITEFDPAIVISPSGKYNAVKLGKYEDSNSVTCSVQHDNKTVHSTDFEVKTDSTDHVKPKETENTKQPSKSCHKPKAIVHTEKVNMMSLTVLGLRMLFAKTVAVNFLLTAKLFFLKRGRKKLLYIFKQPFMRPVQTTQEEDGCSCRFPEEEEGGCELRVKFSRSADAPAYQQGQNQLYNELNLGRREEYDVLDKRRGRDPEMGGKPQRRKNPQEGLYNELQKDKMAEAYSEIGMKGERRRGKGHDGLYQGLSTATKDTYDALHMQALPPR

SEQ ID NO: 31257 - protein, 276 aa, synthetic construct
NLVSSKKITEFDPAIVISPSGKYNAVKLGKYEDSNSVTCSVQHDNKTVHSTDFEVKTDSTDHVKPKETENTKQPSKSCHKPKAIVHTEKVNMMSLTVLGLRMLFAKTVAVNFLLTAKLFFLKRGRKKLLYIFKQPFMRPVQTTQEEDGCSCRFPEEEEGGCELRVKFSRSADAPAYQQGQNQLYNELNLGRREEYDVLDKRRGRDPEMGGKPQRRKNPQEGLYNELQKDKMAEAYSEIGMKGERRRGKGHDGLYQGLSTATKDTYDALHMQALPPR

SEQ ID NO: 31258 - protein, 275 aa, synthetic construct
LVSSKKITEFDPAIVISPSGKYNAVKLGKYEDSNSVTCSVQHDNKTVHSTDFEVKTDSTDHVKPKETENTKQPSKSCHKPKAIVHTEKVNMMSLTVLGLRMLFAKTVAVNFLLTAKLFFLKRGRKKLLYIFKQPFMRPVQTTQEEDGCSCRFPEEEEGGCELRVKFSRSADAPAYQQGQNQLYNELNLGRREEYDVLDKRRGRDPEMGGKPQRRKNPQEGLYNELQKDKMAEAYSEIGMKGERRRGKGHDGLYQGLSTATKDTYDALHMQALPPR

SEQ ID NO: 31259 - protein, 274 aa, synthetic construct
VSSKKITEFDPAIVISPSGKYNAVKLGKYEDSNSVTCSVQHDNKTVHSTDFEVKTDSTDHVKPKETENTKQPSKSCHKPKAIVHTEKVNMMSLTVLGLRMLFAKTVAVNFLLTAKLFFLKRGRKKLLYIFKQPFMRPVQTTQEEDGCSCRFPEEEEGGCELRVKFSRSADAPAYQQGQNQLYNELNLGRREEYDVLDKRRGRDPEMGGKPQRRKNPQEGLYNELQKDKMAEAYSEIGMKGERRRGKGHDGLYQGLSTATKDTYDALHMQALPPR

SEQ ID NO: 31260 - protein, 273 aa, synthetic construct
SSKKITEFDPAIVISPSGKYNAVKLGKYEDSNSVTCSVQHDNKTVHSTDFEVKTDSTDHVKPKETENTKQPSKSCHKPKAIVHTEKVNMMSLTVLGLRMLFAKTVAVNFLLTAKLFFLKRGRKKLLYIFKQPFMRPVQTTQEEDGCSCRFPEEEEGGCELRVKFSRSADAPAYQQGQNQLYNELNLGRREEYDVLDKRRGRDPEMGGKPQRRKNPQEGLYNELQKDKMAEAYSEIGMKGERRRGKGHDGLYQGLSTATKDTYDALHMQALPPR

SEQ ID NO: 31261 - protein, 272 aa, synthetic construct
SKKITEFDPAIVISPSGKYNAVKLGKYEDSNSVTCSVQHDNKTVHSTDFEVKTDSTDHVKPKETENTKQPSKSCHKPKAIVHTEKVNMMSLTVLGLRMLFAKTVAVNFLLTAKLFFLKRGRKKLLYIFKQPFMRPVQTTQEEDGCSCRFPEEEEGGCELRVKFSRSADAPAYQQGQNQLYNELNLGRREEYDVLDKRRGRDPEMGGKPQRRKNPQEGLYNELQKDKMAEAYSEIGMKGERRRGKGHDGLYQGLSTATKDTYDALHMQALPPR

SEQ ID NO: 31262 - protein, 271 aa, synthetic construct
KKITEFDPAIVISPSGKYNAVKLGKYEDSNSVTCSVQHDNKTVHSTDFEVKTDSTDHVKPKETENTKQPSKSCHKPKAIVHTEKVNMMSLTVLGLRMLFAKTVAVNFLLTAKLFFLKRGRKKLLYIFKQPFMRPVQTTQEEDGCSCRFPEEEEGGCELRVKFSRSADAPAYQQGQNQLYNELNLGRREEYDVLDKRRGRDPEMGGKPQRRKNPQEGLYNELQKDKMAEAYSEIGMKGERRRGKGHDGLYQGLSTATKDTYDALHMQALPPR

SEQ ID NO: 31263 - protein, 270 aa, synthetic construct
KITEFDPAIVISPSGKYNAVKLGKYEDSNSVTCSVQHDNKTVHSTDFEVKTDSTDHVKPKETENTKQPSKSCHKPKAIVHTEKVNMMSLTVLGLRMLFAKTVAVNFLLTAKLFFLKRGRKKLLYIFKQPFMRPVQTTQEEDGCSCRFPEEEEGGCELRVKFSRSADAPAYQQGQNQLYNELNLGRREEYDVLDKRRGRDPEMGGKPQRRKNPQEGLYNELQKDKMAEAYSEIGMKGERRRGKGHDGLYQGLSTATKDTYDALHMQALPPR

SEQ ID NO: 31264 - protein, 269 aa, synthetic construct
ITEFDPAIVISPSGKYNAVKLGKYEDSNSVTCSVQHDNKTVHSTDFEVKTDSTDHVKPKETENTKQPSKSCHKPKAIVHTEKVNMMSLTVLGLRMLFAKTVAVNFLLTAKLFFLKRGRKKLLYIFKQPFMRPVQTTQEEDGCSCRFPEEEEGGCELRVKFSRSADAPAYQQGQNQLYNELNLGRREEYDVLDKRRGRDPEMGGKPQRRKNPQEGLYNELQKDKMAEAYSEIGMKGERRRGKGHDGLYQGLSTATKDTYDALHMQALPPR

SEQ ID NO: 31265 - protein, 268 aa, synthetic construct
TEFDPAIVISPSGKYNAVKLGKYEDSNSVTCSVQHDNKTVHSTDFEVKTDSTDHVKPKETENTKQPSKSCHKPKAIVHTEKVNMMSLTVLGLRMLFAKTVAVNFLLTAKLFFLKRGRKKLLYIFKQPFMRPVQTTQEEDGCSCRFPEEEEGGCELRVKFSRSADAPAYQQGQNQLYNELNLGRREEYDVLDKRRGRDPEMGGKPQRRKNPQEGLYNELQKDKMAEAYSEIGMKGERRRGKGHDGLYQGLSTATKDTYDALHMQALPPR

SEQ ID NO: 31266 - protein, 267 aa, synthetic construct
EFDPAIVISPSGKYNAVKLGKYEDSNSVTCSVQHDNKTVHSTDFEVKTDSTDHVKPKETENTKQPSKSCHKPKAIVHTEKVNMMSLTVLGLRMLFAKTVAVNFLLTAKLFFLKRGRKKLLYIFKQPFMRPVQTTQEEDGCSCRFPEEEEGGCELRVKFSRSADAPAYQQGQNQLYNELNLGRREEYDVLDKRRGRDPEMGGKPQRRKNPQEGLYNELQKDKMAEAYSEIGMKGERRRGKGHDGLYQGLSTATKDTYDALHMQALPPR

SEQ ID NO: 31267 - protein, 266 aa, synthetic construct
FDPAIVISPSGKYNAVKLGKYEDSNSVTCSVQHDNKTVHSTDFEVKTDSTDHVKPKETENTKQPSKSCHKPKAIVHTEKVNMMSLTVLGLRMLFAKTVAVNFLLTAKLFFLKRGRKKLLYIFKQPFMRPVQTTQEEDGCSCRFPEEEEGGCELRVKFSRSADAPAYQQGQNQLYNELNLGRREEYDVLDKRRGRDPEMGGKPQRRKNPQEGLYNELQKDKMAEAYSEIGMKGERRRGKGHDGLYQGLSTATKDTYDALHMQALPPR

SEQ ID NO: 31268 - protein, 265 aa, synthetic construct
DPAIVISPSGKYNAVKLGKYEDSNSVTCSVQHDNKTVHSTDFEVKTDSTDHVKPKETENTKQPSKSCHKPKAIVHTEKVNMMSLTVLGLRMLFAKTVAVNFLLTAKLFFLKRGRKKLLYIFKQPFMRPVQTTQEEDGCSCRFPEEEEGGCELRVKFSRSADAPAYQQGQNQLYNELNLGRREEYDVLDKRRGRDPEMGGKPQRRKNPQEGLYNELQKDKMAEAYSEIGMKGERRRGKGHDGLYQGLSTATKDTYDALHMQALPPR

SEQ ID NO: 31269 - protein, 264 aa, synthetic construct
PAIVISPSGKYNAVKLGKYEDSNSVTCSVQHDNKTVHSTDFEVKTDSTDHVKPKETENTKQPSKSCHKPKAIVHTEKVNMMSLTVLGLRMLFAKTVAVNFLLTAKLFFLKRGRKKLLYIFKQPFMRPVQTTQEEDGCSCRFPEEEEGGCELRVKFSRSADAPAYQQGQNQLYNELNLGRREEYDVLDKRRGRDPEMGGKPQRRKNPQEGLYNELQKDKMAEAYSEIGMKGERRRGKGHDGLYQGLSTATKDTYDALHMQALPPR

SEQ ID NO: 31270 - protein, 263 aa, synthetic construct
AIVISPSGKYNAVKLGKYEDSNSVTCSVQHDNKTVHSTDFEVKTDSTDHVKPKETENTKQPSKSCHKPKAIVHTEKVNMMSLTVLGLRMLFAKTVAVNFLLTAKLFFLKRGRKKLLYIFKQPFMRPVQTTQEEDGCSCRFPEEEEGGCELRVKFSRSADAPAYQQGQNQLYNELNLGRREEYDVLDKRRGRDPEMGGKPQRRKNPQEGLYNELQKDKMAEAYSEIGMKGERRRGKGHDGLYQGLSTATKDTYDALHMQALPPR

SEQ ID NO: 31271 - protein, 262 aa, synthetic construct
IVISPSGKYNAVKLGKYEDSNSVTCSVQHDNKTVHSTDFEVKTDSTDHVKPKETENTKQPSKSCHKPKAIVHTEKVNMMSLTVLGLRMLFAKTVAVNFLLTAKLFFLKRGRKKLLYIFKQPFMRPVQTTQEEDGCSCRFPEEEEGGCELRVKFSRSADAPAYQQGQNQLYNELNLGRREEYDVLDKRRGRDPEMGGKPQRRKNPQEGLYNELQKDKMAEAYSEIGMKGERRRGKGHDGLYQGLSTATKDTYDALHMQALPPR

SEQ ID NO: 31272 - protein, 261 aa, synthetic construct
VISPSGKYNAVKLGKYEDSNSVTCSVQHDNKTVHSTDFEVKTDSTDHVKPKETENTKQPSKSCHKPKAIVHTEKVNMMSLTVLGLRMLFAKTVAVNFLLTAKLFFLKRGRKKLLYIFKQPFMRPVQTTQEEDGCSCRFPEEEEGGCELRVKFSRSADAPAYQQGQNQLYNELNLGRREEYDVLDKRRGRDPEMGGKPQRRKNPQEGLYNELQKDKMAEAYSEIGMKGERRRGKGHDGLYQGLSTATKDTYDALHMQALPPR

SEQ ID NO: 31273 - protein, 260 aa, synthetic construct
ISPSGKYNAVKLGKYEDSNSVTCSVQHDNKTVHSTDFEVKTDSTDHVKPKETENTKQPSKSCHKPKAIVHTEKVNMMSLTVLGLRMLFAKTVAVNFLLTAKLFFLKRGRKKLLYIFKQPFMRPVQTTQEEDGCSCRFPEEEEGGCELRVKFSRSADAPAYQQGQNQLYNELNLGRREEYDVLDKRRGRDPEMGGKPQRRKNPQEGLYNELQKDKMAEAYSEIGMKGERRRGKGHDGLYQGLSTATKDTYDALHMQALPPR

SEQ ID NO: 31274 - protein, 259 aa, synthetic construct
SPSGKYNAVKLGKYEDSNSVTCSVQHDNKTVHSTDFEVKTDSTDHVKPKETENTKQPSKSCHKPKAIVHTEKVNMMSLTVLGLRMLFAKTVAVNFLLTAKLFFLKRGRKKLLYIFKQPFMRPVQTTQEEDGCSCRFPEEEEGGCELRVKFSRSADAPAYQQGQNQLYNELNLGRREEYDVLDKRRGRDPEMGGKPQRRKNPQEGLYNELQKDKMAEAYSEIGMKGERRRGKGHDGLYQGLSTATKDTYDALHMQALPPR

SEQ ID NO: 31275 - protein, 258 aa, synthetic construct
PSGKYNAVKLGKYEDSNSVTCSVQHDNKTVHSTDFEVKTDSTDHVKPKETENTKQPSKSCHKPKAIVHTEKVNMMSLTVLGLRMLFAKTVAVNFLLTAKLFFLKRGRKKLLYIFKQPFMRPVQTTQEEDGCSCRFPEEEEGGCELRVKFSRSADAPAYQQGQNQLYNELNLGRREEYDVLDKRRGRDPEMGGKPQRRKNPQEGLYNELQKDKMAEAYSEIGMKGERRRGKGHDGLYQGLSTATKDTYDALHMQALPPR

SEQ ID NO: 31276 - protein, 257 aa, synthetic construct
SGKYNAVKLGKYEDSNSVTCSVQHDNKTVHSTDFEVKTDSTDHVKPKETENTKQPSKSCHKPKAIVHTEKVNMMSLTVLGLRMLFAKTVAVNFLLTAKLFFLKRGRKKLLYIFKQPFMRPVQTTQEEDGCSCRFPEEEEGGCELRVKFSRSADAPAYQQGQNQLYNELNLGRREEYDVLDKRRGRDPEMGGKPQRRKNPQEGLYNELQKDKMAEAYSEIGMKGERRRGKGHDGLYQGLSTATKDTYDALHMQALPPR

SEQ ID NO: 31277 - protein, 256 aa, synthetic construct
GKYNAVKLGKYEDSNSVTCSVQHDNKTVHSTDFEVKTDSTDHVKPKETENTKQPSKSCHKPKAIVHTEKVNMMSLTVLGLRMLFAKTVAVNFLLTAKLFFLKRGRKKLLYIFKQPFMRPVQTTQEEDGCSCRFPEEEEGGCELRVKFSRSADAPAYQQGQNQLYNELNLGRREEYDVLDKRRGRDPEMGGKPQRRKNPQEGLYNELQKDKMAEAYSEIGMKGERRRGKGHDGLYQGLSTATKDTYDALHMQALPPR

SEQ ID NO: 31278 - protein, 255 aa, synthetic construct
KYNAVKLGKYEDSNSVTCSVQHDNKTVHSTDFEVKTDSTDHVKPKETENTKQPSKSCHKPKAIVHTEKVNMMSLTVLGLRMLFAKTVAVNFLLTAKLFFLKRGRKKLLYIFKQPFMRPVQTTQEEDGCSCRFPEEEEGGCELRVKFSRSADAPAYQQGQNQLYNELNLGRREEYDVLDKRRGRDPEMGGKPQRRKNPQEGLYNELQKDKMAEAYSEIGMKGERRRGKGHDGLYQGLSTATKDTYDALHMQALPPR

SEQ ID NO: 31279 - protein, 254 aa, synthetic construct
YNAVKLGKYEDSNSVTCSVQHDNKTVHSTDFEVKTDSTDHVKPKETENTKQPSKSCHKPKAIVHTEKVNMMSLTVLGLRMLFAKTVAVNFLLTAKLFFLKRGRKKLLYIFKQPFMRPVQTTQEEDGCSCRFPEEEEGGCELRVKFSRSADAPAYQQGQNQLYNELNLGRREEYDVLDKRRGRDPEMGGKPQRRKNPQEGLYNELQKDKMAEAYSEIGMKGERRRGKGHDGLYQGLSTATKDTYDALHMQALPPR

SEQ ID NO: 31280 - protein, 253 aa, synthetic construct
NAVKLGKYEDSNSVTCSVQHDNKTVHSTDFEVKTDSTDHVKPKETENTKQPSKSCHKPKAIVHTEKVNMMSLTVLGLRMLFAKTVAVNFLLTAKLFFLKRGRKKLLYIFKQPFMRPVQTTQEEDGCSCRFPEEEEGGCELRVKFSRSADAPAYQQGQNQLYNELNLGRREEYDVLDKRRGRDPEMGGKPQRRKNPQEGLYNELQKDKMAEAYSEIGMKGERRRGKGHDGLYQGLSTATKDTYDALHMQALPPR

SEQ ID NO: 31281 - protein, 252 aa, synthetic construct
AVKLGKYEDSNSVTCSVQHDNKTVHSTDFEVKTDSTDHVKPKETENTKQPSKSCHKPKAIVHTEKVNMMSLTVLGLRMLFAKTVAVNFLLTAKLFFLKRGRKKLLYIFKQPFMRPVQTTQEEDGCSCRFPEEEEGGCELRVKFSRSADAPAYQQGQNQLYNELNLGRREEYDVLDKRRGRDPEMGGKPQRRKNPQEGLYNELQKDKMAEAYSEIGMKGERRRGKGHDGLYQGLSTATKDTYDALHMQALPPR

SEQ ID NO: 31282 - protein, 251 aa, synthetic construct
VKLGKYEDSNSVTCSVQHDNKTVHSTDFEVKTDSTDHVKPKETENTKQPSKSCHKPKAIVHTEKVNMMSLTVLGLRMLFAKTVAVNFLLTAKLFFLKRGRKKLLYIFKQPFMRPVQTTQEEDGCSCRFPEEEEGGCELRVKFSRSADAPAYQQGQNQLYNELNLGRREEYDVLDKRRGRDPEMGGKPQRRKNPQEGLYNELQKDKMAEAYSEIGMKGERRRGKGHDGLYQGLSTATKDTYDALHMQALPPR

SEQ ID NO: 31283 - protein, 250 aa, synthetic construct
KLGKYEDSNSVTCSVQHDNKTVHSTDFEVKTDSTDHVKPKETENTKQPSKSCHKPKAIVHTEKVNMMSLTVLGLRMLFAKTVAVNFLLTAKLFFLKRGRKKLLYIFKQPFMRPVQTTQEEDGCSCRFPEEEEGGCELRVKFSRSADAPAYQQGQNQLYNELNLGRREEYDVLDKRRGRDPEMGGKPQRRKNPQEGLYNELQKDKMAEAYSEIGMKGERRRGKGHDGLYQGLSTATKDTYDALHMQALPPR

SEQ ID NO: 31284 - protein, 249 aa, synthetic construct
LGKYEDSNSVTCSVQHDNKTVHSTDFEVKTDSTDHVKPKETENTKQPSKSCHKPKAIVHTEKVNMMSLTVLGLRMLFAKTVAVNFLLTAKLFFLKRGRKKLLYIFKQPFMRPVQTTQEEDGCSCRFPEEEEGGCELRVKFSRSADAPAYQQGQNQLYNELNLGRREEYDVLDKRRGRDPEMGGKPQRRKNPQEGLYNELQKDKMAEAYSEIGMKGERRRGKGHDGLYQGLSTATKDTYDALHMQALPPR

SEQ ID NO: 31285 - protein, 248 aa, synthetic construct
GKYEDSNSVTCSVQHDNKTVHSTDFEVKTDSTDHVKPKETENTKQPSKSCHKPKAIVHTEKVNMMSLTVLGLRMLFAKTVAVNFLLTAKLFFLKRGRKKLLYIFKQPFMRPVQTTQEEDGCSCRFPEEEEGGCELRVKFSRSADAPAYQQGQNQLYNELNLGRREEYDVLDKRRGRDPEMGGKPQRRKNPQEGLYNELQKDKMAEAYSEIGMKGERRRGKGHDGLYQGLSTATKDTYDALHMQALPPR

SEQ ID NO: 31286 - protein, 247 aa, synthetic construct
KYEDSNSVTCSVQHDNKTVHSTDFEVKTDSTDHVKPKETENTKQPSKSCHKPKAIVHTEKVNMMSLTVLGLRMLFAKTVAVNFLLTAKLFFLKRGRKKLLYIFKQPFMRPVQTTQEEDGCSCRFPEEEEGGCELRVKFSRSADAPAYQQGQNQLYNELNLGRREEYDVLDKRRGRDPEMGGKPQRRKNPQEGLYNELQKDKMAEAYSEIGMKGERRRGKGHDGLYQGLSTATKDTYDALHMQALPPR

SEQ ID NO: 31287 - protein, 246 aa, synthetic construct
YEDSNSVTCSVQHDNKTVHSTDFEVKTDSTDHVKPKETENTKQPSKSCHKPKAIVHTEKVNMMSLTVLGLRMLFAKTVAVNFLLTAKLFFLKRGRKKLLYIFKQPFMRPVQTTQEEDGCSCRFPEEEEGGCELRVKFSRSADAPAYQQGQNQLYNELNLGRREEYDVLDKRRGRDPEMGGKPQRRKNPQEGLYNELQKDKMAEAYSEIGMKGERRRGKGHDGLYQGLSTATKDTYDALHMQALPPR

SEQ ID NO: 31288 - protein, 245 aa, synthetic construct
EDSNSVTCSVQHDNKTVHSTDFEVKTDSTDHVKPKETENTKQPSKSCHKPKAIVHTEKVNMMSLTVLGLRMLFAKTVAVNFLLTAKLFFLKRGRKKLLYIFKQPFMRPVQTTQEEDGCSCRFPEEEEGGCELRVKFSRSADAPAYQQGQNQLYNELNLGRREEYDVLDKRRGRDPEMGGKPQRRKNPQEGLYNELQKDKMAEAYSEIGMKGERRRGKGHDGLYQGLSTATKDTYDALHMQALPPR

SEQ ID NO: 31289 - protein, 244 aa, synthetic construct
DSNSVTCSVQHDNKTVHSTDFEVKTDSTDHVKPKETENTKQPSKSCHKPKAIVHTEKVNMMSLTVLGLRMLFAKTVAVNFLLTAKLFFLKRGRKKLLYIFKQPFMRPVQTTQEEDGCSCRFPEEEEGGCELRVKFSRSADAPAYQQGQNQLYNELNLGRREEYDVLDKRRGRDPEMGGKPQRRKNPQEGLYNELQKDKMAEAYSEIGMKGERRRGKGHDGLYQGLSTATKDTYDALHMQALPPR

SEQ ID NO: 31290 - protein, 243 aa, synthetic construct
SNSVTCSVQHDNKTVHSTDFEVKTDSTDHVKPKETENTKQPSKSCHKPKAIVHTEKVNMMSLTVLGLRMLFAKTVAVNFLLTAKLFFLKRGRKKLLYIFKQPFMRPVQTTQEEDGCSCRFPEEEEGGCELRVKFSRSADAPAYQQGQNQLYNELNLGRREEYDVLDKRRGRDPEMGGKPQRRKNPQEGLYNELQKDKMAEAYSEIGMKGERRRGKGHDGLYQGLSTATKDTYDALHMQALPPR

SEQ ID NO: 31291 - protein, 242 aa, synthetic construct
NSVTCSVQHDNKTVHSTDFEVKTDSTDHVKPKETENTKQPSKSCHKPKAIVHTEKVNMMSLTVLGLRMLFAKTVAVNFLLTAKLFFLKRGRKKLLYIFKQPFMRPVQTTQEEDGCSCRFPEEEEGGCELRVKFSRSADAPAYQQGQNQLYNELNLGRREEYDVLDKRRGRDPEMGGKPQRRKNPQEGLYNELQKDKMAEAYSEIGMKGERRRGKGHDGLYQGLSTATKDTYDALHMQALPPR

SEQ ID NO: 31292 - protein, 241 aa, synthetic construct
SVTCSVQHDNKTVHSTDFEVKTDSTDHVKPKETENTKQPSKSCHKPKAIVHTEKVNMMSLTVLGLRMLFAKTVAVNFLLTAKLFFLKRGRKKLLYIFKQPFMRPVQTTQEEDGCSCRFPEEEEGGCELRVKFSRSADAPAYQQGQNQLYNELNLGRREEYDVLDKRRGRDPEMGGKPQRRKNPQEGLYNELQKDKMAEAYSEIGMKGERRRGKGHDGLYQGLSTATKDTYDALHMQALPPR

SEQ ID NO: 31293 - protein, 240 aa, synthetic construct
VTCSVQHDNKTVHSTDFEVKTDSTDHVKPKETENTKQPSKSCHKPKAIVHTEKVNMMSLTVLGLRMLFAKTVAVNFLLTAKLFFLKRGRKKLLYIFKQPFMRPVQTTQEEDGCSCRFPEEEEGGCELRVKFSRSADAPAYQQGQNQLYNELNLGRREEYDVLDKRRGRDPEMGGKPQRRKNPQEGLYNELQKDKMAEAYSEIGMKGERRRGKGHDGLYQGLSTATKDTYDALHMQALPPR

SEQ ID NO: 31294 - protein, 239 aa, synthetic construct
TCSVQHDNKTVHSTDFEVKTDSTDHVKPKETENTKQPSKSCHKPKAIVHTEKVNMMSLTVLGLRMLFAKTVAVNFLLTAKLFFLKRGRKKLLYIFKQPFMRPVQTTQEEDGCSCRFPEEEEGGCELRVKFSRSADAPAYQQGQNQLYNELNLGRREEYDVLDKRRGRDPEMGGKPQRRKNPQEGLYNELQKDKMAEAYSEIGMKGERRRGKGHDGLYQGLSTATKDTYDALHMQALPPR

SEQ ID NO: 31295 - protein, 238 aa, synthetic construct
CSVQHDNKTVHSTDFEVKTDSTDHVKPKETENTKQPSKSCHKPKAIVHTEKVNMMSLTVLGLRMLFAKTVAVNFLLTAKLFFLKRGRKKLLYIFKQPFMRPVQTTQEEDGCSCRFPEEEEGGCELRVKFSRSADAPAYQQGQNQLYNELNLGRREEYDVLDKRRGRDPEMGGKPQRRKNPQEGLYNELQKDKMAEAYSEIGMKGERRRGKGHDGLYQGLSTATKDTYDALHMQALPPR

SEQ ID NO: 31296 - protein, 237 aa, synthetic construct
SVQHDNKTVHSTDFEVKTDSTDHVKPKETENTKQPSKSCHKPKAIVHTEKVNMMSLTVLGLRMLFAKTVAVNFLLTAKLFFLKRGRKKLLYIFKQPFMRPVQTTQEEDGCSCRFPEEEEGGCELRVKFSRSADAPAYQQGQNQLYNELNLGRREEYDVLDKRRGRDPEMGGKPQRRKNPQEGLYNELQKDKMAEAYSEIGMKGERRRGKGHDGLYQGLSTATKDTYDALHMQALPPR

SEQ ID NO: 31297 - protein, 236 aa, synthetic construct
VQHDNKTVHSTDFEVKTDSTDHVKPKETENTKQPSKSCHKPKAIVHTEKVNMMSLTVLGLRMLFAKTVAVNFLLTAKLFFLKRGRKKLLYIFKQPFMRPVQTTQEEDGCSCRFPEEEEGGCELRVKFSRSADAPAYQQGQNQLYNELNLGRREEYDVLDKRRGRDPEMGGKPQRRKNPQEGLYNELQKDKMAEAYSEIGMKGERRRGKGHDGLYQGLSTATKDTYDALHMQALPPR

SEQ ID NO: 31298 - protein, 235 aa, synthetic construct
QHDNKTVHSTDFEVKTDSTDHVKPKETENTKQPSKSCHKPKAIVHTEKVNMMSLTVLGLRMLFAKTVAVNFLLTAKLFFLKRGRKKLLYIFKQPFMRPVQTTQEEDGCSCRFPEEEEGGCELRVKFSRSADAPAYQQGQNQLYNELNLGRREEYDVLDKRRGRDPEMGGKPQRRKNPQEGLYNELQKDKMAEAYSEIGMKGERRRGKGHDGLYQGLSTATKDTYDALHMQALPPR

SEQ ID NO: 31299 - protein, 234 aa, synthetic construct
HDNKTVHSTDFEVKTDSTDHVKPKETENTKQPSKSCHKPKAIVHTEKVNMMSLTVLGLRMLFAKTVAVNFLLTAKLFFLKRGRKKLLYIFKQPFMRPVQTTQEEDGCSCRFPEEEEGGCELRVKFSRSADAPAYQQGQNQLYNELNLGRREEYDVLDKRRGRDPEMGGKPQRRKNPQEGLYNELQKDKMAEAYSEIGMKGERRRGKGHDGLYQGLSTATKDTYDALHMQALPPR

SEQ ID NO: 31300 - protein, 233 aa, synthetic construct
DNKTVHSTDFEVKTDSTDHVKPKETENTKQPSKSCHKPKAIVHTEKVNMMSLTVLGLRMLFAKTVAVNFLLTAKLFFLKRGRKKLLYIFKQPFMRPVQTTQEEDGCSCRFPEEEEGGCELRVKFSRSADAPAYQQGQNQLYNELNLGRREEYDVLDKRRGRDPEMGGKPQRRKNPQEGLYNELQKDKMAEAYSEIGMKGERRRGKGHDGLYQGLSTATKDTYDALHMQALPPR

SEQ ID NO: 31301 - protein, 232 aa, synthetic construct
NKTVHSTDFEVKTDSTDHVKPKETENTKQPSKSCHKPKAIVHTEKVNMMSLTVLGLRMLFAKTVAVNFLLTAKLFFLKRGRKKLLYIFKQPFMRPVQTTQEEDGCSCRFPEEEEGGCELRVKFSRSADAPAYQQGQNQLYNELNLGRREEYDVLDKRRGRDPEMGGKPQRRKNPQEGLYNELQKDKMAEAYSEIGMKGERRRGKGHDGLYQGLSTATKDTYDALHMQALPPR

SEQ ID NO: 31302 - protein, 231 aa, synthetic construct
KTVHSTDFEVKTDSTDHVKPKETENTKQPSKSCHKPKAIVHTEKVNMMSLTVLGLRMLFAKTVAVNFLLTAKLFFLKRGRKKLLYIFKQPFMRPVQTTQEEDGCSCRFPEEEEGGCELRVKFSRSADAPAYQQGQNQLYNELNLGRREEYDVLDKRRGRDPEMGGKPQRRKNPQEGLYNELQKDKMAEAYSEIGMKGERRRGKGHDGLYQGLSTATKDTYDALHMQALPPR

SEQ ID NO: 31303 - protein, 230 aa, synthetic construct
TVHSTDFEVKTDSTDHVKPKETENTKQPSKSCHKPKAIVHTEKVNMMSLTVLGLRMLFAKTVAVNFLLTAKLFFLKRGRKKLLYIFKQPFMRPVQTTQEEDGCSCRFPEEEEGGCELRVKFSRSADAPAYQQGQNQLYNELNLGRREEYDVLDKRRGRDPEMGGKPQRRKNPQEGLYNELQKDKMAEAYSEIGMKGERRRGKGHDGLYQGLSTATKDTYDALHMQALPPR

SEQ ID NO: 31304 - protein, 229 aa, synthetic construct
VHSTDFEVKTDSTDHVKPKETENTKQPSKSCHKPKAIVHTEKVNMMSLTVLGLRMLFAKTVAVNFLLTAKLFFLKRGRKKLLYIFKQPFMRPVQTTQEEDGCSCRFPEEEEGGCELRVKFSRSADAPAYQQGQNQLYNELNLGRREEYDVLDKRRGRDPEMGGKPQRRKNPQEGLYNELQKDKMAEAYSEIGMKGERRRGKGHDGLYQGLSTATKDTYDALHMQALPPR

SEQ ID NO: 31305 - protein, 228 aa, synthetic construct
HSTDFEVKTDSTDHVKPKETENTKQPSKSCHKPKAIVHTEKVNMMSLTVLGLRMLFAKTVAVNFLLTAKLFFLKRGRKKLLYIFKQPFMRPVQTTQEEDGCSCRFPEEEEGGCELRVKFSRSADAPAYQQGQNQLYNELNLGRREEYDVLDKRRGRDPEMGGKPQRRKNPQEGLYNELQKDKMAEAYSEIGMKGERRRGKGHDGLYQGLSTATKDTYDALHMQALPPR

SEQ ID NO: 31306 - protein, 227 aa, synthetic construct
STDFEVKTDSTDHVKPKETENTKQPSKSCHKPKAIVHTEKVNMMSLTVLGLRMLFAKTVAVNFLLTAKLFFLKRGRKKLLYIFKQPFMRPVQTTQEEDGCSCRFPEEEEGGCELRVKFSRSADAPAYQQGQNQLYNELNLGRREEYDVLDKRRGRDPEMGGKPQRRKNPQEGLYNELQKDKMAEAYSEIGMKGERRRGKGHDGLYQGLSTATKDTYDALHMQALPPR

SEQ ID NO: 31307 - protein, 226 aa, synthetic construct
TDFEVKTDSTDHVKPKETENTKQPSKSCHKPKAIVHTEKVNMMSLTVLGLRMLFAKTVAVNFLLTAKLFFLKRGRKKLLYIFKQPFMRPVQTTQEEDGCSCRFPEEEEGGCELRVKFSRSADAPAYQQGQNQLYNELNLGRREEYDVLDKRRGRDPEMGGKPQRRKNPQEGLYNELQKDKMAEAYSEIGMKGERRRGKGHDGLYQGLSTATKDTYDALHMQALPPR

SEQ ID NO: 31308 - protein, 225 aa, synthetic construct
DFEVKTDSTDHVKPKETENTKQPSKSCHKPKAIVHTEKVNMMSLTVLGLRMLFAKTVAVNFLLTAKLFFLKRGRKKLLYIFKQPFMRPVQTTQEEDGCSCRFPEEEEGGCELRVKFSRSADAPAYQQGQNQLYNELNLGRREEYDVLDKRRGRDPEMGGKPQRRKNPQEGLYNELQKDKMAEAYSEIGMKGERRRGKGHDGLYQGLSTATKDTYDALHMQALPPR

SEQ ID NO: 31309 - protein, 224 aa, synthetic construct
FEVKTDSTDHVKPKETENTKQPSKSCHKPKAIVHTEKVNMMSLTVLGLRMLFAKTVAVNFLLTAKLFFLKRGRKKLLYIFKQPFMRPVQTTQEEDGCSCRFPEEEEGGCELRVKFSRSADAPAYQQGQNQLYNELNLGRREEYDVLDKRRGRDPEMGGKPQRRKNPQEGLYNELQKDKMAEAYSEIGMKGERRRGKGHDGLYQGLSTATKDTYDALHMQALPPR

SEQ ID NO: 31310 - protein, 223 aa, synthetic construct; identical to SEQ ID NO: 30675

SEQ ID NO: 31311 - protein, 222 aa, synthetic construct
VKTDSTDHVKPKETENTKQPSKSCHKPKAIVHTEKVNMMSLTVLGLRMLFAKTVAVNFLLTAKLFFLKRGRKKLLYIFKQPFMRPVQTTQEEDGCSCRFPEEEEGGCELRVKFSRSADAPAYQQGQNQLYNELNLGRREEYDVLDKRRGRDPEMGGKPQRRKNPQEGLYNELQKDKMAEAYSEIGMKGERRRGKGHDGLYQGLSTATKDTYDALHMQALPPR

SEQ ID NO: 31312 - protein, 221 aa, synthetic construct
KTDSTDHVKPKETENTKQPSKSCHKPKAIVHTEKVNMMSLTVLGLRMLFAKTVAVNFLLTAKLFFLKRGRKKLLYIFKQPFMRPVQTTQEEDGCSCRFPEEEEGGCELRVKFSRSADAPAYQQGQNQLYNELNLGRREEYDVLDKRRGRDPEMGGKPQRRKNPQEGLYNELQKDKMAEAYSEIGMKGERRRGKGHDGLYQGLSTATKDTYDALHMQALPPR

SEQ ID NO: 31313 - protein, 220 aa, synthetic construct
TDSTDHVKPKETENTKQPSKSCHKPKAIVHTEKVNMMSLTVLGLRMLFAKTVAVNFLLTAKLFFLKRGRKKLLYIFKQPFMRPVQTTQEEDGCSCRFPEEEEGGCELRVKFSRSADAPAYQQGQNQLYNELNLGRREEYDVLDKRRGRDPEMGGKPQRRKNPQEGLYNELQKDKMAEAYSEIGMKGERRRGKGHDGLYQGLSTATKDTYDALHMQALPPR

SEQ ID NO: 31314 - protein, 219 aa, synthetic construct
DSTDHVKPKETENTKQPSKSCHKPKAIVHTEKVNMMSLTVLGLRMLFAKTVAVNFLLTAKLFFLKRGRKKLLYIFKQPFMRPVQTTQEEDGCSCRFPEEEEGGCELRVKFSRSADAPAYQQGQNQLYNELNLGRREEYDVLDKRRGRDPEMGGKPQRRKNPQEGLYNELQKDKMAEAYSEIGMKGERRRGKGHDGLYQGLSTATKDTYDALHMQALPPR

SEQ ID NO: 31315 - protein, 218 aa, synthetic construct
STDHVKPKETENTKQPSKSCHKPKAIVHTEKVNMMSLTVLGLRMLFAKTVAVNFLLTAKLFFLKRGRKKLLYIFKQPFMRPVQTTQEEDGCSCRFPEEEEGGCELRVKFSRSADAPAYQQGQNQLYNELNLGRREEYDVLDKRRGRDPEMGGKPQRRKNPQEGLYNELQKDKMAEAYSEIGMKGERRRGKGHDGLYQGLSTATKDTYDALHMQALPPR

SEQ ID NO: 31316 - protein, 217 aa, synthetic construct
TDHVKPKETENTKQPSKSCHKPKAIVHTEKVNMMSLTVLGLRMLFAKTVAVNFLLTAKLFFLKRGRKKLLYIFKQPFMRPVQTTQEEDGCSCRFPEEEEGGCELRVKFSRSADAPAYQQGQNQLYNELNLGRREEYDVLDKRRGRDPEMGGKPQRRKNPQEGLYNELQKDKMAEAYSEIGMKGERRRGKGHDGLYQGLSTATKDTYDALHMQALPPR

SEQ ID NO: 31317 - protein, 216 aa, synthetic construct; identical to SEQ ID NO: 30676

SEQ ID NO: 31318 - protein, 215 aa, synthetic construct
HVKPKETENTKQPSKSCHKPKAIVHTEKVNMMSLTVLGLRMLFAKTVAVNFLLTAKLFFLKRGRKKLLYIFKQPFMRPVQTTQEEDGCSCRFPEEEEGGCELRVKFSRSADAPAYQQGQNQLYNELNLGRREEYDVLDKRRGRDPEMGGKPQRRKNPQEGLYNELQKDKMAEAYSEIGMKGERRRGKGHDGLYQGLSTATKDTYDALHMQALPPR

SEQ ID NO: 31319 - protein, 214 aa, synthetic construct
VKPKETENTKQPSKSCHKPKAIVHTEKVNMMSLTVLGLRMLFAKTVAVNFLLTAKLFFLKRGRKKLLYIFKQPFMRPVQTTQEEDGCSCRFPEEEEGGCELRVKFSRSADAPAYQQGQNQLYNELNLGRREEYDVLDKRRGRDPEMGGKPQRRKNPQEGLYNELQKDKMAEAYSEIGMKGERRRGKGHDGLYQGLSTATKDTYDALHMQALPPR

SEQ ID NO: 31320 - protein, 213 aa, synthetic construct
KPKETENTKQPSKSCHKPKAIVHTEKVNMMSLTVLGLRMLFAKTVAVNFLLTAKLFFLKRGRKKLLYIFKQPFMRPVQTTQEEDGCSCRFPEEEEGGCELRVKFSRSADAPAYQQGQNQLYNELNLGRREEYDVLDKRRGRDPEMGGKPQRRKNPQEGLYNELQKDKMAEAYSEIGMKGERRRGKGHDGLYQGLSTATKDTYDALHMQALPPR

SEQ ID NO: 31321 - protein, 212 aa, synthetic construct
PKETENTKQPSKSCHKPKAIVHTEKVNMMSLTVLGLRMLFAKTVAVNFLLTAKLFFLKRGRKKLLYIFKQPFMRPVQTTQEEDGCSCRFPEEEEGGCELRVKFSRSADAPAYQQGQNQLYNELNLGRREEYDVLDKRRGRDPEMGGKPQRRKNPQEGLYNELQKDKMAEAYSEIGMKGERRRGKGHDGLYQGLSTATKDTYDALHMQALPPR

SEQ ID NO: 31322 - protein, 211 aa, synthetic construct
KETENTKQPSKSCHKPKAIVHTEKVNMMSLTVLGLRMLFAKTVAVNFLLTAKLFFLKRGRKKLLYIFKQPFMRPVQTTQEEDGCSCRFPEEEEGGCELRVKFSRSADAPAYQQGQNQLYNELNLGRREEYDVLDKRRGRDPEMGGKPQRRKNPQEGLYNELQKDKMAEAYSEIGMKGERRRGKGHDGLYQGLSTATKDTYDALHMQALPPR

SEQ ID NO: 31323 - protein, 210 aa, synthetic construct
ETENTKQPSKSCHKPKAIVHTEKVNMMSLTVLGLRMLFAKTVAVNFLLTAKLFFLKRGRKKLLYIFKQPFMRPVQTTQEEDGCSCRFPEEEEGGCELRVKFSRSADAPAYQQGQNQLYNELNLGRREEYDVLDKRRGRDPEMGGKPQRRKNPQEGLYNELQKDKMAEAYSEIGMKGERRRGKGHDGLYQGLSTATKDTYDALHMQALPPR

SEQ ID NO: 31324 - protein, 209 aa, synthetic construct
TENTKQPSKSCHKPKAIVHTEKVNMMSLTVLGLRMLFAKTVAVNFLLTAKLFFLKRGRKKLLYIFKQPFMRPVQTTQEEDGCSCRFPEEEEGGCELRVKFSRSADAPAYQQGQNQLYNELNLGRREEYDVLDKRRGRDPEMGGKPQRRKNPQEGLYNELQKDKMAEAYSEIGMKGERRRGKGHDGLYQGLSTATKDTYDALHMQALPPR

SEQ ID NO: 31325 - protein, 208 aa, synthetic construct
ENTKQPSKSCHKPKAIVHTEKVNMMSLTVLGLRMLFAKTVAVNFLLTAKLFFLKRGRKKLLYIFKQPFMRPVQTTQEEDGCSCRFPEEEEGGCELRVKFSRSADAPAYQQGQNQLYNELNLGRREEYDVLDKRRGRDPEMGGKPQRRKNPQEGLYNELQKDKMAEAYSEIGMKGERRRGKGHDGLYQGLSTATKDTYDALHMQALPPR

SEQ ID NO: 31326 - protein, 207 aa, synthetic construct
NTKQPSKSCHKPKAIVHTEKVNMMSLTVLGLRMLFAKTVAVNFLLTAKLFFLKRGRKKLLYIFKQPFMRPVQTTQEEDGCSCRFPEEEEGGCELRVKFSRSADAPAYQQGQNQLYNELNLGRREEYDVLDKRRGRDPEMGGKPQRRKNPQEGLYNELQKDKMAEAYSEIGMKGERRRGKGHDGLYQGLSTATKDTYDALHMQALPPR

SEQ ID NO: 31327 - protein, 291 aa, synthetic construct
IQNPEPAVYQLKDPRSQDSTLCLFTDFDSQINVPKTMESGTFITDKCVLDMKAMDSKSNGAIAWSNQTSFTCQDIFKETNATYPSSDVPCDATLTEKSFETDMNLNFQNLSVMGLRILLLKVAGFNLLMTLRLWSSKRGRKKLLYIFKQPFMRPVQTTQEEDGCSCRFPEEEEGGCELRVKFSRSADAPAYQQGQNQLYNELNLGRREEYDVLDKRRGRDPEMGGKPQRRKNPQEGLYNELQKDKMAEAYSEIGMKGERRRGKGHDGLYQGLSTATKDTYDALHMQALPPR

SEQ ID NO: 31328 - protein, 290 aa, synthetic construct
QNPEPAVYQLKDPRSQDSTLCLFTDFDSQINVPKTMESGTFITDKCVLDMKAMDSKSNGAIAWSNQTSFTCQDIFKETNATYPSSDVPCDATLTEKSFETDMNLNFQNLSVMGLRILLLKVAGFNLLMTLRLWSSKRGRKKLLYIFKQPFMRPVQTTQEEDGCSCRFPEEEEGGCELRVKFSRSADAPAYQQGQNQLYNELNLGRREEYDVLDKRRGRDPEMGGKPQRRKNPQEGLYNELQKDKMAEAYSEIGMKGERRRGKGHDGLYQGLSTATKDTYDALHMQALPPR

SEQ ID NO: 31329 - protein, 289 aa, synthetic construct
NPEPAVYQLKDPRSQDSTLCLFTDFDSQINVPKTMESGTFITDKCVLDMKAMDSKSNGAIAWSNQTSFTCQDIFKETNATYPSSDVPCDATLTEKSFETDMNLNFQNLSVMGLRILLLKVAGFNLLMTLRLWSSKRGRKKLLYIFKQPFMRPVQTTQEEDGCSCRFPEEEEGGCELRVKFSRSADAPAYQQGQNQLYNELNLGRREEYDVLDKRRGRDPEMGGKPQRRKNPQEGLYNELQKDKMAEAYSEIGMKGERRRGKGHDGLYQGLSTATKDTYDALHMQALPPR

SEQ ID NO: 31330 - protein, 288 aa, synthetic construct
PEPAVYQLKDPRSQDSTLCLFTDFDSQINVPKTMESGTFITDKCVLDMKAMDSKSNGAIAWSNQTSFTCQDIFKETNATYPSSDVPCDATLTEKSFETDMNLNFQNLSVMGLRILLLKVAGFNLLMTLRLWSSKRGRKKLLYIFKQPFMRPVQTTQEEDGCSCRFPEEEEGGCELRVKFSRSADAPAYQQGQNQLYNELNLGRREEYDVLDKRRGRDPEMGGKPQRRKNPQEGLYNELQKDKMAEAYSEIGMKGERRRGKGHDGLYQGLSTATKDTYDALHMQALPPR

SEQ ID NO: 31331 - protein, 287 aa, synthetic construct
EPAVYQLKDPRSQDSTLCLFTDFDSQINVPKTMESGTFITDKCVLDMKAMDSKSNGAIAWSNQTSFTCQDIFKETNATYPSSDVPCDATLTEKSFETDMNLNFQNLSVMGLRILLLKVAGFNLLMTLRLWSSKRGRKKLLYIFKQPFMRPVQTTQEEDGCSCRFPEEEEGGCELRVKFSRSADAPAYQQGQNQLYNELNLGRREEYDVLDKRRGRDPEMGGKPQRRKNPQEGLYNELQKDKMAEAYSEIGMKGERRRGKGHDGLYQGLSTATKDTYDALHMQALPPR

SEQ ID NO: 31332 - protein, 286 aa, synthetic construct
PAVYQLKDPRSQDSTLCLFTDFDSQINVPKTMESGTFITDKCVLDMKAMDSKSNGAIAWSNQTSFTCQDIFKETNATYPSSDVPCDATLTEKSFETDMNLNFQNLSVMGLRILLLKVAGFNLLMTLRLWSSKRGRKKLLYIFKQPFMRPVQTTQEEDGCSCRFPEEEEGGCELRVKFSRSADAPAYQQGQNQLYNELNLGRREEYDVLDKRRGRDPEMGGKPQRRKNPQEGLYNELQKDKMAEAYSEIGMKGERRRGKGHDGLYQGLSTATKDTYDALHMQALPPR

SEQ ID NO: 31333 - protein, 285 aa, synthetic construct
AVYQLKDPRSQDSTLCLFTDFDSQINVPKTMESGTFITDKCVLDMKAMDSKSNGAIAWSNQTSFTCQDIFKETNATYPSSDVPCDATLTEKSFETDMNLNFQNLSVMGLRILLLKVAGFNLLMTLRLWSSKRGRKKLLYIFKQPFMRPVQTTQEEDGCSCRFPEEEEGGCELRVKFSRSADAPAYQQGQNQLYNELNLGRREEYDVLDKRRGRDPEMGGKPQRRKNPQEGLYNELQKDKMAEAYSEIGMKGERRRGKGHDGLYQGLSTATKDTYDALHMQALPPR

SEQ ID NO: 31334 - protein, 284 aa, synthetic construct
VYQLKDPRSQDSTLCLFTDFDSQINVPKTMESGTFITDKCVLDMKAMDSKSNGAIAWSNQTSFTCQDIFKETNATYPSSDVPCDATLTEKSFETDMNLNFQNLSVMGLRILLLKVAGFNLLMTLRLWSSKRGRKKLLYIFKQPFMRPVQTTQEEDGCSCRFPEEEEGGCELRVKFSRSADAPAYQQGQNQLYNELNLGRREEYDVLDKRRGRDPEMGGKPQRRKNPQEGLYNELQKDKMAEAYSEIGMKGERRRGKGHDGLYQGLSTATKDTYDALHMQALPPR

SEQ ID NO: 31335 - protein, 283 aa, synthetic construct
YQLKDPRSQDSTLCLFTDFDSQINVPKTMESGTFITDKCVLDMKAMDSKSNGAIAWSNQTSFTCQDIFKETNATYPSSDVPCDATLTEKSFETDMNLNFQNLSVMGLRILLLKVAGFNLLMTLRLWSSKRGRKKLLYIFKQPFMRPVQTTQEEDGCSCRFPEEEEGGCELRVKFSRSADAPAYQQGQNQLYNELNLGRREEYDVLDKRRGRDPEMGGKPQRRKNPQEGLYNELQKDKMAEAYSEIGMKGERRRGKGHDGLYQGLSTATKDTYDALHMQALPPR

SEQ ID NO: 31336 - protein, 282 aa, synthetic construct
QLKDPRSQDSTLCLFTDFDSQINVPKTMESGTFITDKCVLDMKAMDSKSNGAIAWSNQTSFTCQDIFKETNATYPSSDVPCDATLTEKSFETDMNLNFQNLSVMGLRILLLKVAGFNLLMTLRLWSSKRGRKKLLYIFKQPFMRPVQTTQEEDGCSCRFPEEEEGGCELRVKFSRSADAPAYQQGQNQLYNELNLGRREEYDVLDKRRGRDPEMGGKPQRRKNPQEGLYNELQKDKMAEAYSEIGMKGERRRGKGHDGLYQGLSTATKDTYDALHMQALPPR

SEQ ID NO: 31337 - protein, 281 aa, synthetic construct
LKDPRSQDSTLCLFTDFDSQINVPKTMESGTFITDKCVLDMKAMDSKSNGAIAWSNQTSFTCQDIFKETNATYPSSDVPCDATLTEKSFETDMNLNFQNLSVMGLRILLLKVAGFNLLMTLRLWSSKRGRKKLLYIFKQPFMRPVQTTQEEDGCSCRFPEEEEGGCELRVKFSRSADAPAYQQGQNQLYNELNLGRREEYDVLDKRRGRDPEMGGKPQRRKNPQEGLYNELQKDKMAEAYSEIGMKGERRRGKGHDGLYQGLSTATKDTYDALHMQALPPR

SEQ ID NO: 31338 - protein, 276 aa, synthetic construct
SQDSTLCLFTDFDSQINVPKTMESGTFITDKCVLDMKAMDSKSNGAIAWSNQTSFTCQDIFKETNATYPSSDVPCDATLTEKSFETDMNLNFQNLSVMGLRILLLKVAGFNLLMTLRLWSSKRGRKKLLYIFKQPFMRPVQTTQEEDGCSCRFPEEEEGGCELRVKFSRSADAPAYQQGQNQLYNELNLGRREEYDVLDKRRGRDPEMGGKPQRRKNPQEGLYNELQKDKMAEAYSEIGMKGERRRGKGHDGLYQGLSTATKDTYDALHMQALPPR

SEQ ID NO: 31339 - protein, 271 aa, synthetic construct
LCLFTDFDSQINVPKTMESGTFITDKCVLDMKAMDSKSNGAIAWSNQTSFTCQDIFKETNATYPSSDVPCDATLTEKSFETDMNLNFQNLSVMGLRILLLKVAGFNLLMTLRLWSSKRGRKKLLYIFKQPFMRPVQTTQEEDGCSCRFPEEEEGGCELRVKFSRSADAPAYQQGQNQLYNELNLGRREEYDVLDKRRGRDPEMGGKPQRRKNPQEGLYNELQKDKMAEAYSEIGMKGERRRGKGHDGLYQGLSTATKDTYDALHMQALPPR

SEQ ID NO: 31340 - protein, 291 aa, synthetic construct
IQNPEPAVYQLKDPRSQDSTLCLFTDFDSQINVPKTMESGTFITDKCVLDMKAMDSKSNGAIAWSNQTSFTCQDIFKETNATYPSSDVPCDATLTEKSFETDMNLNFQNLLVVGLRILLLKVAGFNLLMTLRLWSSKRGRKKLLYIFKQPFMRPVQTTQEEDGCSCRFPEEEEGGCELRVKFSRSADAPAYQQGQNQLYNELNLGRREEYDVLDKRRGRDPEMGGKPQRRKNPQEGLYNELQKDKMAEAYSEIGMKGERRRGKGHDGLYQGLSTATKDTYDALHMQALPPR

SEQ ID NO: 31341 - protein, 290 aa, synthetic construct
QNPEPAVYQLKDPRSQDSTLCLFTDFDSQINVPKTMESGTFITDKCVLDMKAMDSKSNGAIAWSNQTSFTCQDIFKETNATYPSSDVPCDATLTEKSFETDMNLNFQNLLVVGLRILLLKVAGFNLLMTLRLWSSKRGRKKLLYIFKQPFMRPVQTTQEEDGCSCRFPEEEEGGCELRVKFSRSADAPAYQQGQNQLYNELNLGRREEYDVLDKRRGRDPEMGGKPQRRKNPQEGLYNELQKDKMAEAYSEIGMKGERRRGKGHDGLYQGLSTATKDTYDALHMQALPPR

SEQ ID NO: 31342 - protein, 289 aa, synthetic construct
NPEPAVYQLKDPRSQDSTLCLFTDFDSQINVPKTMESGTFITDKCVLDMKAMDSKSNGAIAWSNQTSFTCQDIFKETNATYPSSDVPCDATLTEKSFETDMNLNFQNLLVVGLRILLLKVAGFNLLMTLRLWSSKRGRKKLLYIFKQPFMRPVQTTQEEDGCSCRFPEEEEGGCELRVKFSRSADAPAYQQGQNQLYNELNLGRREEYDVLDKRRGRDPEMGGKPQRRKNPQEGLYNELQKDKMAEAYSEIGMKGERRRGKGHDGLYQGLSTATKDTYDALHMQALPPR

SEQ ID NO: 31343 - protein, 288 aa, synthetic construct
PEPAVYQLKDPRSQDSTLCLFTDFDSQINVPKTMESGTFITDKCVLDMKAMDSKSNGAIAWSNQTSFTCQDIFKETNATYPSSDVPCDATLTEKSFETDMNLNFQNLLVVGLRILLLKVAGFNLLMTLRLWSSKRGRKKLLYIFKQPFMRPVQTTQEEDGCSCRFPEEEEGGCELRVKFSRSADAPAYQQGQNQLYNELNLGRREEYDVLDKRRGRDPEMGGKPQRRKNPQEGLYNELQKDKMAEAYSEIGMKGERRRGKGHDGLYQGLSTATKDTYDALHMQALPPR

SEQ ID NO: 31344 - protein, 287 aa, synthetic construct
EPAVYQLKDPRSQDSTLCLFTDFDSQINVPKTMESGTFITDKCVLDMKAMDSKSNGAIAWSNQTSFTCQDIFKETNATYPSSDVPCDATLTEKSFETDMNLNFQNLLVVGLRILLLKVAGFNLLMTLRLWSSKRGRKKLLYIFKQPFMRPVQTTQEEDGCSCRFPEEEEGGCELRVKFSRSADAPAYQQGQNQLYNELNLGRREEYDVLDKRRGRDPEMGGKPQRRKNPQEGLYNELQKDKMAEAYSEIGMKGERRRGKGHDGLYQGLSTATKDTYDALHMQALPPR

SEQ ID NO: 31345 - protein, 286 aa, synthetic construct
PAVYQLKDPRSQDSTLCLFTDFDSQINVPKTMESGTFITDKCVLDMKAMDSKSNGAIAWSNQTSFTCQDIFKETNATYPSSDVPCDATLTEKSFETDMNLNFQNLLVVGLRILLLKVAGFNLLMTLRLWSSKRGRKKLLYIFKQPFMRPVQTTQEEDGCSCRFPEEEEGGCELRVKFSRSADAPAYQQGQNQLYNELNLGRREEYDVLDKRRGRDPEMGGKPQRRKNPQEGLYNELQKDKMAEAYSEIGMKGERRRGKGHDGLYQGLSTATKDTYDALHMQALPPR

SEQ ID NO: 31346 - protein, 285 aa, synthetic construct
AVYQLKDPRSQDSTLCLFTDFDSQINVPKTMESGTFITDKCVLDMKAMDSKSNGAIAWSNQTSFTCQDIFKETNATYPSSDVPCDATLTEKSFETDMNLNFQNLLVVGLRILLLKVAGFNLLMTLRLWSSKRGRKKLLYIFKQPFMRPVQTTQEEDGCSCRFPEEEEGGCELRVKFSRSADAPAYQQGQNQLYNELNLGRREEYDVLDKRRGRDPEMGGKPQRRKNPQEGLYNELQKDKMAEAYSEIGMKGERRRGKGHDGLYQGLSTATKDTYDALHMQALPPR

SEQ ID NO: 31347 - protein, 284 aa, synthetic construct
VYQLKDPRSQDSTLCLFTDFDSQINVPKTMESGTFITDKCVLDMKAMDSKSNGAIAWSNQTSFTCQDIFKETNATYPSSDVPCDATLTEKSFETDMNLNFQNLLVVGLRILLLKVAGFNLLMTLRLWSSKRGRKKLLYIFKQPFMRPVQTTQEEDGCSCRFPEEEEGGCELRVKFSRSADAPAYQQGQNQLYNELNLGRREEYDVLDKRRGRDPEMGGKPQRRKNPQEGLYNELQKDKMAEAYSEIGMKGERRRGKGHDGLYQGLSTATKDTYDALHMQALPPR

SEQ ID NO: 31348 - protein, 283 aa, synthetic construct
YQLKDPRSQDSTLCLFTDFDSQINVPKTMESGTFITDKCVLDMKAMDSKSNGAIAWSNQTSFTCQDIFKETNATYPSSDVPCDATLTEKSFETDMNLNFQNLLVVGLRILLLKVAGFNLLMTLRLWSSKRGRKKLLYIFKQPFMRPVQTTQEEDGCSCRFPEEEEGGCELRVKFSRSADAPAYQQGQNQLYNELNLGRREEYDVLDKRRGRDPEMGGKPQRRKNPQEGLYNELQKDKMAEAYSEIGMKGERRRGKGHDGLYQGLSTATKDTYDALHMQALPPR

SEQ ID NO: 31349 - protein, 282 aa, synthetic construct
QLKDPRSQDSTLCLFTDFDSQINVPKTMESGTFITDKCVLDMKAMDSKSNGAIAWSNQTSFTCQDIFKETNATYPSSDVPCDATLTEKSFETDMNLNFQNLLVVGLRILLLKVAGFNLLMTLRLWSSKRGRKKLLYIFKQPFMRPVQTTQEEDGCSCRFPEEEEGGCELRVKFSRSADAPAYQQGQNQLYNELNLGRREEYDVLDKRRGRDPEMGGKPQRRKNPQEGLYNELQKDKMAEAYSEIGMKGERRRGKGHDGLYQGLSTATKDTYDALHMQALPPR

SEQ ID NO: 31350 - protein, 281 aa, synthetic construct
LKDPRSQDSTLCLFTDFDSQINVPKTMESGTFITDKCVLDMKAMDSKSNGAIAWSNQTSFTCQDIFKETNATYPSSDVPCDATLTEKSFETDMNLNFQNLLVVGLRILLLKVAGFNLLMTLRLWSSKRGRKKLLYIFKQPFMRPVQTTQEEDGCSCRFPEEEEGGCELRVKFSRSADAPAYQQGQNQLYNELNLGRREEYDVLDKRRGRDPEMGGKPQRRKNPQEGLYNELQKDKMAEAYSEIGMKGERRRGKGHDGLYQGLSTATKDTYDALHMQALPPR

SEQ ID NO: 31351 - protein, 276 aa, synthetic construct
SQDSTLCLFTDFDSQINVPKTMESGTFITDKCVLDMKAMDSKSNGAIAWSNQTSFTCQDIFKETNATYPSSDVPCDATLTEKSFETDMNLNFQNLLVVGLRILLLKVAGFNLLMTLRLWSSKRGRKKLLYIFKQPFMRPVQTTQEEDGCSCRFPEEEEGGCELRVKFSRSADAPAYQQGQNQLYNELNLGRREEYDVLDKRRGRDPEMGGKPQRRKNPQEGLYNELQKDKMAEAYSEIGMKGERRRGKGHDGLYQGLSTATKDTYDALHMQALPPR

SEQ ID NO: 31352 - protein, 271 aa, synthetic construct
LCLFTDFDSQINVPKTMESGTFITDKCVLDMKAMDSKSNGAIAWSNQTSFTCQDIFKETNATYPSSDVPCDATLTEKSFETDMNLNFQNLLVVGLRILLLKVAGFNLLMTLRLWSSKRGRKKLLYIFKQPFMRPVQTTQEEDGCSCRFPEEEEGGCELRVKFSRSADAPAYQQGQNQLYNELNLGRREEYDVLDKRRGRDPEMGGKPQRRKNPQEGLYNELQKDKMAEAYSEIGMKGERRRGKGHDGLYQGLSTATKDTYDALHMQALPPR

SEQ ID NO: 31353 - protein, 326 aa, synthetic construct
EDLRNVTPPKVSLFEPSKAEIANKQKATLVCLARGFFPDHVELSWWVNGKEVHSGVCTDPQAYKESNYSYCLSSRLRVSATFWHNPRNHFRCQVQFHGLSEEDKWPEGSPKPVTQNISAEAWGRACGITSSYQQGVLSATILYEILLGKATLYAVLVSTLVVMAMVKRKNSKRGRKKLLYIFKQPFMRPVQTTQEEDGCSCRFPEEEEGGCELRVKFSRSADAPAYQQGQNQLYNELNLGRREEYDVLDKRRGRDPEMGGKPQRRKNPQEGLYNELQKDKMAEAYSEIGMKGERRRGKGHDGLYQGLSTATKDTYDALHMQALPPR

SEQ ID NO: 31354 - protein, 325 aa, synthetic construct
DLRNVTPPKVSLFEPSKAEIANKQKATLVCLARGFFPDHVELSWWVNGKEVHSGVCTDPQAYKESNYSYCLSSRLRVSATFWHNPRNHFRCQVQFHGLSEEDKWPEGSPKPVTQNISAEAWGRACGITSSYQQGVLSATILYEILLGKATLYAVLVSTLVVMAMVKRKNSKRGRKKLLYIFKQPFMRPVQTTQEEDGCSCRFPEEEEGGCELRVKFSRSADAPAYQQGQNQLYNELNLGRREEYDVLDKRRGRDPEMGGKPQRRKNPQEGLYNELQKDKMAEAYSEIGMKGERRRGKGHDGLYQGLSTATKDTYDALHMQALPPR

SEQ ID NO: 31355 - protein, 323 aa, synthetic construct
RNVTPPKVSLFEPSKAEIANKQKATLVCLARGFFPDHVELSWWVNGKEVHSGVCTDPQAYKESNYSYCLSSRLRVSATFWHNPRNHFRCQVQFHGLSEEDKWPEGSPKPVTQNISAEAWGRACGITSSYQQGVLSATILYEILLGKATLYAVLVSTLVVMAMVKRKNSKRGRKKLLYIFKQPFMRPVQTTQEEDGCSCRFPEEEEGGCELRVKFSRSADAPAYQQGQNQLYNELNLGRREEYDVLDKRRGRDPEMGGKPQRRKNPQEGLYNELQKDKMAEAYSEIGMKGERRRGKGHDGLYQGLSTATKDTYDALHMQALPPR

SEQ ID NO: 31356 - protein, 322 aa, synthetic construct
NVTPPKVSLFEPSKAEIANKQKATLVCLARGFFPDHVELSWWVNGKEVHSGVCTDPQAYKESNYSYCLSSRLRVSATFWHNPRNHFRCQVQFHGLSEEDKWPEGSPKPVTQNISAEAWGRACGITSSYQQGVLSATILYEILLGKATLYAVLVSTLVVMAMVKRKNSKRGRKKLLYIFKQPFMRPVQTTQEEDGCSCRFPEEEEGGCELRVKFSRSADAPAYQQGQNQLYNELNLGRREEYDVLDKRRGRDPEMGGKPQRRKNPQEGLYNELQKDKMAEAYSEIGMKGERRRGKGHDGLYQGLSTATKDTYDALHMQALPPR

SEQ ID NO: 31357 - protein, 321 aa, synthetic construct
VTPPKVSLFEPSKAEIANKQKATLVCLARGFFPDHVELSWWVNGKEVHSGVCTDPQAYKESNYSYCLSSRLRVSATFWHNPRNHFRCQVQFHGLSEEDKWPEGSPKPVTQNISAEAWGRACGITSSYQQGVLSATILYEILLGKATLYAVLVSTLVVMAMVKRKNSKRGRKKLLYIFKQPFMRPVQTTQEEDGCSCRFPEEEEGGCELRVKFSRSADAPAYQQGQNQLYNELNLGRREEYDVLDKRRGRDPEMGGKPQRRKNPQEGLYNELQKDKMAEAYSEIGMKGERRRGKGHDGLYQGLSTATKDTYDALHMQALPPR

SEQ ID NO: 31358 - protein, 320 aa, synthetic construct
TPPKVSLFEPSKAEIANKQKATLVCLARGFFPDHVELSWWVNGKEVHSGVCTDPQAYKESNYSYCLSSRLRVSATFWHNPRNHFRCQVQFHGLSEEDKWPEGSPKPVTQNISAEAWGRACGITSSYQQGVLSATILYEILLGKATLYAVLVSTLVVMAMVKRKNSKRGRKKLLYIFKQPFMRPVQTTQEEDGCSCRFPEEEEGGCELRVKFSRSADAPAYQQGQNQLYNELNLGRREEYDVLDKRRGRDPEMGGKPQRRKNPQEGLYNELQKDKMAEAYSEIGMKGERRRGKGHDGLYQGLSTATKDTYDALHMQALPPR

SEQ ID NO: 31359 - protein, 319 aa, synthetic construct
PPKVSLFEPSKAEIANKQKATLVCLARGFFPDHVELSWWVNGKEVHSGVCTDPQAYKESNYSYCLSSRLRVSATFWHNPRNHFRCQVQFHGLSEEDKWPEGSPKPVTQNISAEAWGRACGITSSYQQGVLSATILYEILLGKATLYAVLVSTLVVMAMVKRKNSKRGRKKLLYIFKQPFMRPVQTTQEEDGCSCRFPEEEEGGCELRVKFSRSADAPAYQQGQNQLYNELNLGRREEYDVLDKRRGRDPEMGGKPQRRKNPQEGLYNELQKDKMAEAYSEIGMKGERRRGKGHDGLYQGLSTATKDTYDALHMQALPPR

SEQ ID NO: 31360 - protein, 318 aa, synthetic construct
PKVSLFEPSKAEIANKQKATLVCLARGFFPDHVELSWWVNGKEVHSGVCTDPQAYKESNYSYCLSSRLRVSATFWHNPRNHFRCQVQFHGLSEEDKWPEGSPKPVTQNISAEAWGRACGITSSYQQGVLSATILYEILLGKATLYAVLVSTLVVMAMVKRKNSKRGRKKLLYIFKQPFMRPVQTTQEEDGCSCRFPEEEEGGCELRVKFSRSADAPAYQQGQNQLYNELNLGRREEYDVLDKRRGRDPEMGGKPQRRKNPQEGLYNELQKDKMAEAYSEIGMKGERRRGKGHDGLYQGLSTATKDTYDALHMQALPPR

SEQ ID NO: 31361 - protein, 317 aa, synthetic construct
KVSLFEPSKAEIANKQKATLVCLARGFFPDHVELSWWVNGKEVHSGVCTDPQAYKESNYSYCLSSRLRVSATFWHNPRNHFRCQVQFHGLSEEDKWPEGSPKPVTQNISAEAWGRACGITSSYQQGVLSATILYEILLGKATLYAVLVSTLVVMAMVKRKNSKRGRKKLLYIFKQPFMRPVQTTQEEDGCSCRFPEEEEGGCELRVKFSRSADAPAYQQGQNQLYNELNLGRREEYDVLDKRRGRDPEMGGKPQRRKNPQEGLYNELQKDKMAEAYSEIGMKGERRRGKGHDGLYQGLSTATKDTYDALHMQALPPR

SEQ ID NO: 31362 - protein, 316 aa, synthetic construct
VSLFEPSKAEIANKQKATLVCLARGFFPDHVELSWWVNGKEVHSGVCTDPQAYKESNYSYCLSSRLRVSATFWHNPRNHFRCQVQFHGLSEEDKWPEGSPKPVTQNISAEAWGRACGITSSYQQGVLSATILYEILLGKATLYAVLVSTLVVMAMVKRKNSKRGRKKLLYIFKQPFMRPVQTTQEEDGCSCRFPEEEEGGCELRVKFSRSADAPAYQQGQNQLYNELNLGRREEYDVLDKRRGRDPEMGGKPQRRKNPQEGLYNELQKDKMAEAYSEIGMKGERRRGKGHDGLYQGLSTATKDTYDALHMQALPPR

SEQ ID NO: 31363 - protein, 326 aa, synthetic construct; identical to SEQ ID NO: 31353

SEQ ID NO: 31364 - protein, 321 aa, synthetic construct; identical to SEQ ID NO: 31357

SEQ ID NO: 31365 - protein, 316 aa, synthetic construct; identical to SEQ ID NO: 31362

SEQ ID NO: 31366 - protein, 295 aa, synthetic construct
IQNPDPAVYQLRDSKSSDKSVCLFTDFDSQTNVSQSKDSDVYITDKCVLDMRSMDFKSNSAVAWSNKSDFACANAFNNSIIPEDTFFPSPESSCDVKLVEKSFETDTNLNFQNLLVIVLRILLLKVAGFNLLMTLRLWSSKRGRKKLLYIFKQPFMRPVQTTQEEDGCSCRFPEEEEGGCELRVKFSRSADAPAYQQGQNQLYNELNLGRREEYDVLDKRRGRDPEMGGKPQRRKNPQEGLYNELQKDKMAEAYSEIGMKGERRRGKGHDGLYQGLSTATKDTYDALHMQALPPR

SEQ ID NO: 31367 - protein, 294 aa, synthetic construct
QNPDPAVYQLRDSKSSDKSVCLFTDFDSQTNVSQSKDSDVYITDKCVLDMRSMDFKSNSAVAWSNKSDFACANAFNNSIIPEDTFFPSPESSCDVKLVEKSFETDTNLNFQNLLVIVLRILLLKVAGFNLLMTLRLWSSKRGRKKLLYIFKQPFMRPVQTTQEEDGCSCRFPEEEEGGCELRVKFSRSADAPAYQQGQNQLYNELNLGRREEYDVLDKRRGRDPEMGGKPQRRKNPQEGLYNELQKDKMAEAYSEIGMKGERRRGKGHDGLYQGLSTATKDTYDALHMQALPPR

SEQ ID NO: 31368 - protein, 293 aa, synthetic construct
NPDPAVYQLRDSKSSDKSVCLFTDFDSQTNVSQSKDSDVYITDKCVLDMRSMDFKSNSAVAWSNKSDFACANAFNNSIIPEDTFFPSPESSCDVKLVEKSFETDTNLNFQNLLVIVLRILLLKVAGFNLLMTLRLWSSKRGRKKLLYIFKQPFMRPVQTTQEEDGCSCRFPEEEEGGCELRVKFSRSADAPAYQQGQNQLYNELNLGRREEYDVLDKRRGRDPEMGGKPQRRKNPQEGLYNELQKDKMAEAYSEIGMKGERRRGKGHDGLYQGLSTATKDTYDALHMQALPPR

SEQ ID NO: 31369 - protein, 292 aa, synthetic construct
PDPAVYQLRDSKSSDKSVCLFTDFDSQTNVSQSKDSDVYITDKCVLDMRSMDFKSNSAVAWSNKSDFACANAFNNSIIPEDTFFPSPESSCDVKLVEKSFETDTNLNFQNLLVIVLRILLLKVAGFNLLMTLRLWSSKRGRKKLLYIFKQPFMRPVQTTQEEDGCSCRFPEEEEGGCELRVKFSRSADAPAYQQGQNQLYNELNLGRREEYDVLDKRRGRDPEMGGKPQRRKNPQEGLYNELQKDKMAEAYSEIGMKGERRRGKGHDGLYQGLSTATKDTYDALHMQALPPR

SEQ ID NO: 31370 - protein, 291 aa, synthetic construct
DPAVYQLRDSKSSDKSVCLFTDFDSQTNVSQSKDSDVYITDKCVLDMRSMDFKSNSAVAWSNKSDFACANAFNNSIIPEDTFFPSPESSCDVKLVEKSFETDTNLNFQNLLVIVLRILLLKVAGFNLLMTLRLWSSKRGRKKLLYIFKQPFMRPVQTTQEEDGCSCRFPEEEEGGCELRVKFSRSADAPAYQQGQNQLYNELNLGRREEYDVLDKRRGRDPEMGGKPQRRKNPQEGLYNELQKDKMAEAYSEIGMKGERRRGKGHDGLYQGLSTATKDTYDALHMQALPPR

SEQ ID NO: 31371 - protein, 290 aa, synthetic construct
PAVYQLRDSKSSDKSVCLFTDFDSQTNVSQSKDSDVYITDKCVLDMRSMDFKSNSAVAWSNKSDFACANAFNNSIIPEDTFFPSPESSCDVKLVEKSFETDTNLNFQNLLVIVLRILLLKVAGFNLLMTLRLWSSKRGRKKLLYIFKQPFMRPVQTTQEEDGCSCRFPEEEEGGCELRVKFSRSADAPAYQQGQNQLYNELNLGRREEYDVLDKRRGRDPEMGGKPQRRKNPQEGLYNELQKDKMAEAYSEIGMKGERRRGKGHDGLYQGLSTATKDTYDALHMQALPPR

SEQ ID NO: 31372 - protein, 289 aa, synthetic construct
AVYQLRDSKSSDKSVCLFTDFDSQTNVSQSKDSDVYITDKCVLDMRSMDFKSNSAVAWSNKSDFACANAFNNSIIPEDTFFPSPESSCDVKLVEKSFETDTNLNFQNLLVIVLRILLLKVAGFNLLMTLRLWSSKRGRKKLLYIFKQPFMRPVQTTQEEDGCSCRFPEEEEGGCELRVKFSRSADAPAYQQGQNQLYNELNLGRREEYDVLDKRRGRDPEMGGKPQRRKNPQEGLYNELQKDKMAEAYSEIGMKGERRRGKGHDGLYQGLSTATKDTYDALHMQALPPR

SEQ ID NO: 31373 - protein, 288 aa, synthetic construct
VYQLRDSKSSDKSVCLFTDFDSQTNVSQSKDSDVYITDKCVLDMRSMDFKSNSAVAWSNKSDFACANAFNNSIIPEDTFFPSPESSCDVKLVEKSFETDTNLNFQNLLVIVLRILLLKVAGFNLLMTLRLWSSKRGRKKLLYIFKQPFMRPVQTTQEEDGCSCRFPEEEEGGCELRVKFSRSADAPAYQQGQNQLYNELNLGRREEYDVLDKRRGRDPEMGGKPQRRKNPQEGLYNELQKDKMAEAYSEIGMKGERRRGKGHDGLYQGLSTATKDTYDALHMQALPPR

SEQ ID NO: 31374 - protein, 287 aa, synthetic construct
YQLRDSKSSDKSVCLFTDFDSQTNVSQSKDSDVYITDKCVLDMRSMDFKSNSAVAWSNKSDFACANAFNNSIIPEDTFFPSPESSCDVKLVEKSFETDTNLNFQNLLVIVLRILLLKVAGFNLLMTLRLWSSKRGRKKLLYIFKQPFMRPVQTTQEEDGCSCRFPEEEEGGCELRVKFSRSADAPAYQQGQNQLYNELNLGRREEYDVLDKRRGRDPEMGGKPQRRKNPQEGLYNELQKDKMAEAYSEIGMKGERRRGKGHDGLYQGLSTATKDTYDALHMQALPPR

SEQ ID NO: 31375 - protein, 286 aa, synthetic construct
QLRDSKSSDKSVCLFTDFDSQTNVSQSKDSDVYITDKCVLDMRSMDFKSNSAVAWSNKSDFACANAFNNSIIPEDTFFPSPESSCDVKLVEKSFETDTNLNFQNLLVIVLRILLLKVAGFNLLMTLRLWSSKRGRKKLLYIFKQPFMRPVQTTQEEDGCSCRFPEEEEGGCELRVKFSRSADAPAYQQGQNQLYNELNLGRREEYDVLDKRRGRDPEMGGKPQRRKNPQEGLYNELQKDKMAEAYSEIGMKGERRRGKGHDGLYQGLSTATKDTYDALHMQALPPR

SEQ ID NO: 31376 - protein, 285 aa, synthetic construct
LRDSKSSDKSVCLFTDFDSQTNVSQSKDSDVYITDKCVLDMRSMDFKSNSAVAWSNKSDFACANAFNNSIIPEDTFFPSPESSCDVKLVEKSFETDTNLNFQNLLVIVLRILLLKVAGFNLLMTLRLWSSKRGRKKLLYIFKQPFMRPVQTTQEEDGCSCRFPEEEEGGCELRVKFSRSADAPAYQQGQNQLYNELNLGRREEYDVLDKRRGRDPEMGGKPQRRKNPQEGLYNELQKDKMAEAYSEIGMKGERRRGKGHDGLYQGLSTATKDTYDALHMQALPPR

SEQ ID NO: 31377 - protein, 284 aa, synthetic construct
RDSKSSDKSVCLFTDFDSQTNVSQSKDSDVYITDKCVLDMRSMDFKSNSAVAWSNKSDFACANAFNNSIIPEDTFFPSPESSCDVKLVEKSFETDTNLNFQNLLVIVLRILLLKVAGFNLLMTLRLWSSKRGRKKLLYIFKQPFMRPVQTTQEEDGCSCRFPEEEEGGCELRVKFSRSADAPAYQQGQNQLYNELNLGRREEYDVLDKRRGRDPEMGGKPQRRKNPQEGLYNELQKDKMAEAYSEIGMKGERRRGKGHDGLYQGLSTATKDTYDALHMQALPPR

SEQ ID NO: 31378 - protein, 283 aa, synthetic construct
DSKSSDKSVCLFTDFDSQTNVSQSKDSDVYITDKCVLDMRSMDFKSNSAVAWSNKSDFACANAFNNSIIPEDTFFPSPESSCDVKLVEKSFETDTNLNFQNLLVIVLRILLLKVAGFNLLMTLRLWSSKRGRKKLLYIFKQPFMRPVQTTQEEDGCSCRFPEEEEGGCELRVKFSRSADAPAYQQGQNQLYNELNLGRREEYDVLDKRRGRDPEMGGKPQRRKNPQEGLYNELQKDKMAEAYSEIGMKGERRRGKGHDGLYQGLSTATKDTYDALHMQALPPR

SEQ ID NO: 31379 - protein, 282 aa, synthetic construct
SKSSDKSVCLFTDFDSQTNVSQSKDSDVYITDKCVLDMRSMDFKSNSAVAWSNKSDFACANAFNNSIIPEDTFFPSPESSCDVKLVEKSFETDTNLNFQNLLVIVLRILLLKVAGFNLLMTLRLWSSKRGRKKLLYIFKQPFMRPVQTTQEEDGCSCRFPEEEEGGCELRVKFSRSADAPAYQQGQNQLYNELNLGRREEYDVLDKRRGRDPEMGGKPQRRKNPQEGLYNELQKDKMAEAYSEIGMKGERRRGKGHDGLYQGLSTATKDTYDALHMQALPPR

SEQ ID NO: 31380 - protein, 281 aa, synthetic construct
KSSDKSVCLFTDFDSQTNVSQSKDSDVYITDKCVLDMRSMDFKSNSAVAWSNKSDFACANAFNNSIIPEDTFFPSPESSCDVKLVEKSFETDTNLNFQNLLVIVLRILLLKVAGFNLLMTLRLWSSKRGRKKLLYIFKQPFMRPVQTTQEEDGCSCRFPEEEEGGCELRVKFSRSADAPAYQQGQNQLYNELNLGRREEYDVLDKRRGRDPEMGGKPQRRKNPQEGLYNELQKDKMAEAYSEIGMKGERRRGKGHDGLYQGLSTATKDTYDALHMQALPPR

SEQ ID NO: 31381 - protein, 280 aa, synthetic construct
SSDKSVCLFTDFDSQTNVSQSKDSDVYITDKCVLDMRSMDFKSNSAVAWSNKSDFACANAFNNSIIPEDTFFPSPESSCDVKLVEKSFETDTNLNFQNLLVIVLRILLLKVAGFNLLMTLRLWSSKRGRKKLLYIFKQPFMRPVQTTQEEDGCSCRFPEEEEGGCELRVKFSRSADAPAYQQGQNQLYNELNLGRREEYDVLDKRRGRDPEMGGKPQRRKNPQEGLYNELQKDKMAEAYSEIGMKGERRRGKGHDGLYQGLSTATKDTYDALHMQALPPR

SEQ ID NO: 31382 - protein, 279 aa, synthetic construct
SDKSVCLFTDFDSQTNVSQSKDSDVYITDKCVLDMRSMDFKSNSAVAWSNKSDFACANAFNNSIIPEDTFFPSPESSCDVKLVEKSFETDTNLNFQNLLVIVLRILLLKVAGFNLLMTLRLWSSKRGRKKLLYIFKQPFMRPVQTTQEEDGCSCRFPEEEEGGCELRVKFSRSADAPAYQQGQNQLYNELNLGRREEYDVLDKRRGRDPEMGGKPQRRKNPQEGLYNELQKDKMAEAYSEIGMKGERRRGKGHDGLYQGLSTATKDTYDALHMQALPPR

SEQ ID NO: 31383 - protein, 278 aa, synthetic construct
DKSVCLFTDFDSQTNVSQSKDSDVYITDKCVLDMRSMDFKSNSAVAWSNKSDFACANAFNNSIIPEDTFFPSPESSCDVKLVEKSFETDTNLNFQNLLVIVLRILLLKVAGFNLLMTLRLWSSKRGRKKLLYIFKQPFMRPVQTTQEEDGCSCRFPEEEEGGCELRVKFSRSADAPAYQQGQNQLYNELNLGRREEYDVLDKRRGRDPEMGGKPQRRKNPQEGLYNELQKDKMAEAYSEIGMKGERRRGKGHDGLYQGLSTATKDTYDALHMQALPPR

SEQ ID NO: 31384 - protein, 277 aa, synthetic construct
KSVCLFTDFDSQTNVSQSKDSDVYITDKCVLDMRSMDFKSNSAVAWSNKSDFACANAFNNSIIPEDTFFPSPESSCDVKLVEKSFETDTNLNFQNLLVIVLRILLLKVAGFNLLMTLRLWSSKRGRKKLLYIFKQPFMRPVQTTQEEDGCSCRFPEEEEGGCELRVKFSRSADAPAYQQGQNQLYNELNLGRREEYDVLDKRRGRDPEMGGKPQRRKNPQEGLYNELQKDKMAEAYSEIGMKGERRRGKGHDGLYQGLSTATKDTYDALHMQALPPR

SEQ ID NO: 31385 - protein, 276 aa, synthetic construct
SVCLFTDFDSQTNVSQSKDSDVYITDKCVLDMRSMDFKSNSAVAWSNKSDFACANAFNNSIIPEDTFFPSPESSCDVKLVEKSFETDTNLNFQNLLVIVLRILLLKVAGFNLLMTLRLWSSKRGRKKLLYIFKQPFMRPVQTTQEEDGCSCRFPEEEEGGCELRVKFSRSADAPAYQQGQNQLYNELNLGRREEYDVLDKRRGRDPEMGGKPQRRKNPQEGLYNELQKDKMAEAYSEIGMKGERRRGKGHDGLYQGLSTATKDTYDALHMQALPPR

SEQ ID NO: 31386 - protein, 275 aa, synthetic construct
VCLFTDFDSQTNVSQSKDSDVYITDKCVLDMRSMDFKSNSAVAWSNKSDFACANAFNNSIIPEDTFFPSPESSCDVKLVEKSFETDTNLNFQNLLVIVLRILLLKVAGFNLLMTLRLWSSKRGRKKLLYIFKQPFMRPVQTTQEEDGCSCRFPEEEEGGCELRVKFSRSADAPAYQQGQNQLYNELNLGRREEYDVLDKRRGRDPEMGGKPQRRKNPQEGLYNELQKDKMAEAYSEIGMKGERRRGKGHDGLYQGLSTATKDTYDALHMQALPPR

SEQ ID NO: 31387 - protein, 274 aa, synthetic construct
CLFTDFDSQTNVSQSKDSDVYITDKCVLDMRSMDFKSNSAVAWSNKSDFACANAFNNSIIPEDTFFPSPESSCDVKLVEKSFETDTNLNFQNLLVIVLRILLLKVAGFNLLMTLRLWSSKRGRKKLLYIFKQPFMRPVQTTQEEDGCSCRFPEEEEGGCELRVKFSRSADAPAYQQGQNQLYNELNLGRREEYDVLDKRRGRDPEMGGKPQRRKNPQEGLYNELQKDKMAEAYSEIGMKGERRRGKGHDGLYQGLSTATKDTYDALHMQALPPR

SEQ ID NO: 31388 - protein, 273 aa, synthetic construct
LFTDFDSQTNVSQSKDSDVYITDKCVLDMRSMDFKSNSAVAWSNKSDFACANAFNNSIIPEDTFFPSPESSCDVKLVEKSFETDTNLNFQNLLVIVLRILLLKVAGFNLLMTLRLWSSKRGRKKLLYIFKQPFMRPVQTTQEEDGCSCRFPEEEEGGCELRVKFSRSADAPAYQQGQNQLYNELNLGRREEYDVLDKRRGRDPEMGGKPQRRKNPQEGLYNELQKDKMAEAYSEIGMKGERRRGKGHDGLYQGLSTATKDTYDALHMQALPPR

SEQ ID NO: 31389 - protein, 272 aa, synthetic construct
FTDFDSQTNVSQSKDSDVYITDKCVLDMRSMDFKSNSAVAWSNKSDFACANAFNNSIIPEDTFFPSPESSCDVKLVEKSFETDTNLNFQNLLVIVLRILLLKVAGFNLLMTLRLWSSKRGRKKLLYIFKQPFMRPVQTTQEEDGCSCRFPEEEEGGCELRVKFSRSADAPAYQQGQNQLYNELNLGRREEYDVLDKRRGRDPEMGGKPQRRKNPQEGLYNELQKDKMAEAYSEIGMKGERRRGKGHDGLYQGLSTATKDTYDALHMQALPPR

SEQ ID NO: 31390 - protein, 271 aa, synthetic construct
TDFDSQTNVSQSKDSDVYITDKCVLDMRSMDFKSNSAVAWSNKSDFACANAFNNSIIPEDTFFPSPESSCDVKLVEKSFETDTNLNFQNLLVIVLRILLLKVAGFNLLMTLRLWSSKRGRKKLLYIFKQPFMRPVQTTQEEDGCSCRFPEEEEGGCELRVKFSRSADAPAYQQGQNQLYNELNLGRREEYDVLDKRRGRDPEMGGKPQRRKNPQEGLYNELQKDKMAEAYSEIGMKGERRRGKGHDGLYQGLSTATKDTYDALHMQALPPR

SEQ ID NO: 31391 - protein, 270 aa, synthetic construct
DFDSQTNVSQSKDSDVYITDKCVLDMRSMDFKSNSAVAWSNKSDFACANAFNNSIIPEDTFFPSPESSCDVKLVEKSFETDTNLNFQNLLVIVLRILLLKVAGFNLLMTLRLWSSKRGRKKLLYIFKQPFMRPVQTTQEEDGCSCRFPEEEEGGCELRVKFSRSADAPAYQQGQNQLYNELNLGRREEYDVLDKRRGRDPEMGGKPQRRKNPQEGLYNELQKDKMAEAYSEIGMKGERRRGKGHDGLYQGLSTATKDTYDALHMQALPPR

SEQ ID NO: 31392 - protein, 269 aa, synthetic construct
FDSQTNVSQSKDSDVYITDKCVLDMRSMDFKSNSAVAWSNKSDFACANAFNNSIIPEDTFFPSPESSCDVKLVEKSFETDTNLNFQNLLVIVLRILLLKVAGFNLLMTLRLWSSKRGRKKLLYIFKQPFMRPVQTTQEEDGCSCRFPEEEEGGCELRVKFSRSADAPAYQQGQNQLYNELNLGRREEYDVLDKRRGRDPEMGGKPQRRKNPQEGLYNELQKDKMAEAYSEIGMKGERRRGKGHDGLYQGLSTATKDTYDALHMQALPPR

SEQ ID NO: 31393 - protein, 268 aa, synthetic construct
DSQTNVSQSKDSDVYITDKCVLDMRSMDFKSNSAVAWSNKSDFACANAFNNSIIPEDTFFPSPESSCDVKLVEKSFETDTNLNFQNLLVIVLRILLLKVAGFNLLMTLRLWSSKRGRKKLLYIFKQPFMRPVQTTQEEDGCSCRFPEEEEGGCELRVKFSRSADAPAYQQGQNQLYNELNLGRREEYDVLDKRRGRDPEMGGKPQRRKNPQEGLYNELQKDKMAEAYSEIGMKGERRRGKGHDGLYQGLSTATKDTYDALHMQALPPR

SEQ ID NO: 31394 - protein, 267 aa, synthetic construct
SQTNVSQSKDSDVYITDKCVLDMRSMDFKSNSAVAWSNKSDFACANAFNNSIIPEDTFFPSPESSCDVKLVEKSFETDTNLNFQNLLVIVLRILLLKVAGFNLLMTLRLWSSKRGRKKLLYIFKQPFMRPVQTTQEEDGCSCRFPEEEEGGCELRVKFSRSADAPAYQQGQNQLYNELNLGRREEYDVLDKRRGRDPEMGGKPQRRKNPQEGLYNELQKDKMAEAYSEIGMKGERRRGKGHDGLYQGLSTATKDTYDALHMQALPPR

SEQ ID NO: 31395 - protein, 266 aa, synthetic construct
QTNVSQSKDSDVYITDKCVLDMRSMDFKSNSAVAWSNKSDFACANAFNNSIIPEDTFFPSPESSCDVKLVEKSFETDTNLNFQNLLVIVLRILLLKVAGFNLLMTLRLWSSKRGRKKLLYIFKQPFMRPVQTTQEEDGCSCRFPEEEEGGCELRVKFSRSADAPAYQQGQNQLYNELNLGRREEYDVLDKRRGRDPEMGGKPQRRKNPQEGLYNELQKDKMAEAYSEIGMKGERRRGKGHDGLYQGLSTATKDTYDALHMQALPPR

SEQ ID NO: 31396 - protein, 265 aa, synthetic construct
TNVSQSKDSDVYITDKCVLDMRSMDFKSNSAVAWSNKSDFACANAFNNSIIPEDTFFPSPESSCDVKLVEKSFETDTNLNFQNLLVIVLRILLLKVAGFNLLMTLRLWSSKRGRKKLLYIFKQPFMRPVQTTQEEDGCSCRFPEEEEGGCELRVKFSRSADAPAYQQGQNQLYNELNLGRREEYDVLDKRRGRDPEMGGKPQRRKNPQEGLYNELQKDKMAEAYSEIGMKGERRRGKGHDGLYQGLSTATKDTYDALHMQALPPR

SEQ ID NO: 31397 - protein, 264 aa, synthetic construct
NVSQSKDSDVYITDKCVLDMRSMDFKSNSAVAWSNKSDFACANAFNNSIIPEDTFFPSPESSCDVKLVEKSFETDTNLNFQNLLVIVLRILLLKVAGFNLLMTLRLWSSKRGRKKLLYIFKQPFMRPVQTTQEEDGCSCRFPEEEEGGCELRVKFSRSADAPAYQQGQNQLYNELNLGRREEYDVLDKRRGRDPEMGGKPQRRKNPQEGLYNELQKDKMAEAYSEIGMKGERRRGKGHDGLYQGLSTATKDTYDALHMQALPPR

SEQ ID NO: 31398 - protein, 263 aa, synthetic construct
VSQSKDSDVYITDKCVLDMRSMDFKSNSAVAWSNKSDFACANAFNNSIIPEDTFFPSPESSCDVKLVEKSFETDTNLNFQNLLVIVLRILLLKVAGFNLLMTLRLWSSKRGRKKLLYIFKQPFMRPVQTTQEEDGCSCRFPEEEEGGCELRVKFSRSADAPAYQQGQNQLYNELNLGRREEYDVLDKRRGRDPEMGGKPQRRKNPQEGLYNELQKDKMAEAYSEIGMKGERRRGKGHDGLYQGLSTATKDTYDALHMQALPPR

SEQ ID NO: 31399 - protein, 262 aa, synthetic construct
SQSKDSDVYITDKCVLDMRSMDFKSNSAVAWSNKSDFACANAFNNSIIPEDTFFPSPESSCDVKLVEKSFETDTNLNFQNLLVIVLRILLLKVAGFNLLMTLRLWSSKRGRKKLLYIFKQPFMRPVQTTQEEDGCSCRFPEEEEGGCELRVKFSRSADAPAYQQGQNQLYNELNLGRREEYDVLDKRRGRDPEMGGKPQRRKNPQEGLYNELQKDKMAEAYSEIGMKGERRRGKGHDGLYQGLSTATKDTYDALHMQALPPR

SEQ ID NO: 31400 - protein, 261 aa, synthetic construct
QSKDSDVYITDKCVLDMRSMDFKSNSAVAWSNKSDFACANAFNNSIIPEDTFFPSPESSCDVKLVEKSFETDTNLNFQNLLVIVLRILLLKVAGFNLLMTLRLWSSKRGRKKLLYIFKQPFMRPVQTTQEEDGCSCRFPEEEEGGCELRVKFSRSADAPAYQQGQNQLYNELNLGRREEYDVLDKRRGRDPEMGGKPQRRKNPQEGLYNELQKDKMAEAYSEIGMKGERRRGKGHDGLYQGLSTATKDTYDALHMQALPPR

SEQ ID NO: 31401 - protein, 260 aa, synthetic construct
SKDSDVYITDKCVLDMRSMDFKSNSAVAWSNKSDFACANAFNNSIIPEDTFFPSPESSCDVKLVEKSFETDTNLNFQNLLVIVLRILLLKVAGFNLLMTLRLWSSKRGRKKLLYIFKQPFMRPVQTTQEEDGCSCRFPEEEEGGCELRVKFSRSADAPAYQQGQNQLYNELNLGRREEYDVLDKRRGRDPEMGGKPQRRKNPQEGLYNELQKDKMAEAYSEIGMKGERRRGKGHDGLYQGLSTATKDTYDALHMQALPPR

SEQ ID NO: 31402 - protein, 259 aa, synthetic construct
KDSDVYITDKCVLDMRSMDFKSNSAVAWSNKSDFACANAFNNSIIPEDTFFPSPESSCDVKLVEKSFETDTNLNFQNLLVIVLRILLLKVAGFNLLMTLRLWSSKRGRKKLLYIFKQPFMRPVQTTQEEDGCSCRFPEEEEGGCELRVKFSRSADAPAYQQGQNQLYNELNLGRREEYDVLDKRRGRDPEMGGKPQRRKNPQEGLYNELQKDKMAEAYSEIGMKGERRRGKGHDGLYQGLSTATKDTYDALHMQALPPR

SEQ ID NO: 31403 - protein, 258 aa, synthetic construct
DSDVYITDKCVLDMRSMDFKSNSAVAWSNKSDFACANAFNNSIIPEDTFFPSPESSCDVKLVEKSFETDTNLNFQNLLVIVLRILLLKVAGFNLLMTLRLWSSKRGRKKLLYIFKQPFMRPVQTTQEEDGCSCRFPEEEEGGCELRVKFSRSADAPAYQQGQNQLYNELNLGRREEYDVLDKRRGRDPEMGGKPQRRKNPQEGLYNELQKDKMAEAYSEIGMKGERRRGKGHDGLYQGLSTATKDTYDALHMQALPPR

SEQ ID NO: 31404 - protein, 257 aa, synthetic construct
SDVYITDKCVLDMRSMDFKSNSAVAWSNKSDFACANAFNNSIIPEDTFFPSPESSCDVKLVEKSFETDTNLNFQNLLVIVLRILLLKVAGFNLLMTLRLWSSKRGRKKLLYIFKQPFMRPVQTTQEEDGCSCRFPEEEEGGCELRVKFSRSADAPAYQQGQNQLYNELNLGRREEYDVLDKRRGRDPEMGGKPQRRKNPQEGLYNELQKDKMAEAYSEIGMKGERRRGKGHDGLYQGLSTATKDTYDALHMQALPPR

SEQ ID NO: 31405 - protein, 256 aa, synthetic construct
DVYITDKCVLDMRSMDFKSNSAVAWSNKSDFACANAFNNSIIPEDTFFPSPESSCDVKLVEKSFETDTNLNFQNLLVIVLRILLLKVAGFNLLMTLRLWSSKRGRKKLLYIFKQPFMRPVQTTQEEDGCSCRFPEEEEGGCELRVKFSRSADAPAYQQGQNQLYNELNLGRREEYDVLDKRRGRDPEMGGKPQRRKNPQEGLYNELQKDKMAEAYSEIGMKGERRRGKGHDGLYQGLSTATKDTYDALHMQALPPR

SEQ ID NO: 31406 - protein, 255 aa, synthetic construct
VYITDKCVLDMRSMDFKSNSAVAWSNKSDFACANAFNNSIIPEDTFFPSPESSCDVKLVEKSFETDTNLNFQNLLVIVLRILLLKVAGFNLLMTLRLWSSKRGRKKLLYIFKQPFMRPVQTTQEEDGCSCRFPEEEEGGCELRVKFSRSADAPAYQQGQNQLYNELNLGRREEYDVLDKRRGRDPEMGGKPQRRKNPQEGLYNELQKDKMAEAYSEIGMKGERRRGKGHDGLYQGLSTATKDTYDALHMQALPPR

SEQ ID NO: 31407 - protein, 254 aa, synthetic construct
YITDKCVLDMRSMDFKSNSAVAWSNKSDFACANAFNNSIIPEDTFFPSPESSCDVKLVEKSFETDTNLNFQNLLVIVLRILLLKVAGFNLLMTLRLWSSKRGRKKLLYIFKQPFMRPVQTTQEEDGCSCRFPEEEEGGCELRVKFSRSADAPAYQQGQNQLYNELNLGRREEYDVLDKRRGRDPEMGGKPQRRKNPQEGLYNELQKDKMAEAYSEIGMKGERRRGKGHDGLYQGLSTATKDTYDALHMQALPPR

SEQ ID NO: 31408 - protein, 253 aa, synthetic construct
ITDKCVLDMRSMDFKSNSAVAWSNKSDFACANAFNNSIIPEDTFFPSPESSCDVKLVEKSFETDTNLNFQNLLVIVLRILLLKVAGFNLLMTLRLWSSKRGRKKLLYIFKQPFMRPVQTTQEEDGCSCRFPEEEEGGCELRVKFSRSADAPAYQQGQNQLYNELNLGRREEYDVLDKRRGRDPEMGGKPQRRKNPQEGLYNELQKDKMAEAYSEIGMKGERRRGKGHDGLYQGLSTATKDTYDALHMQALPPR

SEQ ID NO: 31409 - protein, 252 aa, synthetic construct
TDKCVLDMRSMDFKSNSAVAWSNKSDFACANAFNNSIIPEDTFFPSPESSCDVKLVEKSFETDTNLNFQNLLVIVLRILLLKVAGFNLLMTLRLWSSKRGRKKLLYIFKQPFMRPVQTTQEEDGCSCRFPEEEEGGCELRVKFSRSADAPAYQQGQNQLYNELNLGRREEYDVLDKRRGRDPEMGGKPQRRKNPQEGLYNELQKDKMAEAYSEIGMKGERRRGKGHDGLYQGLSTATKDTYDALHMQALPPR

SEQ ID NO: 31410 - protein, 251 aa, synthetic construct
DKCVLDMRSMDFKSNSAVAWSNKSDFACANAFNNSIIPEDTFFPSPESSCDVKLVEKSFETDTNLNFQNLLVIVLRILLLKVAGFNLLMTLRLWSSKRGRKKLLYIFKQPFMRPVQTTQEEDGCSCRFPEEEEGGCELRVKFSRSADAPAYQQGQNQLYNELNLGRREEYDVLDKRRGRDPEMGGKPQRRKNPQEGLYNELQKDKMAEAYSEIGMKGERRRGKGHDGLYQGLSTATKDTYDALHMQALPPR

SEQ ID NO: 31411 - protein, 249 aa, synthetic construct
CVLDMRSMDFKSNSAVAWSNKSDFACANAFNNSIIPEDTFFPSPESSCDVKLVEKSFETDTNLNFQNLLVIVLRILLLKVAGFNLLMTLRLWSSKRGRKKLLYIFKQPFMRPVQTTQEEDGCSCRFPEEEEGGCELRVKFSRSADAPAYQQGQNQLYNELNLGRREEYDVLDKRRGRDPEMGGKPQRRKNPQEGLYNELQKDKMAEAYSEIGMKGERRRGKGHDGLYQGLSTATKDTYDALHMQALPPR

SEQ ID NO: 31412 - protein, 248 aa, synthetic construct
VLDMRSMDFKSNSAVAWSNKSDFACANAFNNSIIPEDTFFPSPESSCDVKLVEKSFETDTNLNFQNLLVIVLRILLLKVAGFNLLMTLRLWSSKRGRKKLLYIFKQPFMRPVQTTQEEDGCSCRFPEEEEGGCELRVKFSRSADAPAYQQGQNQLYNELNLGRREEYDVLDKRRGRDPEMGGKPQRRKNPQEGLYNELQKDKMAEAYSEIGMKGERRRGKGHDGLYQGLSTATKDTYDALHMQALPPR

SEQ ID NO: 31413 - protein, 247 aa, synthetic construct
LDMRSMDFKSNSAVAWSNKSDFACANAFNNSIIPEDTFFPSPESSCDVKLVEKSFETDTNLNFQNLLVIVLRILLLKVAGFNLLMTLRLWSSKRGRKKLLYIFKQPFMRPVQTTQEEDGCSCRFPEEEEGGCELRVKFSRSADAPAYQQGQNQLYNELNLGRREEYDVLDKRRGRDPEMGGKPQRRKNPQEGLYNELQKDKMAEAYSEIGMKGERRRGKGHDGLYQGLSTATKDTYDALHMQALPPR

SEQ ID NO: 31414 - protein, 246 aa, synthetic construct
DMRSMDFKSNSAVAWSNKSDFACANAFNNSIIPEDTFFPSPESSCDVKLVEKSFETDTNLNFQNLLVIVLRILLLKVAGFNLLMTLRLWSSKRGRKKLLYIFKQPFMRPVQTTQEEDGCSCRFPEEEEGGCELRVKFSRSADAPAYQQGQNQLYNELNLGRREEYDVLDKRRGRDPEMGGKPQRRKNPQEGLYNELQKDKMAEAYSEIGMKGERRRGKGHDGLYQGLSTATKDTYDALHMQALPPR

SEQ ID NO: 31415 - protein, 245 aa, synthetic construct
MRSMDFKSNSAVAWSNKSDFACANAFNNSIIPEDTFFPSPESSCDVKLVEKSFETDTNLNFQNLLVIVLRILLLKVAGFNLLMTLRLWSSKRGRKKLLYIFKQPFMRPVQTTQEEDGCSCRFPEEEEGGCELRVKFSRSADAPAYQQGQNQLYNELNLGRREEYDVLDKRRGRDPEMGGKPQRRKNPQEGLYNELQKDKMAEAYSEIGMKGERRRGKGHDGLYQGLSTATKDTYDALHMQALPPR

SEQ ID NO: 31416 - protein, 244 aa, synthetic construct
RSMDFKSNSAVAWSNKSDFACANAFNNSIIPEDTFFPSPESSCDVKLVEKSFETDTNLNFQNLLVIVLRILLLKVAGFNLLMTLRLWSSKRGRKKLLYIFKQPFMRPVQTTQEEDGCSCRFPEEEEGGCELRVKFSRSADAPAYQQGQNQLYNELNLGRREEYDVLDKRRGRDPEMGGKPQRRKNPQEGLYNELQKDKMAEAYSEIGMKGERRRGKGHDGLYQGLSTATKDTYDALHMQALPPR

SEQ ID NO: 31417 - protein, 243 aa, synthetic construct
SMDFKSNSAVAWSNKSDFACANAFNNSIIPEDTFFPSPESSCDVKLVEKSFETDTNLNFQNLLVIVLRILLLKVAGFNLLMTLRLWSSKRGRKKLLYIFKQPFMRPVQTTQEEDGCSCRFPEEEEGGCELRVKFSRSADAPAYQQGQNQLYNELNLGRREEYDVLDKRRGRDPEMGGKPQRRKNPQEGLYNELQKDKMAEAYSEIGMKGERRRGKGHDGLYQGLSTATKDTYDALHMQALPPR

SEQ ID NO: 31418 - protein, 242 aa, synthetic construct
MDFKSNSAVAWSNKSDFACANAFNNSIIPEDTFFPSPESSCDVKLVEKSFETDTNLNFQNLLVIVLRILLLKVAGFNLLMTLRLWSSKRGRKKLLYIFKQPFMRPVQTTQEEDGCSCRFPEEEEGGCELRVKFSRSADAPAYQQGQNQLYNELNLGRREEYDVLDKRRGRDPEMGGKPQRRKNPQEGLYNELQKDKMAEAYSEIGMKGERRRGKGHDGLYQGLSTATKDTYDALHMQALPPR

SEQ ID NO: 31419 - protein, 241 aa, synthetic construct
DFKSNSAVAWSNKSDFACANAFNNSIIPEDTFFPSPESSCDVKLVEKSFETDTNLNFQNLLVIVLRILLLKVAGFNLLMTLRLWSSKRGRKKLLYIFKQPFMRPVQTTQEEDGCSCRFPEEEEGGCELRVKFSRSADAPAYQQGQNQLYNELNLGRREEYDVLDKRRGRDPEMGGKPQRRKNPQEGLYNELQKDKMAEAYSEIGMKGERRRGKGHDGLYQGLSTATKDTYDALHMQALPPR

SEQ ID NO: 31420 - protein, 240 aa, synthetic construct
FKSNSAVAWSNKSDFACANAFNNSIIPEDTFFPSPESSCDVKLVEKSFETDTNLNFQNLLVIVLRILLLKVAGFNLLMTLRLWSSKRGRKKLLYIFKQPFMRPVQTTQEEDGCSCRFPEEEEGGCELRVKFSRSADAPAYQQGQNQLYNELNLGRREEYDVLDKRRGRDPEMGGKPQRRKNPQEGLYNELQKDKMAEAYSEIGMKGERRRGKGHDGLYQGLSTATKDTYDALHMQALPPR

SEQ ID NO: 31421 - protein, 239 aa, synthetic construct
KSNSAVAWSNKSDFACANAFNNSIIPEDTFFPSPESSCDVKLVEKSFETDTNLNFQNLLVIVLRILLLKVAGFNLLMTLRLWSSKRGRKKLLYIFKQPFMRPVQTTQEEDGCSCRFPEEEEGGCELRVKFSRSADAPAYQQGQNQLYNELNLGRREEYDVLDKRRGRDPEMGGKPQRRKNPQEGLYNELQKDKMAEAYSEIGMKGERRRGKGHDGLYQGLSTATKDTYDALHMQALPPR

SEQ ID NO: 31422 - protein, 238 aa, synthetic construct
SNSAVAWSNKSDFACANAFNNSIIPEDTFFPSPESSCDVKLVEKSFETDTNLNFQNLLVIVLRILLLKVAGFNLLMTLRLWSSKRGRKKLLYIFKQPFMRPVQTTQEEDGCSCRFPEEEEGGCELRVKFSRSADAPAYQQGQNQLYNELNLGRREEYDVLDKRRGRDPEMGGKPQRRKNPQEGLYNELQKDKMAEAYSEIGMKGERRRGKGHDGLYQGLSTATKDTYDALHMQALPPR

SEQ ID NO: 31423 - protein, 237 aa, synthetic construct
NSAVAWSNKSDFACANAFNNSIIPEDTFFPSPESSCDVKLVEKSFETDTNLNFQNLLVIVLRILLLKVAGFNLLMTLRLWSSKRGRKKLLYIFKQPFMRPVQTTQEEDGCSCRFPEEEEGGCELRVKFSRSADAPAYQQGQNQLYNELNLGRREEYDVLDKRRGRDPEMGGKPQRRKNPQEGLYNELQKDKMAEAYSEIGMKGERRRGKGHDGLYQGLSTATKDTYDALHMQALPPR

SEQ ID NO: 31424 - protein, 236 aa, synthetic construct
SAVAWSNKSDFACANAFNNSIIPEDTFFPSPESSCDVKLVEKSFETDTNLNFQNLLVIVLRILLLKVAGFNLLMTLRLWSSKRGRKKLLYIFKQPFMRPVQTTQEEDGCSCRFPEEEEGGCELRVKFSRSADAPAYQQGQNQLYNELNLGRREEYDVLDKRRGRDPEMGGKPQRRKNPQEGLYNELQKDKMAEAYSEIGMKGERRRGKGHDGLYQGLSTATKDTYDALHMQALPPR

SEQ ID NO: 31425 - protein, 235 aa, synthetic construct
AVAWSNKSDFACANAFNNSIIPEDTFFPSPESSCDVKLVEKSFETDTNLNFQNLLVIVLRILLLKVAGFNLLMTLRLWSSKRGRKKLLYIFKQPFMRPVQTTQEEDGCSCRFPEEEEGGCELRVKFSRSADAPAYQQGQNQLYNELNLGRREEYDVLDKRRGRDPEMGGKPQRRKNPQEGLYNELQKDKMAEAYSEIGMKGERRRGKGHDGLYQGLSTATKDTYDALHMQALPPR

SEQ ID NO: 31426 - protein, 234 aa, synthetic construct
VAWSNKSDFACANAFNNSIIPEDTFFPSPESSCDVKLVEKSFETDTNLNFQNLLVIVLRILLLKVAGFNLLMTLRLWSSKRGRKKLLYIFKQPFMRPVQTTQEEDGCSCRFPEEEEGGCELRVKFSRSADAPAYQQGQNQLYNELNLGRREEYDVLDKRRGRDPEMGGKPQRRKNPQEGLYNELQKDKMAEAYSEIGMKGERRRGKGHDGLYQGLSTATKDTYDALHMQALPPR

SEQ ID NO: 31427 - protein, 233 aa, synthetic construct
AWSNKSDFACANAFNNSIIPEDTFFPSPESSCDVKLVEKSFETDTNLNFQNLLVIVLRILLLKVAGFNLLMTLRLWSSKRGRKKLLYIFKQPFMRPVQTTQEEDGCSCRFPEEEEGGCELRVKFSRSADAPAYQQGQNQLYNELNLGRREEYDVLDKRRGRDPEMGGKPQRRKNPQEGLYNELQKDKMAEAYSEIGMKGERRRGKGHDGLYQGLSTATKDTYDALHMQALPPR

SEQ ID NO: 31428 - protein, 232 aa, synthetic construct
WSNKSDFACANAFNNSIIPEDTFFPSPESSCDVKLVEKSFETDTNLNFQNLLVIVLRILLLKVAGFNLLMTLRLWSSKRGRKKLLYIFKQPFMRPVQTTQEEDGCSCRFPEEEEGGCELRVKFSRSADAPAYQQGQNQLYNELNLGRREEYDVLDKRRGRDPEMGGKPQRRKNPQEGLYNELQKDKMAEAYSEIGMKGERRRGKGHDGLYQGLSTATKDTYDALHMQALPPR

SEQ ID NO: 31429 - protein, 231 aa, synthetic construct
SNKSDFACANAFNNSIIPEDTFFPSPESSCDVKLVEKSFETDTNLNFQNLLVIVLRILLLKVAGFNLLMTLRLWSSKRGRKKLLYIFKQPFMRPVQTTQEEDGCSCRFPEEEEGGCELRVKFSRSADAPAYQQGQNQLYNELNLGRREEYDVLDKRRGRDPEMGGKPQRRKNPQEGLYNELQKDKMAEAYSEIGMKGERRRGKGHDGLYQGLSTATKDTYDALHMQALPPR

SEQ ID NO: 31430 - protein, 230 aa, synthetic construct
NKSDFACANAFNNSIIPEDTFFPSPESSCDVKLVEKSFETDTNLNFQNLLVIVLRILLLKVAGFNLLMTLRLWSSKRGRKKLLYIFKQPFMRPVQTTQEEDGCSCRFPEEEEGGCELRVKFSRSADAPAYQQGQNQLYNELNLGRREEYDVLDKRRGRDPEMGGKPQRRKNPQEGLYNELQKDKMAEAYSEIGMKGERRRGKGHDGLYQGLSTATKDTYDALHMQALPPR

SEQ ID NO: 31431 - protein, 229 aa, synthetic construct
KSDFACANAFNNSIIPEDTFFPSPESSCDVKLVEKSFETDTNLNFQNLLVIVLRILLLKVAGFNLLMTLRLWSSKRGRKKLLYIFKQPFMRPVQTTQEEDGCSCRFPEEEEGGCELRVKFSRSADAPAYQQGQNQLYNELNLGRREEYDVLDKRRGRDPEMGGKPQRRKNPQEGLYNELQKDKMAEAYSEIGMKGERRRGKGHDGLYQGLSTATKDTYDALHMQALPPR

SEQ ID NO: 31432 - protein, 228 aa, synthetic construct
SDFACANAFNNSIIPEDTFFPSPESSCDVKLVEKSFETDTNLNFQNLLVIVLRILLLKVAGFNLLMTLRLWSSKRGRKKLLYIFKQPFMRPVQTTQEEDGCSCRFPEEEEGGCELRVKFSRSADAPAYQQGQNQLYNELNLGRREEYDVLDKRRGRDPEMGGKPQRRKNPQEGLYNELQKDKMAEAYSEIGMKGERRRGKGHDGLYQGLSTATKDTYDALHMQALPPR

SEQ ID NO: 31433 - protein, 227 aa, synthetic construct
DFACANAFNNSIIPEDTFFPSPESSCDVKLVEKSFETDTNLNFQNLLVIVLRILLLKVAGFNLLMTLRLWSSKRGRKKLLYIFKQPFMRPVQTTQEEDGCSCRFPEEEEGGCELRVKFSRSADAPAYQQGQNQLYNELNLGRREEYDVLDKRRGRDPEMGGKPQRRKNPQEGLYNELQKDKMAEAYSEIGMKGERRRGKGHDGLYQGLSTATKDTYDALHMQALPPR

SEQ ID NO: 31434 - protein, 226 aa, synthetic construct
FACANAFNNSIIPEDTFFPSPESSCDVKLVEKSFETDTNLNFQNLLVIVLRILLLKVAGFNLLMTLRLWSSKRGRKKLLYIFKQPFMRPVQTTQEEDGCSCRFPEEEEGGCELRVKFSRSADAPAYQQGQNQLYNELNLGRREEYDVLDKRRGRDPEMGGKPQRRKNPQEGLYNELQKDKMAEAYSEIGMKGERRRGKGHDGLYQGLSTATKDTYDALHMQALPPR

SEQ ID NO: 31435 - protein, 225 aa, synthetic construct
ACANAFNNSIIPEDTFFPSPESSCDVKLVEKSFETDTNLNFQNLLVIVLRILLLKVAGFNLLMTLRLWSSKRGRKKLLYIFKQPFMRPVQTTQEEDGCSCRFPEEEEGGCELRVKFSRSADAPAYQQGQNQLYNELNLGRREEYDVLDKRRGRDPEMGGKPQRRKNPQEGLYNELQKDKMAEAYSEIGMKGERRRGKGHDGLYQGLSTATKDTYDALHMQALPPR

SEQ ID NO: 31436 - protein, 224 aa, synthetic construct
CANAFNNSIIPEDTFFPSPESSCDVKLVEKSFETDTNLNFQNLLVIVLRILLLKVAGFNLLMTLRLWSSKRGRKKLLYIFKQPFMRPVQTTQEEDGCSCRFPEEEEGGCELRVKFSRSADAPAYQQGQNQLYNELNLGRREEYDVLDKRRGRDPEMGGKPQRRKNPQEGLYNELQKDKMAEAYSEIGMKGERRRGKGHDGLYQGLSTATKDTYDALHMQALPPR

SEQ ID NO: 31437 - protein, 223 aa, synthetic construct
ANAFNNSIIPEDTFFPSPESSCDVKLVEKSFETDTNLNFQNLLVIVLRILLLKVAGFNLLMTLRLWSSKRGRKKLLYIFKQPFMRPVQTTQEEDGCSCRFPEEEEGGCELRVKFSRSADAPAYQQGQNQLYNELNLGRREEYDVLDKRRGRDPEMGGKPQRRKNPQEGLYNELQKDKMAEAYSEIGMKGERRRGKGHDGLYQGLSTATKDTYDALHMQALPPR

SEQ ID NO: 31438 - protein, 222 aa, synthetic construct
NAFNNSIIPEDTFFPSPESSCDVKLVEKSFETDTNLNFQNLLVIVLRILLLKVAGFNLLMTLRLWSSKRGRKKLLYIFKQPFMRPVQTTQEEDGCSCRFPEEEEGGCELRVKFSRSADAPAYQQGQNQLYNELNLGRREEYDVLDKRRGRDPEMGGKPQRRKNPQEGLYNELQKDKMAEAYSEIGMKGERRRGKGHDGLYQGLSTATKDTYDALHMQALPPR

SEQ ID NO: 31439 - protein, 221 aa, synthetic construct
AFNNSIIPEDTFFPSPESSCDVKLVEKSFETDTNLNFQNLLVIVLRILLLKVAGFNLLMTLRLWSSKRGRKKLLYIFKQPFMRPVQTTQEEDGCSCRFPEEEEGGCELRVKFSRSADAPAYQQGQNQLYNELNLGRREEYDVLDKRRGRDPEMGGKPQRRKNPQEGLYNELQKDKMAEAYSEIGMKGERRRGKGHDGLYQGLSTATKDTYDALHMQALPPR

SEQ ID NO: 31440 - protein, 220 aa, synthetic construct
FNNSIIPEDTFFPSPESSCDVKLVEKSFETDTNLNFQNLLVIVLRILLLKVAGFNLLMTLRLWSSKRGRKKLLYIFKQPFMRPVQTTQEEDGCSCRFPEEEEGGCELRVKFSRSADAPAYQQGQNQLYNELNLGRREEYDVLDKRRGRDPEMGGKPQRRKNPQEGLYNELQKDKMAEAYSEIGMKGERRRGKGHDGLYQGLSTATKDTYDALHMQALPPR

SEQ ID NO: 31441 - protein, 219 aa, synthetic construct
NNSIIPEDTFFPSPESSCDVKLVEKSFETDTNLNFQNLLVIVLRILLLKVAGFNLLMTLRLWSSKRGRKKLLYIFKQPFMRPVQTTQEEDGCSCRFPEEEEGGCELRVKFSRSADAPAYQQGQNQLYNELNLGRREEYDVLDKRRGRDPEMGGKPQRRKNPQEGLYNELQKDKMAEAYSEIGMKGERRRGKGHDGLYQGLSTATKDTYDALHMQALPPR

SEQ ID NO: 31442 - protein, 218 aa, synthetic construct
NSIIPEDTFFPSPESSCDVKLVEKSFETDTNLNFQNLLVIVLRILLLKVAGFNLLMTLRLWSSKRGRKKLLYIFKQPFMRPVQTTQEEDGCSCRFPEEEEGGCELRVKFSRSADAPAYQQGQNQLYNELNLGRREEYDVLDKRRGRDPEMGGKPQRRKNPQEGLYNELQKDKMAEAYSEIGMKGERRRGKGHDGLYQGLSTATKDTYDALHMQALPPR

SEQ ID NO: 31443 - protein, 217 aa, synthetic construct
SIIPEDTFFPSPESSCDVKLVEKSFETDTNLNFQNLLVIVLRILLLKVAGFNLLMTLRLWSSKRGRKKLLYIFKQPFMRPVQTTQEEDGCSCRFPEEEEGGCELRVKFSRSADAPAYQQGQNQLYNELNLGRREEYDVLDKRRGRDPEMGGKPQRRKNPQEGLYNELQKDKMAEAYSEIGMKGERRRGKGHDGLYQGLSTATKDTYDALHMQALPPR

SEQ ID NO: 31444 - protein, 216 aa, synthetic construct
IIPEDTFFPSPESSCDVKLVEKSFETDTNLNFQNLLVIVLRILLLKVAGFNLLMTLRLWSSKRGRKKLLYIFKQPFMRPVQTTQEEDGCSCRFPEEEEGGCELRVKFSRSADAPAYQQGQNQLYNELNLGRREEYDVLDKRRGRDPEMGGKPQRRKNPQEGLYNELQKDKMAEAYSEIGMKGERRRGKGHDGLYQGLSTATKDTYDALHMQALPPR

SEQ ID NO: 31445 - protein, 215 aa, synthetic construct
IPEDTFFPSPESSCDVKLVEKSFETDTNLNFQNLLVIVLRILLLKVAGFNLLMTLRLWSSKRGRKKLLYIFKQPFMRPVQTTQEEDGCSCRFPEEEEGGCELRVKFSRSADAPAYQQGQNQLYNELNLGRREEYDVLDKRRGRDPEMGGKPQRRKNPQEGLYNELQKDKMAEAYSEIGMKGERRRGKGHDGLYQGLSTATKDTYDALHMQALPPR

SEQ ID NO: 31446 - protein, 214 aa, synthetic construct
PEDTFFPSPESSCDVKLVEKSFETDTNLNFQNLLVIVLRILLLKVAGFNLLMTLRLWSSKRGRKKLLYIFKQPFMRPVQTTQEEDGCSCRFPEEEEGGCELRVKFSRSADAPAYQQGQNQLYNELNLGRREEYDVLDKRRGRDPEMGGKPQRRKNPQEGLYNELQKDKMAEAYSEIGMKGERRRGKGHDGLYQGLSTATKDTYDALHMQALPPR

SEQ ID NO: 31447 - protein, 213 aa, synthetic construct
EDTFFPSPESSCDVKLVEKSFETDTNLNFQNLLVIVLRILLLKVAGFNLLMTLRLWSSKRGRKKLLYIFKQPFMRPVQTTQEEDGCSCRFPEEEEGGCELRVKFSRSADAPAYQQGQNQLYNELNLGRREEYDVLDKRRGRDPEMGGKPQRRKNPQEGLYNELQKDKMAEAYSEIGMKGERRRGKGHDGLYQGLSTATKDTYDALHMQALPPR

SEQ ID NO: 31448 - protein, 212 aa, synthetic construct
DTFFPSPESSCDVKLVEKSFETDTNLNFQNLLVIVLRILLLKVAGFNLLMTLRLWSSKRGRKKLLYIFKQPFMRPVQTTQEEDGCSCRFPEEEEGGCELRVKFSRSADAPAYQQGQNQLYNELNLGRREEYDVLDKRRGRDPEMGGKPQRRKNPQEGLYNELQKDKMAEAYSEIGMKGERRRGKGHDGLYQGLSTATKDTYDALHMQALPPR

SEQ ID NO: 31449 - protein, 211 aa, synthetic construct
TFFPSPESSCDVKLVEKSFETDTNLNFQNLLVIVLRILLLKVAGFNLLMTLRLWSSKRGRKKLLYIFKQPFMRPVQTTQEEDGCSCRFPEEEEGGCELRVKFSRSADAPAYQQGQNQLYNELNLGRREEYDVLDKRRGRDPEMGGKPQRRKNPQEGLYNELQKDKMAEAYSEIGMKGERRRGKGHDGLYQGLSTATKDTYDALHMQALPPR

SEQ ID NO: 31450 - protein, 210 aa, synthetic construct
FFPSPESSCDVKLVEKSFETDTNLNFQNLLVIVLRILLLKVAGFNLLMTLRLWSSKRGRKKLLYIFKQPFMRPVQTTQEEDGCSCRFPEEEEGGCELRVKFSRSADAPAYQQGQNQLYNELNLGRREEYDVLDKRRGRDPEMGGKPQRRKNPQEGLYNELQKDKMAEAYSEIGMKGERRRGKGHDGLYQGLSTATKDTYDALHMQALPPR

SEQ ID NO: 31451 - protein, 209 aa, synthetic construct
FPSPESSCDVKLVEKSFETDTNLNFQNLLVIVLRILLLKVAGFNLLMTLRLWSSKRGRKKLLYIFKQPFMRPVQTTQEEDGCSCRFPEEEEGGCELRVKFSRSADAPAYQQGQNQLYNELNLGRREEYDVLDKRRGRDPEMGGKPQRRKNPQEGLYNELQKDKMAEAYSEIGMKGERRRGKGHDGLYQGLSTATKDTYDALHMQALPPR

SEQ ID NO: 31452 - protein, 208 aa, synthetic construct
PSPESSCDVKLVEKSFETDTNLNFQNLLVIVLRILLLKVAGFNLLMTLRLWSSKRGRKKLLYIFKQPFMRPVQTTQEEDGCSCRFPEEEEGGCELRVKFSRSADAPAYQQGQNQLYNELNLGRREEYDVLDKRRGRDPEMGGKPQRRKNPQEGLYNELQKDKMAEAYSEIGMKGERRRGKGHDGLYQGLSTATKDTYDALHMQALPPR

SEQ ID NO: 31453 - protein, 207 aa, synthetic construct
SPESSCDVKLVEKSFETDTNLNFQNLLVIVLRILLLKVAGFNLLMTLRLWSSKRGRKKLLYIFKQPFMRPVQTTQEEDGCSCRFPEEEEGGCELRVKFSRSADAPAYQQGQNQLYNELNLGRREEYDVLDKRRGRDPEMGGKPQRRKNPQEGLYNELQKDKMAEAYSEIGMKGERRRGKGHDGLYQGLSTATKDTYDALHMQALPPR

SEQ ID NO: 31454 - protein, 206 aa, synthetic construct
PESSCDVKLVEKSFETDTNLNFQNLLVIVLRILLLKVAGFNLLMTLRLWSSKRGRKKLLYIFKQPFMRPVQTTQEEDGCSCRFPEEEEGGCELRVKFSRSADAPAYQQGQNQLYNELNLGRREEYDVLDKRRGRDPEMGGKPQRRKNPQEGLYNELQKDKMAEAYSEIGMKGERRRGKGHDGLYQGLSTATKDTYDALHMQALPPR

SEQ ID NO: 31455 - protein, 205 aa, synthetic construct
ESSCDVKLVEKSFETDTNLNFQNLLVIVLRILLLKVAGFNLLMTLRLWSSKRGRKKLLYIFKQPFMRPVQTTQEEDGCSCRFPEEEEGGCELRVKFSRSADAPAYQQGQNQLYNELNLGRREEYDVLDKRRGRDPEMGGKPQRRKNPQEGLYNELQKDKMAEAYSEIGMKGERRRGKGHDGLYQGLSTATKDTYDALHMQALPPR

SEQ ID NO: 31456 - protein, 204 aa, synthetic construct
SSCDVKLVEKSFETDTNLNFQNLLVIVLRILLLKVAGFNLLMTLRLWSSKRGRKKLLYIFKQPFMRPVQTTQEEDGCSCRFPEEEEGGCELRVKFSRSADAPAYQQGQNQLYNELNLGRREEYDVLDKRRGRDPEMGGKPQRRKNPQEGLYNELQKDKMAEAYSEIGMKGERRRGKGHDGLYQGLSTATKDTYDALHMQALPPR

SEQ ID NO: 31457 - protein, 203 aa, synthetic construct
SCDVKLVEKSFETDTNLNFQNLLVIVLRILLLKVAGFNLLMTLRLWSSKRGRKKLLYIFKQPFMRPVQTTQEEDGCSCRFPEEEEGGCELRVKFSRSADAPAYQQGQNQLYNELNLGRREEYDVLDKRRGRDPEMGGKPQRRKNPQEGLYNELQKDKMAEAYSEIGMKGERRRGKGHDGLYQGLSTATKDTYDALHMQALPPR

SEQ ID NO: 31458 - protein, 202 aa, synthetic construct
CDVKLVEKSFETDTNLNFQNLLVIVLRILLLKVAGFNLLMTLRLWSSKRGRKKLLYIFKQPFMRPVQTTQEEDGCSCRFPEEEEGGCELRVKFSRSADAPAYQQGQNQLYNELNLGRREEYDVLDKRRGRDPEMGGKPQRRKNPQEGLYNELQKDKMAEAYSEIGMKGERRRGKGHDGLYQGLSTATKDTYDALHMQALPPR

SEQ ID NO: 31459 - protein, 201 aa, synthetic construct
DVKLVEKSFETDTNLNFQNLLVIVLRILLLKVAGFNLLMTLRLWSSKRGRKKLLYIFKQPFMRPVQTTQEEDGCSCRFPEEEEGGCELRVKFSRSADAPAYQQGQNQLYNELNLGRREEYDVLDKRRGRDPEMGGKPQRRKNPQEGLYNELQKDKMAEAYSEIGMKGERRRGKGHDGLYQGLSTATKDTYDALHMQALPPR

SEQ ID NO: 31460 - protein, 200 aa, synthetic construct
VKLVEKSFETDTNLNFQNLLVIVLRILLLKVAGFNLLMTLRLWSSKRGRKKLLYIFKQPFMRPVQTTQEEDGCSCRFPEEEEGGCELRVKFSRSADAPAYQQGQNQLYNELNLGRREEYDVLDKRRGRDPEMGGKPQRRKNPQEGLYNELQKDKMAEAYSEIGMKGERRRGKGHDGLYQGLSTATKDTYDALHMQALPPR

SEQ ID NO: 31461 - protein, 199 aa, synthetic construct
KLVEKSFETDTNLNFQNLLVIVLRILLLKVAGFNLLMTLRLWSSKRGRKKLLYIFKQPFMRPVQTTQEEDGCSCRFPEEEEGGCELRVKFSRSADAPAYQQGQNQLYNELNLGRREEYDVLDKRRGRDPEMGGKPQRRKNPQEGLYNELQKDKMAEAYSEIGMKGERRRGKGHDGLYQGLSTATKDTYDALHMQALPPR

SEQ ID NO: 31462 - protein, 198 aa, synthetic construct
LVEKSFETDTNLNFQNLLVIVLRILLLKVAGFNLLMTLRLWSSKRGRKKLLYIFKQPFMRPVQTTQEEDGCSCRFPEEEEGGCELRVKFSRSADAPAYQQGQNQLYNELNLGRREEYDVLDKRRGRDPEMGGKPQRRKNPQEGLYNELQKDKMAEAYSEIGMKGERRRGKGHDGLYQGLSTATKDTYDALHMQALPPR

SEQ ID NO: 31463 - protein, 197 aa, synthetic construct
VEKSFETDTNLNFQNLLVIVLRILLLKVAGFNLLMTLRLWSSKRGRKKLLYIFKQPFMRPVQTTQEEDGCSCRFPEEEEGGCELRVKFSRSADAPAYQQGQNQLYNELNLGRREEYDVLDKRRGRDPEMGGKPQRRKNPQEGLYNELQKDKMAEAYSEIGMKGERRRGKGHDGLYQGLSTATKDTYDALHMQALPPR

SEQ ID NO: 31464 - protein, 196 aa, synthetic construct
EKSFETDTNLNFQNLLVIVLRILLLKVAGFNLLMTLRLWSSKRGRKKLLYIFKQPFMRPVQTTQEEDGCSCRFPEEEEGGCELRVKFSRSADAPAYQQGQNQLYNELNLGRREEYDVLDKRRGRDPEMGGKPQRRKNPQEGLYNELQKDKMAEAYSEIGMKGERRRGKGHDGLYQGLSTATKDTYDALHMQALPPR

SEQ ID NO: 31465 - protein, 195 aa, synthetic construct
KSFETDTNLNFQNLLVIVLRILLLKVAGFNLLMTLRLWSSKRGRKKLLYIFKQPFMRPVQTTQEEDGCSCRFPEEEEGGCELRVKFSRSADAPAYQQGQNQLYNELNLGRREEYDVLDKRRGRDPEMGGKPQRRKNPQEGLYNELQKDKMAEAYSEIGMKGERRRGKGHDGLYQGLSTATKDTYDALHMQALPPR

SEQ ID NO: 31466 - protein, 194 aa, synthetic construct
SFETDTNLNFQNLLVIVLRILLLKVAGFNLLMTLRLWSSKRGRKKLLYIFKQPFMRPVQTTQEEDGCSCRFPEEEEGGCELRVKFSRSADAPAYQQGQNQLYNELNLGRREEYDVLDKRRGRDPEMGGKPQRRKNPQEGLYNELQKDKMAEAYSEIGMKGERRRGKGHDGLYQGLSTATKDTYDALHMQALPPR

SEQ ID NO: 31467 - protein, 321 aa, synthetic construct
GQPKANPTVTLFPPSSEELQANKATLVCLISDFYPGAVTVAWKADGSPVKAGVETTKPSKQSNNKYAASSYLSLTPEQWKSHRSYSCQVTHEGSTVEKTVAPTECSIPEDTFFPSPESSCDVKLVEKSFETDTNLNFQNLLVIVLRILLLKVAGFNLLMTLRLWSSKRGRKKLLYIFKQPFMRPVQTTQEEDGCSCRFPEEEEGGCELRVKFSRSADAPAYQQGQNQLYNELNLGRREEYDVLDKRRGRDPEMGGKPQRRKNPQEGLYNELQKDKMAEAYSEIGMKGERRRGKGHDGLYQGLSTATKDTYDALHMQALPPR

SEQ ID NO: 31468 - protein, 320 aa, synthetic construct
QPKANPTVTLFPPSSEELQANKATLVCLISDFYPGAVTVAWKADGSPVKAGVETTKPSKQSNNKYAASSYLSLTPEQWKSHRSYSCQVTHEGSTVEKTVAPTECSIPEDTFFPSPESSCDVKLVEKSFETDTNLNFQNLLVIVLRILLLKVAGFNLLMTLRLWSSKRGRKKLLYIFKQPFMRPVQTTQEEDGCSCRFPEEEEGGCELRVKFSRSADAPAYQQGQNQLYNELNLGRREEYDVLDKRRGRDPEMGGKPQRRKNPQEGLYNELQKDKMAEAYSEIGMKGERRRGKGHDGLYQGLSTATKDTYDALHMQALPPR

SEQ ID NO: 31469 - protein, 319 aa, synthetic construct
PKANPTVTLFPPSSEELQANKATLVCLISDFYPGAVTVAWKADGSPVKAGVETTKPSKQSNNKYAASSYLSLTPEQWKSHRSYSCQVTHEGSTVEKTVAPTECSIPEDTFFPSPESSCDVKLVEKSFETDTNLNFQNLLVIVLRILLLKVAGFNLLMTLRLWSSKRGRKKLLYIFKQPFMRPVQTTQEEDGCSCRFPEEEEGGCELRVKFSRSADAPAYQQGQNQLYNELNLGRREEYDVLDKRRGRDPEMGGKPQRRKNPQEGLYNELQKDKMAEAYSEIGMKGERRRGKGHDGLYQGLSTATKDTYDALHMQALPPR

SEQ ID NO: 31470 - protein, 318 aa, synthetic construct
KANPTVTLFPPSSEELQANKATLVCLISDFYPGAVTVAWKADGSPVKAGVETTKPSKQSNNKYAASSYLSLTPEQWKSHRSYSCQVTHEGSTVEKTVAPTECSIPEDTFFPSPESSCDVKLVEKSFETDTNLNFQNLLVIVLRILLLKVAGFNLLMTLRLWSSKRGRKKLLYIFKQPFMRPVQTTQEEDGCSCRFPEEEEGGCELRVKFSRSADAPAYQQGQNQLYNELNLGRREEYDVLDKRRGRDPEMGGKPQRRKNPQEGLYNELQKDKMAEAYSEIGMKGERRRGKGHDGLYQGLSTATKDTYDALHMQALPPR

SEQ ID NO: 31471 - protein, 317 aa, synthetic construct
ANPTVTLFPPSSEELQANKATLVCLISDFYPGAVTVAWKADGSPVKAGVETTKPSKQSNNKYAASSYLSLTPEQWKSHRSYSCQVTHEGSTVEKTVAPTECSIPEDTFFPSPESSCDVKLVEKSFETDTNLNFQNLLVIVLRILLLKVAGFNLLMTLRLWSSKRGRKKLLYIFKQPFMRPVQTTQEEDGCSCRFPEEEEGGCELRVKFSRSADAPAYQQGQNQLYNELNLGRREEYDVLDKRRGRDPEMGGKPQRRKNPQEGLYNELQKDKMAEAYSEIGMKGERRRGKGHDGLYQGLSTATKDTYDALHMQALPPR

SEQ ID NO: 31472 - protein, 316 aa, synthetic construct
NPTVTLFPPSSEELQANKATLVCLISDFYPGAVTVAWKADGSPVKAGVETTKPSKQSNNKYAASSYLSLTPEQWKSHRSYSCQVTHEGSTVEKTVAPTECSIPEDTFFPSPESSCDVKLVEKSFETDTNLNFQNLLVIVLRILLLKVAGFNLLMTLRLWSSKRGRKKLLYIFKQPFMRPVQTTQEEDGCSCRFPEEEEGGCELRVKFSRSADAPAYQQGQNQLYNELNLGRREEYDVLDKRRGRDPEMGGKPQRRKNPQEGLYNELQKDKMAEAYSEIGMKGERRRGKGHDGLYQGLSTATKDTYDALHMQALPPR

SEQ ID NO: 31473 - protein, 315 aa, synthetic construct
PTVTLFPPSSEELQANKATLVCLISDFYPGAVTVAWKADGSPVKAGVETTKPSKQSNNKYAASSYLSLTPEQWKSHRSYSCQVTHEGSTVEKTVAPTECSIPEDTFFPSPESSCDVKLVEKSFETDTNLNFQNLLVIVLRILLLKVAGFNLLMTLRLWSSKRGRKKLLYIFKQPFMRPVQTTQEEDGCSCRFPEEEEGGCELRVKFSRSADAPAYQQGQNQLYNELNLGRREEYDVLDKRRGRDPEMGGKPQRRKNPQEGLYNELQKDKMAEAYSEIGMKGERRRGKGHDGLYQGLSTATKDTYDALHMQALPPR

SEQ ID NO: 31474 - protein, 314 aa, synthetic construct
TVTLFPPSSEELQANKATLVCLISDFYPGAVTVAWKADGSPVKAGVETTKPSKQSNNKYAASSYLSLTPEQWKSHRSYSCQVTHEGSTVEKTVAPTECSIPEDTFFPSPESSCDVKLVEKSFETDTNLNFQNLLVIVLRILLLKVAGFNLLMTLRLWSSKRGRKKLLYIFKQPFMRPVQTTQEEDGCSCRFPEEEEGGCELRVKFSRSADAPAYQQGQNQLYNELNLGRREEYDVLDKRRGRDPEMGGKPQRRKNPQEGLYNELQKDKMAEAYSEIGMKGERRRGKGHDGLYQGLSTATKDTYDALHMQALPPR

SEQ ID NO: 31475 - protein, 313 aa, synthetic construct
VTLFPPSSEELQANKATLVCLISDFYPGAVTVAWKADGSPVKAGVETTKPSKQSNNKYAASSYLSLTPEQWKSHRSYSCQVTHEGSTVEKTVAPTECSIPEDTFFPSPESSCDVKLVEKSFETDTNLNFQNLLVIVLRILLLKVAGFNLLMTLRLWSSKRGRKKLLYIFKQPFMRPVQTTQEEDGCSCRFPEEEEGGCELRVKFSRSADAPAYQQGQNQLYNELNLGRREEYDVLDKRRGRDPEMGGKPQRRKNPQEGLYNELQKDKMAEAYSEIGMKGERRRGKGHDGLYQGLSTATKDTYDALHMQALPPR

SEQ ID NO: 31476 - protein, 312 aa, synthetic construct
TLFPPSSEELQANKATLVCLISDFYPGAVTVAWKADGSPVKAGVETTKPSKQSNNKYAASSYLSLTPEQWKSHRSYSCQVTHEGSTVEKTVAPTECSIPEDTFFPSPESSCDVKLVEKSFETDTNLNFQNLLVIVLRILLLKVAGFNLLMTLRLWSSKRGRKKLLYIFKQPFMRPVQTTQEEDGCSCRFPEEEEGGCELRVKFSRSADAPAYQQGQNQLYNELNLGRREEYDVLDKRRGRDPEMGGKPQRRKNPQEGLYNELQKDKMAEAYSEIGMKGERRRGKGHDGLYQGLSTATKDTYDALHMQALPPR

SEQ ID NO: 31477 - protein, 311 aa, synthetic construct
LFPPSSEELQANKATLVCLISDFYPGAVTVAWKADGSPVKAGVETTKPSKQSNNKYAASSYLSLTPEQWKSHRSYSCQVTHEGSTVEKTVAPTECSIPEDTFFPSPESSCDVKLVEKSFETDTNLNFQNLLVIVLRILLLKVAGFNLLMTLRLWSSKRGRKKLLYIFKQPFMRPVQTTQEEDGCSCRFPEEEEGGCELRVKFSRSADAPAYQQGQNQLYNELNLGRREEYDVLDKRRGRDPEMGGKPQRRKNPQEGLYNELQKDKMAEAYSEIGMKGERRRGKGHDGLYQGLSTATKDTYDALHMQALPPR

SEQ ID NO: 31478 - protein, 331 aa, synthetic construct
DLKNVFPPEVAVFEPSEAEISHTQKATLVCLATGFYPDHVELSWWVNGKEVHSGVCTDPQPLKEQPALNDSRYCLSSRLRVSATFWQNPRNHFRCQVQFYGLSENDEWTQDRAKPVTQIVSAEAWGRADCDVKLVEKSFETDTNLNFQNLLVIVLRILLLKVAGFNLLMTLRLWSSKRGRKKLLYIFKQPFMRPVQTTQEEDGCSCRFPEEEEGGCELRVKFSRSADAPAYQQGQNQLYNELNLGRREEYDVLDKRRGRDPEMGGKPQRRKNPQEGLYNELQKDKMAEAYSEIGMKGERRRGKGHDGLYQGLSTATKDTYDALHMQALPPR

SEQ ID NO: 31479 - protein, 330 aa, synthetic construct
LKNVFPPEVAVFEPSEAEISHTQKATLVCLATGFYPDHVELSWWVNGKEVHSGVCTDPQPLKEQPALNDSRYCLSSRLRVSATFWQNPRNHFRCQVQFYGLSENDEWTQDRAKPVTQIVSAEAWGRADCDVKLVEKSFETDTNLNFQNLLVIVLRILLLKVAGFNLLMTLRLWSSKRGRKKLLYIFKQPFMRPVQTTQEEDGCSCRFPEEEEGGCELRVKFSRSADAPAYQQGQNQLYNELNLGRREEYDVLDKRRGRDPEMGGKPQRRKNPQEGLYNELQKDKMAEAYSEIGMKGERRRGKGHDGLYQGLSTATKDTYDALHMQALPPR

SEQ ID NO: 31480 - protein, 329 aa, synthetic construct
KNVFPPEVAVFEPSEAEISHTQKATLVCLATGFYPDHVELSWWVNGKEVHSGVCTDPQPLKEQPALNDSRYCLSSRLRVSATFWQNPRNHFRCQVQFYGLSENDEWTQDRAKPVTQIVSAEAWGRADCDVKLVEKSFETDTNLNFQNLLVIVLRILLLKVAGFNLLMTLRLWSSKRGRKKLLYIFKQPFMRPVQTTQEEDGCSCRFPEEEEGGCELRVKFSRSADAPAYQQGQNQLYNELNLGRREEYDVLDKRRGRDPEMGGKPQRRKNPQEGLYNELQKDKMAEAYSEIGMKGERRRGKGHDGLYQGLSTATKDTYDALHMQALPPR

SEQ ID NO: 31481 - protein, 328 aa, synthetic construct
NVFPPEVAVFEPSEAEISHTQKATLVCLATGFYPDHVELSWWVNGKEVHSGVCTDPQPLKEQPALNDSRYCLSSRLRVSATFWQNPRNHFRCQVQFYGLSENDEWTQDRAKPVTQIVSAEAWGRADCDVKLVEKSFETDTNLNFQNLLVIVLRILLLKVAGFNLLMTLRLWSSKRGRKKLLYIFKQPFMRPVQTTQEEDGCSCRFPEEEEGGCELRVKFSRSADAPAYQQGQNQLYNELNLGRREEYDVLDKRRGRDPEMGGKPQRRKNPQEGLYNELQKDKMAEAYSEIGMKGERRRGKGHDGLYQGLSTATKDTYDALHMQALPPR

SEQ ID NO: 31482 - protein, 327 aa, synthetic construct
VFPPEVAVFEPSEAEISHTQKATLVCLATGFYPDHVELSWWVNGKEVHSGVCTDPQPLKEQPALNDSRYCLSSRLRVSATFWQNPRNHFRCQVQFYGLSENDEWTQDRAKPVTQIVSAEAWGRADCDVKLVEKSFETDTNLNFQNLLVIVLRILLLKVAGFNLLMTLRLWSSKRGRKKLLYIFKQPFMRPVQTTQEEDGCSCRFPEEEEGGCELRVKFSRSADAPAYQQGQNQLYNELNLGRREEYDVLDKRRGRDPEMGGKPQRRKNPQEGLYNELQKDKMAEAYSEIGMKGERRRGKGHDGLYQGLSTATKDTYDALHMQALPPR

SEQ ID NO: 31483 - protein, 326 aa, synthetic construct
FPPEVAVFEPSEAEISHTQKATLVCLATGFYPDHVELSWWVNGKEVHSGVCTDPQPLKEQPALNDSRYCLSSRLRVSATFWQNPRNHFRCQVQFYGLSENDEWTQDRAKPVTQIVSAEAWGRADCDVKLVEKSFETDTNLNFQNLLVIVLRILLLKVAGFNLLMTLRLWSSKRGRKKLLYIFKQPFMRPVQTTQEEDGCSCRFPEEEEGGCELRVKFSRSADAPAYQQGQNQLYNELNLGRREEYDVLDKRRGRDPEMGGKPQRRKNPQEGLYNELQKDKMAEAYSEIGMKGERRRGKGHDGLYQGLSTATKDTYDALHMQALPPR

SEQ ID NO: 31484 - protein, 325 aa, synthetic construct
PPEVAVFEPSEAEISHTQKATLVCLATGFYPDHVELSWWVNGKEVHSGVCTDPQPLKEQPALNDSRYCLSSRLRVSATFWQNPRNHFRCQVQFYGLSENDEWTQDRAKPVTQIVSAEAWGRADCDVKLVEKSFETDTNLNFQNLLVIVLRILLLKVAGFNLLMTLRLWSSKRGRKKLLYIFKQPFMRPVQTTQEEDGCSCRFPEEEEGGCELRVKFSRSADAPAYQQGQNQLYNELNLGRREEYDVLDKRRGRDPEMGGKPQRRKNPQEGLYNELQKDKMAEAYSEIGMKGERRRGKGHDGLYQGLSTATKDTYDALHMQALPPR

SEQ ID NO: 31485 - protein, 324 aa, synthetic construct
PEVAVFEPSEAEISHTQKATLVCLATGFYPDHVELSWWVNGKEVHSGVCTDPQPLKEQPALNDSRYCLSSRLRVSATFWQNPRNHFRCQVQFYGLSENDEWTQDRAKPVTQIVSAEAWGRADCDVKLVEKSFETDTNLNFQNLLVIVLRILLLKVAGFNLLMTLRLWSSKRGRKKLLYIFKQPFMRPVQTTQEEDGCSCRFPEEEEGGCELRVKFSRSADAPAYQQGQNQLYNELNLGRREEYDVLDKRRGRDPEMGGKPQRRKNPQEGLYNELQKDKMAEAYSEIGMKGERRRGKGHDGLYQGLSTATKDTYDALHMQALPPR

SEQ ID NO: 31486 - protein, 323 aa, synthetic construct
EVAVFEPSEAEISHTQKATLVCLATGFYPDHVELSWWVNGKEVHSGVCTDPQPLKEQPALNDSRYCLSSRLRVSATFWQNPRNHFRCQVQFYGLSENDEWTQDRAKPVTQIVSAEAWGRADCDVKLVEKSFETDTNLNFQNLLVIVLRILLLKVAGFNLLMTLRLWSSKRGRKKLLYIFKQPFMRPVQTTQEEDGCSCRFPEEEEGGCELRVKFSRSADAPAYQQGQNQLYNELNLGRREEYDVLDKRRGRDPEMGGKPQRRKNPQEGLYNELQKDKMAEAYSEIGMKGERRRGKGHDGLYQGLSTATKDTYDALHMQALPPR

SEQ ID NO: 31487 - protein, 322 aa, synthetic construct
VAVFEPSEAEISHTQKATLVCLATGFYPDHVELSWWVNGKEVHSGVCTDPQPLKEQPALNDSRYCLSSRLRVSATFWQNPRNHFRCQVQFYGLSENDEWTQDRAKPVTQIVSAEAWGRADCDVKLVEKSFETDTNLNFQNLLVIVLRILLLKVAGFNLLMTLRLWSSKRGRKKLLYIFKQPFMRPVQTTQEEDGCSCRFPEEEEGGCELRVKFSRSADAPAYQQGQNQLYNELNLGRREEYDVLDKRRGRDPEMGGKPQRRKNPQEGLYNELQKDKMAEAYSEIGMKGERRRGKGHDGLYQGLSTATKDTYDALHMQALPPR

SEQ ID NO: 31488 - protein, 321 aa, synthetic construct
AVFEPSEAEISHTQKATLVCLATGFYPDHVELSWWVNGKEVHSGVCTDPQPLKEQPALNDSRYCLSSRLRVSATFWQNPRNHFRCQVQFYGLSENDEWTQDRAKPVTQIVSAEAWGRADCDVKLVEKSFETDTNLNFQNLLVIVLRILLLKVAGFNLLMTLRLWSSKRGRKKLLYIFKQPFMRPVQTTQEEDGCSCRFPEEEEGGCELRVKFSRSADAPAYQQGQNQLYNELNLGRREEYDVLDKRRGRDPEMGGKPQRRKNPQEGLYNELQKDKMAEAYSEIGMKGERRRGKGHDGLYQGLSTATKDTYDALHMQALPPR

SEQ ID NO: 31489 - protein, 320 aa, synthetic construct
VFEPSEAEISHTQKATLVCLATGFYPDHVELSWWVNGKEVHSGVCTDPQPLKEQPALNDSRYCLSSRLRVSATFWQNPRNHFRCQVQFYGLSENDEWTQDRAKPVTQIVSAEAWGRADCDVKLVEKSFETDTNLNFQNLLVIVLRILLLKVAGFNLLMTLRLWSSKRGRKKLLYIFKQPFMRPVQTTQEEDGCSCRFPEEEEGGCELRVKFSRSADAPAYQQGQNQLYNELNLGRREEYDVLDKRRGRDPEMGGKPQRRKNPQEGLYNELQKDKMAEAYSEIGMKGERRRGKGHDGLYQGLSTATKDTYDALHMQALPPR

SEQ ID NO: 31490 - protein, 319 aa, synthetic construct
FEPSEAEISHTQKATLVCLATGFYPDHVELSWWVNGKEVHSGVCTDPQPLKEQPALNDSRYCLSSRLRVSATFWQNPRNHFRCQVQFYGLSENDEWTQDRAKPVTQIVSAEAWGRADCDVKLVEKSFETDTNLNFQNLLVIVLRILLLKVAGFNLLMTLRLWSSKRGRKKLLYIFKQPFMRPVQTTQEEDGCSCRFPEEEEGGCELRVKFSRSADAPAYQQGQNQLYNELNLGRREEYDVLDKRRGRDPEMGGKPQRRKNPQEGLYNELQKDKMAEAYSEIGMKGERRRGKGHDGLYQGLSTATKDTYDALHMQALPPR

SEQ ID NO: 31491 - protein, 318 aa, synthetic construct
EPSEAEISHTQKATLVCLATGFYPDHVELSWWVNGKEVHSGVCTDPQPLKEQPALNDSRYCLSSRLRVSATFWQNPRNHFRCQVQFYGLSENDEWTQDRAKPVTQIVSAEAWGRADCDVKLVEKSFETDTNLNFQNLLVIVLRILLLKVAGFNLLMTLRLWSSKRGRKKLLYIFKQPFMRPVQTTQEEDGCSCRFPEEEEGGCELRVKFSRSADAPAYQQGQNQLYNELNLGRREEYDVLDKRRGRDPEMGGKPQRRKNPQEGLYNELQKDKMAEAYSEIGMKGERRRGKGHDGLYQGLSTATKDTYDALHMQALPPR

SEQ ID NO: 31492 - protein, 317 aa, synthetic construct
PSEAEISHTQKATLVCLATGFYPDHVELSWWVNGKEVHSGVCTDPQPLKEQPALNDSRYCLSSRLRVSATFWQNPRNHFRCQVQFYGLSENDEWTQDRAKPVTQIVSAEAWGRADCDVKLVEKSFETDTNLNFQNLLVIVLRILLLKVAGFNLLMTLRLWSSKRGRKKLLYIFKQPFMRPVQTTQEEDGCSCRFPEEEEGGCELRVKFSRSADAPAYQQGQNQLYNELNLGRREEYDVLDKRRGRDPEMGGKPQRRKNPQEGLYNELQKDKMAEAYSEIGMKGERRRGKGHDGLYQGLSTATKDTYDALHMQALPPR

SEQ ID NO: 31493 - protein, 316 aa, synthetic construct
SEAEISHTQKATLVCLATGFYPDHVELSWWVNGKEVHSGVCTDPQPLKEQPALNDSRYCLSSRLRVSATFWQNPRNHFRCQVQFYGLSENDEWTQDRAKPVTQIVSAEAWGRADCDVKLVEKSFETDTNLNFQNLLVIVLRILLLKVAGFNLLMTLRLWSSKRGRKKLLYIFKQPFMRPVQTTQEEDGCSCRFPEEEEGGCELRVKFSRSADAPAYQQGQNQLYNELNLGRREEYDVLDKRRGRDPEMGGKPQRRKNPQEGLYNELQKDKMAEAYSEIGMKGERRRGKGHDGLYQGLSTATKDTYDALHMQALPPR

SEQ ID NO: 31494 - protein, 315 aa, synthetic construct
EAEISHTQKATLVCLATGFYPDHVELSWWVNGKEVHSGVCTDPQPLKEQPALNDSRYCLSSRLRVSATFWQNPRNHFRCQVQFYGLSENDEWTQDRAKPVTQIVSAEAWGRADCDVKLVEKSFETDTNLNFQNLLVIVLRILLLKVAGFNLLMTLRLWSSKRGRKKLLYIFKQPFMRPVQTTQEEDGCSCRFPEEEEGGCELRVKFSRSADAPAYQQGQNQLYNELNLGRREEYDVLDKRRGRDPEMGGKPQRRKNPQEGLYNELQKDKMAEAYSEIGMKGERRRGKGHDGLYQGLSTATKDTYDALHMQALPPR

SEQ ID NO: 31495 - protein, 314 aa, synthetic construct
AEISHTQKATLVCLATGFYPDHVELSWWVNGKEVHSGVCTDPQPLKEQPALNDSRYCLSSRLRVSATFWQNPRNHFRCQVQFYGLSENDEWTQDRAKPVTQIVSAEAWGRADCDVKLVEKSFETDTNLNFQNLLVIVLRILLLKVAGFNLLMTLRLWSSKRGRKKLLYIFKQPFMRPVQTTQEEDGCSCRFPEEEEGGCELRVKFSRSADAPAYQQGQNQLYNELNLGRREEYDVLDKRRGRDPEMGGKPQRRKNPQEGLYNELQKDKMAEAYSEIGMKGERRRGKGHDGLYQGLSTATKDTYDALHMQALPPR

SEQ ID NO: 31496 - protein, 313 aa, synthetic construct
EISHTQKATLVCLATGFYPDHVELSWWVNGKEVHSGVCTDPQPLKEQPALNDSRYCLSSRLRVSATFWQNPRNHFRCQVQFYGLSENDEWTQDRAKPVTQIVSAEAWGRADCDVKLVEKSFETDTNLNFQNLLVIVLRILLLKVAGFNLLMTLRLWSSKRGRKKLLYIFKQPFMRPVQTTQEEDGCSCRFPEEEEGGCELRVKFSRSADAPAYQQGQNQLYNELNLGRREEYDVLDKRRGRDPEMGGKPQRRKNPQEGLYNELQKDKMAEAYSEIGMKGERRRGKGHDGLYQGLSTATKDTYDALHMQALPPR

SEQ ID NO: 31497 - protein, 312 aa, synthetic construct
ISHTQKATLVCLATGFYPDHVELSWWVNGKEVHSGVCTDPQPLKEQPALNDSRYCLSSRLRVSATFWQNPRNHFRCQVQFYGLSENDEWTQDRAKPVTQIVSAEAWGRADCDVKLVEKSFETDTNLNFQNLLVIVLRILLLKVAGFNLLMTLRLWSSKRGRKKLLYIFKQPFMRPVQTTQEEDGCSCRFPEEEEGGCELRVKFSRSADAPAYQQGQNQLYNELNLGRREEYDVLDKRRGRDPEMGGKPQRRKNPQEGLYNELQKDKMAEAYSEIGMKGERRRGKGHDGLYQGLSTATKDTYDALHMQALPPR

SEQ ID NO: 31498 - protein, 311 aa, synthetic construct
SHTQKATLVCLATGFYPDHVELSWWVNGKEVHSGVCTDPQPLKEQPALNDSRYCLSSRLRVSATFWQNPRNHFRCQVQFYGLSENDEWTQDRAKPVTQIVSAEAWGRADCDVKLVEKSFETDTNLNFQNLLVIVLRILLLKVAGFNLLMTLRLWSSKRGRKKLLYIFKQPFMRPVQTTQEEDGCSCRFPEEEEGGCELRVKFSRSADAPAYQQGQNQLYNELNLGRREEYDVLDKRRGRDPEMGGKPQRRKNPQEGLYNELQKDKMAEAYSEIGMKGERRRGKGHDGLYQGLSTATKDTYDALHMQALPPR

SEQ ID NO: 31499 - protein, 306 aa, synthetic construct
ATLVCLATGFYPDHVELSWWVNGKEVHSGVCTDPQPLKEQPALNDSRYCLSSRLRVSATFWQNPRNHFRCQVQFYGLSENDEWTQDRAKPVTQIVSAEAWGRADCDVKLVEKSFETDTNLNFQNLLVIVLRILLLKVAGFNLLMTLRLWSSKRGRKKLLYIFKQPFMRPVQTTQEEDGCSCRFPEEEEGGCELRVKFSRSADAPAYQQGQNQLYNELNLGRREEYDVLDKRRGRDPEMGGKPQRRKNPQEGLYNELQKDKMAEAYSEIGMKGERRRGKGHDGLYQGLSTATKDTYDALHMQALPPR

SEQ ID NO: 31500 - protein, 301 aa, synthetic construct
LATGFYPDHVELSWWVNGKEVHSGVCTDPQPLKEQPALNDSRYCLSSRLRVSATFWQNPRNHFRCQVQFYGLSENDEWTQDRAKPVTQIVSAEAWGRADCDVKLVEKSFETDTNLNFQNLLVIVLRILLLKVAGFNLLMTLRLWSSKRGRKKLLYIFKQPFMRPVQTTQEEDGCSCRFPEEEEGGCELRVKFSRSADAPAYQQGQNQLYNELNLGRREEYDVLDKRRGRDPEMGGKPQRRKNPQEGLYNELQKDKMAEAYSEIGMKGERRRGKGHDGLYQGLSTATKDTYDALHMQALPPR

SEQ ID NO: 31501 - protein, 328 aa, synthetic construct
DLKNVFPPEVAVFEPSEAEISHTQKATLVCLATGFYPDHVELSWWVNGKEVHSGVCTDPQPLKEQPALNDSRYCLSSRLRVSATFWQNPRNHFRCQVQFYGLSENDEWTQDRAKPVTQIVSAEAWGRADCGFTSESYQQGVLSATNLLVIVLRILLLKVAGFNLLMTLRLWSSKRGRKKLLYIFKQPFMRPVQTTQEEDGCSCRFPEEEEGGCELRVKFSRSADAPAYQQGQNQLYNELNLGRREEYDVLDKRRGRDPEMGGKPQRRKNPQEGLYNELQKDKMAEAYSEIGMKGERRRGKGHDGLYQGLSTATKDTYDALHMQALPPR

SEQ ID NO: 31502 - protein, 327 aa, synthetic construct
LKNVFPPEVAVFEPSEAEISHTQKATLVCLATGFYPDHVELSWWVNGKEVHSGVCTDPQPLKEQPALNDSRYCLSSRLRVSATFWQNPRNHFRCQVQFYGLSENDEWTQDRAKPVTQIVSAEAWGRADCGFTSESYQQGVLSATNLLVIVLRILLLKVAGFNLLMTLRLWSSKRGRKKLLYIFKQPFMRPVQTTQEEDGCSCRFPEEEEGGCELRVKFSRSADAPAYQQGQNQLYNELNLGRREEYDVLDKRRGRDPEMGGKPQRRKNPQEGLYNELQKDKMAEAYSEIGMKGERRRGKGHDGLYQGLSTATKDTYDALHMQALPPR

SEQ ID NO: 31503 - protein, 326 aa, synthetic construct
KNVFPPEVAVFEPSEAEISHTQKATLVCLATGFYPDHVELSWWVNGKEVHSGVCTDPQPLKEQPALNDSRYCLSSRLRVSATFWQNPRNHFRCQVQFYGLSENDEWTQDRAKPVTQIVSAEAWGRADCGFTSESYQQGVLSATNLLVIVLRILLLKVAGFNLLMTLRLWSSKRGRKKLLYIFKQPFMRPVQTTQEEDGCSCRFPEEEEGGCELRVKFSRSADAPAYQQGQNQLYNELNLGRREEYDVLDKRRGRDPEMGGKPQRRKNPQEGLYNELQKDKMAEAYSEIGMKGERRRGKGHDGLYQGLSTATKDTYDALHMQALPPR

SEQ ID NO: 31504 - protein, 325 aa, synthetic construct
NVFPPEVAVFEPSEAEISHTQKATLVCLATGFYPDHVELSWWVNGKEVHSGVCTDPQPLKEQPALNDSRYCLSSRLRVSATFWQNPRNHFRCQVQFYGLSENDEWTQDRAKPVTQIVSAEAWGRADCGFTSESYQQGVLSATNLLVIVLRILLLKVAGFNLLMTLRLWSSKRGRKKLLYIFKQPFMRPVQTTQEEDGCSCRFPEEEEGGCELRVKFSRSADAPAYQQGQNQLYNELNLGRREEYDVLDKRRGRDPEMGGKPQRRKNPQEGLYNELQKDKMAEAYSEIGMKGERRRGKGHDGLYQGLSTATKDTYDALHMQALPPR

SEQ ID NO: 31505 - protein, 324 aa, synthetic construct
VFPPEVAVFEPSEAEISHTQKATLVCLATGFYPDHVELSWWVNGKEVHSGVCTDPQPLKEQPALNDSRYCLSSRLRVSATFWQNPRNHFRCQVQFYGLSENDEWTQDRAKPVTQIVSAEAWGRADCGFTSESYQQGVLSATNLLVIVLRILLLKVAGFNLLMTLRLWSSKRGRKKLLYIFKQPFMRPVQTTQEEDGCSCRFPEEEEGGCELRVKFSRSADAPAYQQGQNQLYNELNLGRREEYDVLDKRRGRDPEMGGKPQRRKNPQEGLYNELQKDKMAEAYSEIGMKGERRRGKGHDGLYQGLSTATKDTYDALHMQALPPR

SEQ ID NO: 31506 - protein, 323 aa, synthetic construct
FPPEVAVFEPSEAEISHTQKATLVCLATGFYPDHVELSWWVNGKEVHSGVCTDPQPLKEQPALNDSRYCLSSRLRVSATFWQNPRNHFRCQVQFYGLSENDEWTQDRAKPVTQIVSAEAWGRADCGFTSESYQQGVLSATNLLVIVLRILLLKVAGFNLLMTLRLWSSKRGRKKLLYIFKQPFMRPVQTTQEEDGCSCRFPEEEEGGCELRVKFSRSADAPAYQQGQNQLYNELNLGRREEYDVLDKRRGRDPEMGGKPQRRKNPQEGLYNELQKDKMAEAYSEIGMKGERRRGKGHDGLYQGLSTATKDTYDALHMQALPPR

SEQ ID NO: 31507 - protein, 322 aa, synthetic construct
PPEVAVFEPSEAEISHTQKATLVCLATGFYPDHVELSWWVNGKEVHSGVCTDPQPLKEQPALNDSRYCLSSRLRVSATFWQNPRNHFRCQVQFYGLSENDEWTQDRAKPVTQIVSAEAWGRADCGFTSESYQQGVLSATNLLVIVLRILLLKVAGFNLLMTLRLWSSKRGRKKLLYIFKQPFMRPVQTTQEEDGCSCRFPEEEEGGCELRVKFSRSADAPAYQQGQNQLYNELNLGRREEYDVLDKRRGRDPEMGGKPQRRKNPQEGLYNELQKDKMAEAYSEIGMKGERRRGKGHDGLYQGLSTATKDTYDALHMQALPPR

SEQ ID NO: 31508 - protein, 321 aa, synthetic construct
PEVAVFEPSEAEISHTQKATLVCLATGFYPDHVELSWWVNGKEVHSGVCTDPQPLKEQPALNDSRYCLSSRLRVSATFWQNPRNHFRCQVQFYGLSENDEWTQDRAKPVTQIVSAEAWGRADCGFTSESYQQGVLSATNLLVIVLRILLLKVAGFNLLMTLRLWSSKRGRKKLLYIFKQPFMRPVQTTQEEDGCSCRFPEEEEGGCELRVKFSRSADAPAYQQGQNQLYNELNLGRREEYDVLDKRRGRDPEMGGKPQRRKNPQEGLYNELQKDKMAEAYSEIGMKGERRRGKGHDGLYQGLSTATKDTYDALHMQALPPR

SEQ ID NO: 31509 - protein, 320 aa, synthetic construct
EVAVFEPSEAEISHTQKATLVCLATGFYPDHVELSWWVNGKEVHSGVCTDPQPLKEQPALNDSRYCLSSRLRVSATFWQNPRNHFRCQVQFYGLSENDEWTQDRAKPVTQIVSAEAWGRADCGFTSESYQQGVLSATNLLVIVLRILLLKVAGFNLLMTLRLWSSKRGRKKLLYIFKQPFMRPVQTTQEEDGCSCRFPEEEEGGCELRVKFSRSADAPAYQQGQNQLYNELNLGRREEYDVLDKRRGRDPEMGGKPQRRKNPQEGLYNELQKDKMAEAYSEIGMKGERRRGKGHDGLYQGLSTATKDTYDALHMQALPPR

SEQ ID NO: 31510 - protein, 319 aa, synthetic construct
VAVFEPSEAEISHTQKATLVCLATGFYPDHVELSWWVNGKEVHSGVCTDPQPLKEQPALNDSRYCLSSRLRVSATFWQNPRNHFRCQVQFYGLSENDEWTQDRAKPVTQIVSAEAWGRADCGFTSESYQQGVLSATNLLVIVLRILLLKVAGFNLLMTLRLWSSKRGRKKLLYIFKQPFMRPVQTTQEEDGCSCRFPEEEEGGCELRVKFSRSADAPAYQQGQNQLYNELNLGRREEYDVLDKRRGRDPEMGGKPQRRKNPQEGLYNELQKDKMAEAYSEIGMKGERRRGKGHDGLYQGLSTATKDTYDALHMQALPPR

SEQ ID NO: 31511 - protein, 318 aa, synthetic construct
AVFEPSEAEISHTQKATLVCLATGFYPDHVELSWWVNGKEVHSGVCTDPQPLKEQPALNDSRYCLSSRLRVSATFWQNPRNHFRCQVQFYGLSENDEWTQDRAKPVTQIVSAEAWGRADCGFTSESYQQGVLSATNLLVIVLRILLLKVAGFNLLMTLRLWSSKRGRKKLLYIFKQPFMRPVQTTQEEDGCSCRFPEEEEGGCELRVKFSRSADAPAYQQGQNQLYNELNLGRREEYDVLDKRRGRDPEMGGKPQRRKNPQEGLYNELQKDKMAEAYSEIGMKGERRRGKGHDGLYQGLSTATKDTYDALHMQALPPR

SEQ ID NO: 31512 - protein, 317 aa, synthetic construct
VFEPSEAEISHTQKATLVCLATGFYPDHVELSWWVNGKEVHSGVCTDPQPLKEQPALNDSRYCLSSRLRVSATFWQNPRNHFRCQVQFYGLSENDEWTQDRAKPVTQIVSAEAWGRADCGFTSESYQQGVLSATNLLVIVLRILLLKVAGFNLLMTLRLWSSKRGRKKLLYIFKQPFMRPVQTTQEEDGCSCRFPEEEEGGCELRVKFSRSADAPAYQQGQNQLYNELNLGRREEYDVLDKRRGRDPEMGGKPQRRKNPQEGLYNELQKDKMAEAYSEIGMKGERRRGKGHDGLYQGLSTATKDTYDALHMQALPPR

SEQ ID NO: 31513 - protein, 316 aa, synthetic construct
FEPSEAEISHTQKATLVCLATGFYPDHVELSWWVNGKEVHSGVCTDPQPLKEQPALNDSRYCLSSRLRVSATFWQNPRNHFRCQVQFYGLSENDEWTQDRAKPVTQIVSAEAWGRADCGFTSESYQQGVLSATNLLVIVLRILLLKVAGFNLLMTLRLWSSKRGRKKLLYIFKQPFMRPVQTTQEEDGCSCRFPEEEEGGCELRVKFSRSADAPAYQQGQNQLYNELNLGRREEYDVLDKRRGRDPEMGGKPQRRKNPQEGLYNELQKDKMAEAYSEIGMKGERRRGKGHDGLYQGLSTATKDTYDALHMQALPPR

SEQ ID NO: 31514 - protein, 315 aa, synthetic construct
EPSEAEISHTQKATLVCLATGFYPDHVELSWWVNGKEVHSGVCTDPQPLKEQPALNDSRYCLSSRLRVSATFWQNPRNHFRCQVQFYGLSENDEWTQDRAKPVTQIVSAEAWGRADCGFTSESYQQGVLSATNLLVIVLRILLLKVAGFNLLMTLRLWSSKRGRKKLLYIFKQPFMRPVQTTQEEDGCSCRFPEEEEGGCELRVKFSRSADAPAYQQGQNQLYNELNLGRREEYDVLDKRRGRDPEMGGKPQRRKNPQEGLYNELQKDKMAEAYSEIGMKGERRRGKGHDGLYQGLSTATKDTYDALHMQALPPR

SEQ ID NO: 31515 - protein, 314 aa, synthetic construct
PSEAEISHTQKATLVCLATGFYPDHVELSWWVNGKEVHSGVCTDPQPLKEQPALNDSRYCLSSRLRVSATFWQNPRNHFRCQVQFYGLSENDEWTQDRAKPVTQIVSAEAWGRADCGFTSESYQQGVLSATNLLVIVLRILLLKVAGFNLLMTLRLWSSKRGRKKLLYIFKQPFMRPVQTTQEEDGCSCRFPEEEEGGCELRVKFSRSADAPAYQQGQNQLYNELNLGRREEYDVLDKRRGRDPEMGGKPQRRKNPQEGLYNELQKDKMAEAYSEIGMKGERRRGKGHDGLYQGLSTATKDTYDALHMQALPPR

SEQ ID NO: 31516 - protein, 313 aa, synthetic construct
SEAEISHTQKATLVCLATGFYPDHVELSWWVNGKEVHSGVCTDPQPLKEQPALNDSRYCLSSRLRVSATFWQNPRNHFRCQVQFYGLSENDEWTQDRAKPVTQIVSAEAWGRADCGFTSESYQQGVLSATNLLVIVLRILLLKVAGFNLLMTLRLWSSKRGRKKLLYIFKQPFMRPVQTTQEEDGCSCRFPEEEEGGCELRVKFSRSADAPAYQQGQNQLYNELNLGRREEYDVLDKRRGRDPEMGGKPQRRKNPQEGLYNELQKDKMAEAYSEIGMKGERRRGKGHDGLYQGLSTATKDTYDALHMQALPPR

SEQ ID NO: 31517 - protein, 312 aa, synthetic construct
EAEISHTQKATLVCLATGFYPDHVELSWWVNGKEVHSGVCTDPQPLKEQPALNDSRYCLSSRLRVSATFWQNPRNHFRCQVQFYGLSENDEWTQDRAKPVTQIVSAEAWGRADCGFTSESYQQGVLSATNLLVIVLRILLLKVAGFNLLMTLRLWSSKRGRKKLLYIFKQPFMRPVQTTQEEDGCSCRFPEEEEGGCELRVKFSRSADAPAYQQGQNQLYNELNLGRREEYDVLDKRRGRDPEMGGKPQRRKNPQEGLYNELQKDKMAEAYSEIGMKGERRRGKGHDGLYQGLSTATKDTYDALHMQALPPR

SEQ ID NO: 31518 - protein, 311 aa, synthetic construct
AEISHTQKATLVCLATGFYPDHVELSWWVNGKEVHSGVCTDPQPLKEQPALNDSRYCLSSRLRVSATFWQNPRNHFRCQVQFYGLSENDEWTQDRAKPVTQIVSAEAWGRADCGFTSESYQQGVLSATNLLVIVLRILLLKVAGFNLLMTLRLWSSKRGRKKLLYIFKQPFMRPVQTTQEEDGCSCRFPEEEEGGCELRVKFSRSADAPAYQQGQNQLYNELNLGRREEYDVLDKRRGRDPEMGGKPQRRKNPQEGLYNELQKDKMAEAYSEIGMKGERRRGKGHDGLYQGLSTATKDTYDALHMQALPPR

SEQ ID NO: 31519 - protein, 310 aa, synthetic construct
EISHTQKATLVCLATGFYPDHVELSWWVNGKEVHSGVCTDPQPLKEQPALNDSRYCLSSRLRVSATFWQNPRNHFRCQVQFYGLSENDEWTQDRAKPVTQIVSAEAWGRADCGFTSESYQQGVLSATNLLVIVLRILLLKVAGFNLLMTLRLWSSKRGRKKLLYIFKQPFMRPVQTTQEEDGCSCRFPEEEEGGCELRVKFSRSADAPAYQQGQNQLYNELNLGRREEYDVLDKRRGRDPEMGGKPQRRKNPQEGLYNELQKDKMAEAYSEIGMKGERRRGKGHDGLYQGLSTATKDTYDALHMQALPPR

SEQ ID NO: 31520 - protein, 309 aa, synthetic construct
ISHTQKATLVCLATGFYPDHVELSWWVNGKEVHSGVCTDPQPLKEQPALNDSRYCLSSRLRVSATFWQNPRNHFRCQVQFYGLSENDEWTQDRAKPVTQIVSAEAWGRADCGFTSESYQQGVLSATNLLVIVLRILLLKVAGFNLLMTLRLWSSKRGRKKLLYIFKQPFMRPVQTTQEEDGCSCRFPEEEEGGCELRVKFSRSADAPAYQQGQNQLYNELNLGRREEYDVLDKRRGRDPEMGGKPQRRKNPQEGLYNELQKDKMAEAYSEIGMKGERRRGKGHDGLYQGLSTATKDTYDALHMQALPPR

SEQ ID NO: 31521 - protein, 308 aa, synthetic construct
SHTQKATLVCLATGFYPDHVELSWWVNGKEVHSGVCTDPQPLKEQPALNDSRYCLSSRLRVSATFWQNPRNHFRCQVQFYGLSENDEWTQDRAKPVTQIVSAEAWGRADCGFTSESYQQGVLSATNLLVIVLRILLLKVAGFNLLMTLRLWSSKRGRKKLLYIFKQPFMRPVQTTQEEDGCSCRFPEEEEGGCELRVKFSRSADAPAYQQGQNQLYNELNLGRREEYDVLDKRRGRDPEMGGKPQRRKNPQEGLYNELQKDKMAEAYSEIGMKGERRRGKGHDGLYQGLSTATKDTYDALHMQALPPR

SEQ ID NO: 31522 - protein, 303 aa, synthetic construct
ATLVCLATGFYPDHVELSWWVNGKEVHSGVCTDPQPLKEQPALNDSRYCLSSRLRVSATFWQNPRNHFRCQVQFYGLSENDEWTQDRAKPVTQIVSAEAWGRADCGFTSESYQQGVLSATNLLVIVLRILLLKVAGFNLLMTLRLWSSKRGRKKLLYIFKQPFMRPVQTTQEEDGCSCRFPEEEEGGCELRVKFSRSADAPAYQQGQNQLYNELNLGRREEYDVLDKRRGRDPEMGGKPQRRKNPQEGLYNELQKDKMAEAYSEIGMKGERRRGKGHDGLYQGLSTATKDTYDALHMQALPPR

SEQ ID NO: 31523 - protein, 298 aa, synthetic construct
LATGFYPDHVELSWWVNGKEVHSGVCTDPQPLKEQPALNDSRYCLSSRLRVSATFWQNPRNHFRCQVQFYGLSENDEWTQDRAKPVTQIVSAEAWGRADCGFTSESYQQGVLSATNLLVIVLRILLLKVAGFNLLMTLRLWSSKRGRKKLLYIFKQPFMRPVQTTQEEDGCSCRFPEEEEGGCELRVKFSRSADAPAYQQGQNQLYNELNLGRREEYDVLDKRRGRDPEMGGKPQRRKNPQEGLYNELQKDKMAEAYSEIGMKGERRRGKGHDGLYQGLSTATKDTYDALHMQALPPR

SEQ ID NO: 31524 - protein, 288 aa, synthetic construct
IQNPDPAVYQLRDSKSSDKSVCLFTDFDSQTNVSQSKDSDVYITDKTVLDMRSMDFKSNSAVAWSNKSDFACANAFNNSIGRADCGFTSESYQQGVLSATILYEILLGKATLYAVLVSALVLMAMVKRKDSRGKRGRKKLLYIFKQPFMRPVQTTQEEDGCSCRFPEEEEGGCELRVKFSRSADAPAYQQGQNQLYNELNLGRREEYDVLDKRRGRDPEMGGKPQRRKNPQEGLYNELQKDKMAEAYSEIGMKGERRRGKGHDGLYQGLSTATKDTYDALHMQALPPR

SEQ ID NO: 31525 - protein, 286 aa, synthetic construct
IQNPDPAVYQLRDSKSSDKSVCLFTDFDSQTNVSQSKDSDVYITDKTVLDMRSMDFKSNSAVAWSNKSDFACANAFNNSIADCGFTSESYQQGVLSATILYEILLGKATLYAVLVSALVLMAMVKRKDSRGKRGRKKLLYIFKQPFMRPVQTTQEEDGCSCRFPEEEEGGCELRVKFSRSADAPAYQQGQNQLYNELNLGRREEYDVLDKRRGRDPEMGGKPQRRKNPQEGLYNELQKDKMAEAYSEIGMKGERRRGKGHDGLYQGLSTATKDTYDALHMQALPPR

SEQ ID NO: 31526 - protein, 296 aa, synthetic construct
IQNPDPAVYQLRDSKSSDKSVCLFTDFDSQTNVSQSKDSDVYITDKTVLDMRSMDFKSNSAVAWSNKSDFACANAFNNSIQIVSAEAWGRADCGFTSESYQQGVLSATILYEILLGKATLYAVLVSALVLMAMVKRKDSRGKRGRKKLLYIFKQPFMRPVQTTQEEDGCSCRFPEEEEGGCELRVKFSRSADAPAYQQGQNQLYNELNLGRREEYDVLDKRRGRDPEMGGKPQRRKNPQEGLYNELQKDKMAEAYSEIGMKGERRRGKGHDGLYQGLSTATKDTYDALHMQALPPR

SEQ ID NO: 31527 - protein, 304 aa, synthetic construct
IQNPDPAVYQLRDSKSSDKSVCLFTDFDSQTNVSQSKDSDVYITDKTVLDMRSMDFKSNSAVAWSNKSDFACANAFNNSIFPPIKTDVITMDPKDNCSKDANDTLLLQLTNTSAYYMYLLLLLKSVVYFAIITCCLLRRTAFCCNGEKSKRGRKKLLYIFKQPFMRPVQTTQEEDGCSCRFPEEEEGGCELRVKFSRSADAPAYQQGQNQLYNELNLGRREEYDVLDKRRGRDPEMGGKPQRRKNPQEGLYNELQKDKMAEAYSEIGMKGERRRGKGHDGLYQGLSTATKDTYDALHMQALPPR

SEQ ID NO: 31528 - protein, 302 aa, synthetic construct
IQNPDPAVYQLRDSKSSDKSVCLFTDFDSQTNVSQSKDSDVYITDKTVLDMRSMDFKSNSAVAWSNKSDFACANAFNNSIPIKTDVITMDPKDNCSKDANDTLLLQLTNTSAYYMYLLLLLKSVVYFAIITCCLLRRTAFCCNGEKSKRGRKKLLYIFKQPFMRPVQTTQEEDGCSCRFPEEEEGGCELRVKFSRSADAPAYQQGQNQLYNELNLGRREEYDVLDKRRGRDPEMGGKPQRRKNPQEGLYNELQKDKMAEAYSEIGMKGERRRGKGHDGLYQGLSTATKDTYDALHMQALPPR

SEQ ID NO: 31529 - protein, 294 aa, synthetic construct
IQNPDPAVYQLRDSKSSDKSVCLFTDFDSQTNVSQSKDSDVYITDKTVLDMRSMDFKSNSAVAWSNKSDFACANAFNNSIMDPKDNCSKDANDTLLLQLTNTSAYYMYLLLLLKSVVYFAIITCCLLRRTAFCCNGEKSKRGRKKLLYIFKQPFMRPVQTTQEEDGCSCRFPEEEEGGCELRVKFSRSADAPAYQQGQNQLYNELNLGRREEYDVLDKRRGRDPEMGGKPQRRKNPQEGLYNELQKDKMAEAYSEIGMKGERRRGKGHDGLYQGLSTATKDTYDALHMQALPPR

SEQ ID NO: 31530 - protein, 302 aa, synthetic construct; identical to SEQ ID NO: 31528

SEQ ID NO: 31531 - protein, 288 aa, synthetic construct
IQNPDPAVYQLRDSKSSDKSVCLFTDFDSQTNVSQSKDSDVYITDKTVLDMRSMDFKSNSAVAWSNKSDFACANAFNNSICSKDANDTLLLQLTNTSAYYMYLLLLLKSVVYFAIITCCLLRRTAFCCNGEKSKRGRKKLLYIFKQPFMRPVQTTQEEDGCSCRFPEEEEGGCELRVKFSRSADAPAYQQGQNQLYNELNLGRREEYDVLDKRRGRDPEMGGKPQRRKNPQEGLYNELQKDKMAEAYSEIGMKGERRRGKGHDGLYQGLSTATKDTYDALHMQALPPR

SEQ ID NO: 31532 - protein, 303 aa, synthetic construct
IQNPDPAVYQLRDSKSSDKSVCLFTDFDSQTNVSQSKDSDVYITDKTVLDMRSMDFKSNSAVAWSNKSDFACANAFNNSIEVKTDSTDHVKPKETENTKQPSKSCHKPKAIVHTEKVNMMSLTVLGLRMLFAKTVAVNFLLTAKLFFLKRGRKKLLYIFKQPFMRPVQTTQEEDGCSCRFPEEEEGGCELRVKFSRSADAPAYQQGQNQLYNELNLGRREEYDVLDKRRGRDPEMGGKPQRRKNPQEGLYNELQKDKMAEAYSEIGMKGERRRGKGHDGLYQGLSTATKDTYDALHMQALPPR

SEQ ID NO: 31533 - protein, 296 aa, synthetic construct
IQNPDPAVYQLRDSKSSDKSVCLFTDFDSQTNVSQSKDSDVYITDKTVLDMRSMDFKSNSAVAWSNKSDFACANAFNNSIDHVKPKETENTKQPSKSCHKPKAIVHTEKVNMMSLTVLGLRMLFAKTVAVNFLLTAKLFFLKRGRKKLLYIFKQPFMRPVQTTQEEDGCSCRFPEEEEGGCELRVKFSRSADAPAYQQGQNQLYNELNLGRREEYDVLDKRRGRDPEMGGKPQRRKNPQEGLYNELQKDKMAEAYSEIGMKGERRRGKGHDGLYQGLSTATKDTYDALHMQALPPR

SEQ ID NO: 31534 - protein, 298 aa, synthetic construct
IQNPDPAVYQLRDSKSSDKSVCLFTDFDSQTNVSQSKDSDVYITDKTVLDMRSMDFKSNSAVAWSNKSDFACANAFNNSIIPEDTFFPSPGRADCGFTSESYQQGVLSATILYEILLGKATLYAVLVSALVLMAMVKRKDSRGKRGRKKLLYIFKQPFMRPVQTTQEEDGCSCRFPEEEEGGCELRVKFSRSADAPAYQQGQNQLYNELNLGRREEYDVLDKRRGRDPEMGGKPQRRKNPQEGLYNELQKDKMAEAYSEIGMKGERRRGKGHDGLYQGLSTATKDTYDALHMQALPPR

SEQ ID NO: 31535 - protein, 296 aa, synthetic construct
IQNPDPAVYQLRDSKSSDKSVCLFTDFDSQTNVSQSKDSDVYITDKTVLDMRSMDFKSNSAVAWSNKSDFACANAFNNSIIPEDTFFPSPADCGFTSESYQQGVLSATILYEILLGKATLYAVLVSALVLMAMVKRKDSRGKRGRKKLLYIFKQPFMRPVQTTQEEDGCSCRFPEEEEGGCELRVKFSRSADAPAYQQGQNQLYNELNLGRREEYDVLDKRRGRDPEMGGKPQRRKNPQEGLYNELQKDKMAEAYSEIGMKGERRRGKGHDGLYQGLSTATKDTYDALHMQALPPR

SEQ ID NO: 31536 - protein, 306 aa, synthetic construct
IQNPDPAVYQLRDSKSSDKSVCLFTDFDSQTNVSQSKDSDVYITDKTVLDMRSMDFKSNSAVAWSNKSDFACANAFNNSIIPEDTFFPSPQIVSAEAWGRADCGFTSESYQQGVLSATILYEILLGKATLYAVLVSALVLMAMVKRKDSRGKRGRKKLLYIFKQPFMRPVQTTQEEDGCSCRFPEEEEGGCELRVKFSRSADAPAYQQGQNQLYNELNLGRREEYDVLDKRRGRDPEMGGKPQRRKNPQEGLYNELQKDKMAEAYSEIGMKGERRRGKGHDGLYQGLSTATKDTYDALHMQALPPR

SEQ ID NO: 31537 - protein, 314 aa, synthetic construct
IQNPDPAVYQLRDSKSSDKSVCLFTDFDSQTNVSQSKDSDVYITDKTVLDMRSMDFKSNSAVAWSNKSDFACANAFNNSIIPEDTFFPSPFPPIKTDVITMDPKDNCSKDANDTLLLQLTNTSAYYMYLLLLLKSVVYFAIITCCLLRRTAFCCNGEKSKRGRKKLLYIFKQPFMRPVQTTQEEDGCSCRFPEEEEGGCELRVKFSRSADAPAYQQGQNQLYNELNLGRREEYDVLDKRRGRDPEMGGKPQRRKNPQEGLYNELQKDKMAEAYSEIGMKGERRRGKGHDGLYQGLSTATKDTYDALHMQALPPR

SEQ ID NO: 31538 - protein, 312 aa, synthetic construct
IQNPDPAVYQLRDSKSSDKSVCLFTDFDSQTNVSQSKDSDVYITDKTVLDMRSMDFKSNSAVAWSNKSDFACANAFNNSIIPEDTFFPSPPIKTDVITMDPKDNCSKDANDTLLLQLTNTSAYYMYLLLLLKSVVYFAIITCCLLRRTAFCCNGEKSKRGRKKLLYIFKQPFMRPVQTTQEEDGCSCRFPEEEEGGCELRVKFSRSADAPAYQQGQNQLYNELNLGRREEYDVLDKRRGRDPEMGGKPQRRKNPQEGLYNELQKDKMAEAYSEIGMKGERRRGKGHDGLYQGLSTATKDTYDALHMQALPPR

SEQ ID NO: 31539 - protein, 304 aa, synthetic construct
IQNPDPAVYQLRDSKSSDKSVCLFTDFDSQTNVSQSKDSDVYITDKTVLDMRSMDFKSNSAVAWSNKSDFACANAFNNSIIPEDTFFPSPMDPKDNCSKDANDTLLLQLTNTSAYYMYLLLLLKSVVYFAIITCCLLRRTAFCCNGEKSKRGRKKLLYIFKQPFMRPVQTTQEEDGCSCRFPEEEEGGCELRVKFSRSADAPAYQQGQNQLYNELNLGRREEYDVLDKRRGRDPEMGGKPQRRKNPQEGLYNELQKDKMAEAYSEIGMKGERRRGKGHDGLYQGLSTATKDTYDALHMQALPPR

SEQ ID NO: 31540 - protein, 312 aa, synthetic construct; identical to SEQ ID NO: 31538

SEQ ID NO: 31541 - protein, 298 aa, synthetic construct
IQNPDPAVYQLRDSKSSDKSVCLFTDFDSQTNVSQSKDSDVYITDKTVLDMRSMDFKSNSAVAWSNKSDFACANAFNNSIIPEDTFFPSPCSKDANDTLLLQLTNTSAYYMYLLLLLKSVVYFAIITCCLLRRTAFCCNGEKSKRGRKKLLYIFKQPFMRPVQTTQEEDGCSCRFPEEEEGGCELRVKFSRSADAPAYQQGQNQLYNELNLGRREEYDVLDKRRGRDPEMGGKPQRRKNPQEGLYNELQKDKMAEAYSEIGMKGERRRGKGHDGLYQGLSTATKDTYDALHMQALPPR

SEQ ID NO: 31542 - protein, 313 aa, synthetic construct
IQNPDPAVYQLRDSKSSDKSVCLFTDFDSQTNVSQSKDSDVYITDKTVLDMRSMDFKSNSAVAWSNKSDFACANAFNNSIIPEDTFFPSPEVKTDSTDHVKPKETENTKQPSKSCHKPKAIVHTEKVNMMSLTVLGLRMLFAKTVAVNFLLTAKLFFLKRGRKKLLYIFKQPFMRPVQTTQEEDGCSCRFPEEEEGGCELRVKFSRSADAPAYQQGQNQLYNELNLGRREEYDVLDKRRGRDPEMGGKPQRRKNPQEGLYNELQKDKMAEAYSEIGMKGERRRGKGHDGLYQGLSTATKDTYDALHMQALPPR

SEQ ID NO: 31543 - protein, 306 aa, synthetic construct
IQNPDPAVYQLRDSKSSDKSVCLFTDFDSQTNVSQSKDSDVYITDKTVLDMRSMDFKSNSAVAWSNKSDFACANAFNNSIIPEDTFFPSPDHVKPKETENTKQPSKSCHKPKAIVHTEKVNMMSLTVLGLRMLFAKTVAVNFLLTAKLFFLKRGRKKLLYIFKQPFMRPVQTTQEEDGCSCRFPEEEEGGCELRVKFSRSADAPAYQQGQNQLYNELNLGRREEYDVLDKRRGRDPEMGGKPQRRKNPQEGLYNELQKDKMAEAYSEIGMKGERRRGKGHDGLYQGLSTATKDTYDALHMQALPPR

SEQ ID NO: 31544 - protein, 302 aa, synthetic construct
IQNPDPAVYQLRDSKSSDKSVCLFTDFDSQTNVSQSKDSDVYITDKTVLDMRSMDFKSNSAVAWSNKSDFACANAFNNSIIPEDTFFPSPESSCGRADCGFTSESYQQGVLSATILYEILLGKATLYAVLVSALVLMAMVKRKDSRGKRGRKKLLYIFKQPFMRPVQTTQEEDGCSCRFPEEEEGGCELRVKFSRSADAPAYQQGQNQLYNELNLGRREEYDVLDKRRGRDPEMGGKPQRRKNPQEGLYNELQKDKMAEAYSEIGMKGERRRGKGHDGLYQGLSTATKDTYDALHMQALPPR

SEQ ID NO: 31545 - protein, 300 aa, synthetic construct
IQNPDPAVYQLRDSKSSDKSVCLFTDFDSQTNVSQSKDSDVYITDKTVLDMRSMDFKSNSAVAWSNKSDFACANAFNNSIIPEDTFFPSPESSCADCGFTSESYQQGVLSATILYEILLGKATLYAVLVSALVLMAMVKRKDSRGKRGRKKLLYIFKQPFMRPVQTTQEEDGCSCRFPEEEEGGCELRVKFSRSADAPAYQQGQNQLYNELNLGRREEYDVLDKRRGRDPEMGGKPQRRKNPQEGLYNELQKDKMAEAYSEIGMKGERRRGKGHDGLYQGLSTATKDTYDALHMQALPPR

SEQ ID NO: 31546 - protein, 310 aa, synthetic construct
IQNPDPAVYQLRDSKSSDKSVCLFTDFDSQTNVSQSKDSDVYITDKTVLDMRSMDFKSNSAVAWSNKSDFACANAFNNSIIPEDTFFPSPESSCQIVSAEAWGRADCGFTSESYQQGVLSATILYEILLGKATLYAVLVSALVLMAMVKRKDSRGKRGRKKLLYIFKQPFMRPVQTTQEEDGCSCRFPEEEEGGCELRVKFSRSADAPAYQQGQNQLYNELNLGRREEYDVLDKRRGRDPEMGGKPQRRKNPQEGLYNELQKDKMAEAYSEIGMKGERRRGKGHDGLYQGLSTATKDTYDALHMQALPPR

SEQ ID NO: 31547 - protein, 318 aa, synthetic construct
IQNPDPAVYQLRDSKSSDKSVCLFTDFDSQTNVSQSKDSDVYITDKTVLDMRSMDFKSNSAVAWSNKSDFACANAFNNSIIPEDTFFPSPESSCFPPIKTDVITMDPKDNCSKDANDTLLLQLTNTSAYYMYLLLLLKSVVYFAIITCCLLRRTAFCCNGEKSKRGRKKLLYIFKQPFMRPVQTTQEEDGCSCRFPEEEEGGCELRVKFSRSADAPAYQQGQNQLYNELNLGRREEYDVLDKRRGRDPEMGGKPQRRKNPQEGLYNELQKDKMAEAYSEIGMKGERRRGKGHDGLYQGLSTATKDTYDALHMQALPPR

SEQ ID NO: 31548 - protein, 316 aa, synthetic construct
IQNPDPAVYQLRDSKSSDKSVCLFTDFDSQTNVSQSKDSDVYITDKTVLDMRSMDFKSNSAVAWSNKSDFACANAFNNSIIPEDTFFPSPESSCPIKTDVITMDPKDNCSKDANDTLLLQLTNTSAYYMYLLLLLKSVVYFAIITCCLLRRTAFCCNGEKSKRGRKKLLYIFKQPFMRPVQTTQEEDGCSCRFPEEEEGGCELRVKFSRSADAPAYQQGQNQLYNELNLGRREEYDVLDKRRGRDPEMGGKPQRRKNPQEGLYNELQKDKMAEAYSEIGMKGERRRGKGHDGLYQGLSTATKDTYDALHMQALPPR

SEQ ID NO: 31549 - protein, 308 aa, synthetic construct
IQNPDPAVYQLRDSKSSDKSVCLFTDFDSQTNVSQSKDSDVYITDKTVLDMRSMDFKSNSAVAWSNKSDFACANAFNNSIIPEDTFFPSPESSCMDPKDNCSKDANDTLLLQLTNTSAYYMYLLLLLKSVVYFAIITCCLLRRTAFCCNGEKSKRGRKKLLYIFKQPFMRPVQTTQEEDGCSCRFPEEEEGGCELRVKFSRSADAPAYQQGQNQLYNELNLGRREEYDVLDKRRGRDPEMGGKPQRRKNPQEGLYNELQKDKMAEAYSEIGMKGERRRGKGHDGLYQGLSTATKDTYDALHMQALPPR

SEQ ID NO: 31550 - protein, 316 aa, synthetic construct; identical to SEQ ID NO: 31548

SEQ ID NO: 31551 - protein, 302 aa, synthetic construct
IQNPDPAVYQLRDSKSSDKSVCLFTDFDSQTNVSQSKDSDVYITDKTVLDMRSMDFKSNSAVAWSNKSDFACANAFNNSIIPEDTFFPSPESSCCSKDANDTLLLQLTNTSAYYMYLLLLLKSVVYFAIITCCLLRRTAFCCNGEKSKRGRKKLLYIFKQPFMRPVQTTQEEDGCSCRFPEEEEGGCELRVKFSRSADAPAYQQGQNQLYNELNLGRREEYDVLDKRRGRDPEMGGKPQRRKNPQEGLYNELQKDKMAEAYSEIGMKGERRRGKGHDGLYQGLSTATKDTYDALHMQALPPR

SEQ ID NO: 31552 - protein, 317 aa, synthetic construct
IQNPDPAVYQLRDSKSSDKSVCLFTDFDSQTNVSQSKDSDVYITDKTVLDMRSMDFKSNSAVAWSNKSDFACANAFNNSIIPEDTFFPSPESSCEVKTDSTDHVKPKETENTKQPSKSCHKPKAIVHTEKVNMMSLTVLGLRMLFAKTVAVNFLLTAKLFFLKRGRKKLLYIFKQPFMRPVQTTQEEDGCSCRFPEEEEGGCELRVKFSRSADAPAYQQGQNQLYNELNLGRREEYDVLDKRRGRDPEMGGKPQRRKNPQEGLYNELQKDKMAEAYSEIGMKGERRRGKGHDGLYQGLSTATKDTYDALHMQALPPR

SEQ ID NO: 31553 - protein, 310 aa, synthetic construct
IQNPDPAVYQLRDSKSSDKSVCLFTDFDSQTNVSQSKDSDVYITDKTVLDMRSMDFKSNSAVAWSNKSDFACANAFNNSIIPEDTFFPSPESSCDHVKPKETENTKQPSKSCHKPKAIVHTEKVNMMSLTVLGLRMLFAKTVAVNFLLTAKLFFLKRGRKKLLYIFKQPFMRPVQTTQEEDGCSCRFPEEEEGGCELRVKFSRSADAPAYQQGQNQLYNELNLGRREEYDVLDKRRGRDPEMGGKPQRRKNPQEGLYNELQKDKMAEAYSEIGMKGERRRGKGHDGLYQGLSTATKDTYDALHMQALPPR

SEQ ID NO: 31554 - protein, 289 aa, synthetic construct
IQNPDPAVYQLRDSKSSDKSVCLFTDFDSQTNVSQSKDSDVYITDKTVLDMRSMDFKSNSAVAWSNKSDFACANAFNNSIIGRADCGFTSESYQQGVLSATILYEILLGKATLYAVLVSALVLMAMVKRKDSRGKRGRKKLLYIFKQPFMRPVQTTQEEDGCSCRFPEEEEGGCELRVKFSRSADAPAYQQGQNQLYNELNLGRREEYDVLDKRRGRDPEMGGKPQRRKNPQEGLYNELQKDKMAEAYSEIGMKGERRRGKGHDGLYQGLSTATKDTYDALHMQALPPR

SEQ ID NO: 31555 - protein, 287 aa, synthetic construct
IQNPDPAVYQLRDSKSSDKSVCLFTDFDSQTNVSQSKDSDVYITDKTVLDMRSMDFKSNSAVAWSNKSDFACANAFNNSIIADCGFTSESYQQGVLSATILYEILLGKATLYAVLVSALVLMAMVKRKDSRGKRGRKKLLYIFKQPFMRPVQTTQEEDGCSCRFPEEEEGGCELRVKFSRSADAPAYQQGQNQLYNELNLGRREEYDVLDKRRGRDPEMGGKPQRRKNPQEGLYNELQKDKMAEAYSEIGMKGERRRGKGHDGLYQGLSTATKDTYDALHMQALPPR

SEQ ID NO: 31556 - protein, 297 aa, synthetic construct
IQNPDPAVYQLRDSKSSDKSVCLFTDFDSQTNVSQSKDSDVYITDKTVLDMRSMDFKSNSAVAWSNKSDFACANAFNNSIIQIVSAEAWGRADCGFTSESYQQGVLSATILYEILLGKATLYAVLVSALVLMAMVKRKDSRGKRGRKKLLYIFKQPFMRPVQTTQEEDGCSCRFPEEEEGGCELRVKFSRSADAPAYQQGQNQLYNELNLGRREEYDVLDKRRGRDPEMGGKPQRRKNPQEGLYNELQKDKMAEAYSEIGMKGERRRGKGHDGLYQGLSTATKDTYDALHMQALPPR

SEQ ID NO: 31557 - protein, 305 aa, synthetic construct
IQNPDPAVYQLRDSKSSDKSVCLFTDFDSQTNVSQSKDSDVYITDKTVLDMRSMDFKSNSAVAWSNKSDFACANAFNNSIIFPPIKTDVITMDPKDNCSKDANDTLLLQLTNTSAYYMYLLLLLKSVVYFAIITCCLLRRTAFCCNGEKSKRGRKKLLYIFKQPFMRPVQTTQEEDGCSCRFPEEEEGGCELRVKFSRSADAPAYQQGQNQLYNELNLGRREEYDVLDKRRGRDPEMGGKPQRRKNPQEGLYNELQKDKMAEAYSEIGMKGERRRGKGHDGLYQGLSTATKDTYDALHMQALPPR

SEQ ID NO: 31558 - protein, 303 aa, synthetic construct
IQNPDPAVYQLRDSKSSDKSVCLFTDFDSQTNVSQSKDSDVYITDKTVLDMRSMDFKSNSAVAWSNKSDFACANAFNNSIIPIKTDVITMDPKDNCSKDANDTLLLQLTNTSAYYMYLLLLLKSVVYFAIITCCLLRRTAFCCNGEKSKRGRKKLLYIFKQPFMRPVQTTQEEDGCSCRFPEEEEGGCELRVKFSRSADAPAYQQGQNQLYNELNLGRREEYDVLDKRRGRDPEMGGKPQRRKNPQEGLYNELQKDKMAEAYSEIGMKGERRRGKGHDGLYQGLSTATKDTYDALHMQALPPR

SEQ ID NO: 31559 - protein, 295 aa, synthetic construct
IQNPDPAVYQLRDSKSSDKSVCLFTDFDSQTNVSQSKDSDVYITDKTVLDMRSMDFKSNSAVAWSNKSDFACANAFNNSIIMDPKDNCSKDANDTLLLQLTNTSAYYMYLLLLLKSVVYFAIITCCLLRRTAFCCNGEKSKRGRKKLLYIFKQPFMRPVQTTQEEDGCSCRFPEEEEGGCELRVKFSRSADAPAYQQGQNQLYNELNLGRREEYDVLDKRRGRDPEMGGKPQRRKNPQEGLYNELQKDKMAEAYSEIGMKGERRRGKGHDGLYQGLSTATKDTYDALHMQALPPR

SEQ ID NO: 31560 - protein, 303 aa, synthetic construct; identical to SEQ ID NO: 31558

SEQ ID NO: 31561 - protein, 289 aa, synthetic construct
IQNPDPAVYQLRDSKSSDKSVCLFTDFDSQTNVSQSKDSDVYITDKTVLDMRSMDFKSNSAVAWSNKSDFACANAFNNSIICSKDANDTLLLQLTNTSAYYMYLLLLLKSVVYFAIITCCLLRRTAFCCNGEKSKRGRKKLLYIFKQPFMRPVQTTQEEDGCSCRFPEEEEGGCELRVKFSRSADAPAYQQGQNQLYNELNLGRREEYDVLDKRRGRDPEMGGKPQRRKNPQEGLYNELQKDKMAEAYSEIGMKGERRRGKGHDGLYQGLSTATKDTYDALHMQALPPR

SEQ ID NO: 31562 - protein, 304 aa, synthetic construct
IQNPDPAVYQLRDSKSSDKSVCLFTDFDSQTNVSQSKDSDVYITDKTVLDMRSMDFKSNSAVAWSNKSDFACANAFNNSIIEVKTDSTDHVKPKETENTKQPSKSCHKPKAIVHTEKVNMMSLTVLGLRMLFAKTVAVNFLLTAKLFFLKRGRKKLLYIFKQPFMRPVQTTQEEDGCSCRFPEEEEGGCELRVKFSRSADAPAYQQGQNQLYNELNLGRREEYDVLDKRRGRDPEMGGKPQRRKNPQEGLYNELQKDKMAEAYSEIGMKGERRRGKGHDGLYQGLSTATKDTYDALHMQALPPR

SEQ ID NO: 31563 - protein, 297 aa, synthetic construct
IQNPDPAVYQLRDSKSSDKSVCLFTDFDSQTNVSQSKDSDVYITDKTVLDMRSMDFKSNSAVAWSNKSDFACANAFNNSIIDHVKPKETENTKQPSKSCHKPKAIVHTEKVNMMSLTVLGLRMLFAKTVAVNFLLTAKLFFLKRGRKKLLYIFKQPFMRPVQTTQEEDGCSCRFPEEEEGGCELRVKFSRSADAPAYQQGQNQLYNELNLGRREEYDVLDKRRGRDPEMGGKPQRRKNPQEGLYNELQKDKMAEAYSEIGMKGERRRGKGHDGLYQGLSTATKDTYDALHMQALPPR

SEQ ID NO: 31564 - protein, 302 aa, synthetic construct; identical to SEQ ID NO: 31544

SEQ ID NO: 31565 - protein, 300 aa, synthetic construct; identical to SEQ ID NO: 31545

SEQ ID NO: 31566 - protein, 310 aa, synthetic construct; identical to SEQ ID NO: 31546

SEQ ID NO: 31567 - protein, 318 aa, synthetic construct; identical to SEQ ID NO: 31547

SEQ ID NO: 31568 - protein, 316 aa, synthetic construct; identical to SEQ ID NO: 31548

SEQ ID NO: 31569 - protein, 308 aa, synthetic construct; identical to SEQ ID NO: 31549

SEQ ID NO: 31570 - protein, 316 aa, synthetic construct; identical to SEQ ID NO: 31548

SEQ ID NO: 31571 - protein, 302 aa, synthetic construct; identical to SEQ ID NO: 31551

SEQ ID NO: 31572 - protein, 317 aa, synthetic construct; identical to SEQ ID NO: 31552

SEQ ID NO: 31573 - protein, 310 aa, synthetic construct; identical to SEQ ID NO: 31553

SEQ ID NO: 31574 - protein, 287 aa, synthetic construct
KSSDKSVCLFTDFDSQTNVSQSKDSDVYITDKTVLDMRSMDFKSNSAVAWSNKSDFACANAFNNSIIPEDTFFPSPESSGRADCGFTSESYQQGVLSATILYEILLGKATLYAVLVSALVLMAMVKRKDSRGKRGRKKLLYIFKQPFMRPVQTTQEEDGCSCRFPEEEEGGCELRVKFSRSADAPAYQQGQNQLYNELNLGRREEYDVLDKRRGRDPEMGGKPQRRKNPQEGLYNELQKDKMAEAYSEIGMKGERRRGKGHDGLYQGLSTATKDTYDALHMQALPPR

SEQ ID NO: 31575 - protein, 285 aa, synthetic construct
KSSDKSVCLFTDFDSQTNVSQSKDSDVYITDKTVLDMRSMDFKSNSAVAWSNKSDFACANAFNNSIIPEDTFFPSPESSADCGFTSESYQQGVLSATILYEILLGKATLYAVLVSALVLMAMVKRKDSRGKRGRKKLLYIFKQPFMRPVQTTQEEDGCSCRFPEEEEGGCELRVKFSRSADAPAYQQGQNQLYNELNLGRREEYDVLDKRRGRDPEMGGKPQRRKNPQEGLYNELQKDKMAEAYSEIGMKGERRRGKGHDGLYQGLSTATKDTYDALHMQALPPR

SEQ ID NO: 31576 - protein, 295 aa, synthetic construct
KSSDKSVCLFTDFDSQTNVSQSKDSDVYITDKTVLDMRSMDFKSNSAVAWSNKSDFACANAFNNSIIPEDTFFPSPESSQIVSAEAWGRADCGFTSESYQQGVLSATILYEILLGKATLYAVLVSALVLMAMVKRKDSRGKRGRKKLLYIFKQPFMRPVQTTQEEDGCSCRFPEEEEGGCELRVKFSRSADAPAYQQGQNQLYNELNLGRREEYDVLDKRRGRDPEMGGKPQRRKNPQEGLYNELQKDKMAEAYSEIGMKGERRRGKGHDGLYQGLSTATKDTYDALHMQALPPR

SEQ ID NO: 31577 - protein, 303 aa, synthetic construct
KSSDKSVCLFTDFDSQTNVSQSKDSDVYITDKTVLDMRSMDFKSNSAVAWSNKSDFACANAFNNSIIPEDTFFPSPESSFPPIKTDVITMDPKDNCSKDANDTLLLQLTNTSAYYMYLLLLLKSVVYFAIITCCLLRRTAFCCNGEKSKRGRKKLLYIFKQPFMRPVQTTQEEDGCSCRFPEEEEGGCELRVKFSRSADAPAYQQGQNQLYNELNLGRREEYDVLDKRRGRDPEMGGKPQRRKNPQEGLYNELQKDKMAEAYSEIGMKGERRRGKGHDGLYQGLSTATKDTYDALHMQALPPR

SEQ ID NO: 31578 - protein, 301 aa, synthetic construct
KSSDKSVCLFTDFDSQTNVSQSKDSDVYITDKTVLDMRSMDFKSNSAVAWSNKSDFACANAFNNSIIPEDTFFPSPESSPIKTDVITMDPKDNCSKDANDTLLLQLTNTSAYYMYLLLLLKSVVYFAIITCCLLRRTAFCCNGEKSKRGRKKLLYIFKQPFMRPVQTTQEEDGCSCRFPEEEEGGCELRVKFSRSADAPAYQQGQNQLYNELNLGRREEYDVLDKRRGRDPEMGGKPQRRKNPQEGLYNELQKDKMAEAYSEIGMKGERRRGKGHDGLYQGLSTATKDTYDALHMQALPPR

SEQ ID NO: 31579 - protein, 293 aa, synthetic construct
KSSDKSVCLFTDFDSQTNVSQSKDSDVYITDKTVLDMRSMDFKSNSAVAWSNKSDFACANAFNNSIIPEDTFFPSPESSMDPKDNCSKDANDTLLLQLTNTSAYYMYLLLLLKSVVYFAIITCCLLRRTAFCCNGEKSKRGRKKLLYIFKQPFMRPVQTTQEEDGCSCRFPEEEEGGCELRVKFSRSADAPAYQQGQNQLYNELNLGRREEYDVLDKRRGRDPEMGGKPQRRKNPQEGLYNELQKDKMAEAYSEIGMKGERRRGKGHDGLYQGLSTATKDTYDALHMQALPPR

SEQ ID NO: 31580 - protein, 301 aa, synthetic construct; identical to SEQ ID NO: 31578

SEQ ID NO: 31581 - protein, 287 aa, synthetic construct
KSSDKSVCLFTDFDSQTNVSQSKDSDVYITDKTVLDMRSMDFKSNSAVAWSNKSDFACANAFNNSIIPEDTFFPSPESSCSKDANDTLLLQLTNTSAYYMYLLLLLKSVVYFAIITCCLLRRTAFCCNGEKSKRGRKKLLYIFKQPFMRPVQTTQEEDGCSCRFPEEEEGGCELRVKFSRSADAPAYQQGQNQLYNELNLGRREEYDVLDKRRGRDPEMGGKPQRRKNPQEGLYNELQKDKMAEAYSEIGMKGERRRGKGHDGLYQGLSTATKDTYDALHMQALPPR

SEQ ID NO: 31582 - protein, 302 aa, synthetic construct
KSSDKSVCLFTDFDSQTNVSQSKDSDVYITDKTVLDMRSMDFKSNSAVAWSNKSDFACANAFNNSIIPEDTFFPSPESSEVKTDSTDHVKPKETENTKQPSKSCHKPKAIVHTEKVNMMSLTVLGLRMLFAKTVAVNFLLTAKLFFLKRGRKKLLYIFKQPFMRPVQTTQEEDGCSCRFPEEEEGGCELRVKFSRSADAPAYQQGQNQLYNELNLGRREEYDVLDKRRGRDPEMGGKPQRRKNPQEGLYNELQKDKMAEAYSEIGMKGERRRGKGHDGLYQGLSTATKDTYDALHMQALPPR

SEQ ID NO: 31583 - protein, 295 aa, synthetic construct
KSSDKSVCLFTDFDSQTNVSQSKDSDVYITDKTVLDMRSMDFKSNSAVAWSNKSDFACANAFNNSIIPEDTFFPSPESSDHVKPKETENTKQPSKSCHKPKAIVHTEKVNMMSLTVLGLRMLFAKTVAVNFLLTAKLFFLKRGRKKLLYIFKQPFMRPVQTTQEEDGCSCRFPEEEEGGCELRVKFSRSADAPAYQQGQNQLYNELNLGRREEYDVLDKRRGRDPEMGGKPQRRKNPQEGLYNELQKDKMAEAYSEIGMKGERRRGKGHDGLYQGLSTATKDTYDALHMQALPPR

SEQ ID NO: 31584 - protein, 341 aa, synthetic construct
EDLKNVFPPEVAVFEPSEAEISHTQKATLVCLATGFYPDHVELSWWVNGKEVHSGVSTDPQPLKEQPALNDSRYCLSSRLRVSATFWQNPRNHFRCQVQFYGLSENDEWTQDRAKPVTQIVSAEAWIPEDTFFPSPESSCDVKLVEKSFETDTNLNFQNLSVIGFRILLLKVAGFNLLMTLRLWSSKRGRKKLLYIFKQPFMRPVQTTQEEDGCSCRFPEEEEGGCELRVKFSRSADAPAYQQGQNQLYNELNLGRREEYDVLDKRRGRDPEMGGKPQRRKNPQEGLYNELQKDKMAEAYSEIGMKGERRRGKGHDGLYQGLSTATKDTYDALHMQALPPR

SEQ ID NO: 31585 - protein, 331 aa, synthetic construct
EDLKNVFPPEVAVFEPSEAEISHTQKATLVCLATGFYPDHVELSWWVNGKEVHSGVSTDPQPLKEQPALNDSRYCLSSRLRVSATFWQNPRNHFRCQVQFYGLSENDEWTQDRAKPVTQIVSAEAWESSCDVKLVEKSFETDTNLNFQNLSVIGFRILLLKVAGFNLLMTLRLWSSKRGRKKLLYIFKQPFMRPVQTTQEEDGCSCRFPEEEEGGCELRVKFSRSADAPAYQQGQNQLYNELNLGRREEYDVLDKRRGRDPEMGGKPQRRKNPQEGLYNELQKDKMAEAYSEIGMKGERRRGKGHDGLYQGLSTATKDTYDALHMQALPPR

SEQ ID NO: 31586 - protein, 340 aa, synthetic construct
EDLKNVFPPEVAVFEPSEAEISHTQKATLVCLATGFYPDHVELSWWVNGKEVHSGVSTDPQPLKEQPALNDSRYCLSSRLRVSATFWQNPRNHFRCQVQFYGLSENDEWTQDRAKPVTQIVSAEAWPEDTFFPSPESSCDVKLVEKSFETDTNLNFQNLSVIGFRILLLKVAGFNLLMTLRLWSSKRGRKKLLYIFKQPFMRPVQTTQEEDGCSCRFPEEEEGGCELRVKFSRSADAPAYQQGQNQLYNELNLGRREEYDVLDKRRGRDPEMGGKPQRRKNPQEGLYNELQKDKMAEAYSEIGMKGERRRGKGHDGLYQGLSTATKDTYDALHMQALPPR

SEQ ID NO: 31587 - protein, 350 aa, synthetic construct
EDLKNVFPPEVAVFEPSEAEISHTQKATLVCLATGFYPDHVELSWWVNGKEVHSGVSTDPQPLKEQPALNDSRYCLSSRLRVSATFWQNPRNHFRCQVQFYGLSENDEWTQDRAKPVTQIVSAEAWFPPIKTDVITMDPKDNCSKDANDTLLLQLTNTSAYYMYLLLLLKSVVYFAIITCCLLRRTAFCCNGEKSKRGRKKLLYIFKQPFMRPVQTTQEEDGCSCRFPEEEEGGCELRVKFSRSADAPAYQQGQNQLYNELNLGRREEYDVLDKRRGRDPEMGGKPQRRKNPQEGLYNELQKDKMAEAYSEIGMKGERRRGKGHDGLYQGLSTATKDTYDALHMQALPPR

SEQ ID NO: 31588 - protein, 348 aa, synthetic construct
EDLKNVFPPEVAVFEPSEAEISHTQKATLVCLATGFYPDHVELSWWVNGKEVHSGVSTDPQPLKEQPALNDSRYCLSSRLRVSATFWQNPRNHFRCQVQFYGLSENDEWTQDRAKPVTQIVSAEAWPIKTDVITMDPKDNCSKDANDTLLLQLTNTSAYYMYLLLLLKSVVYFAIITCCLLRRTAFCCNGEKSKRGRKKLLYIFKQPFMRPVQTTQEEDGCSCRFPEEEEGGCELRVKFSRSADAPAYQQGQNQLYNELNLGRREEYDVLDKRRGRDPEMGGKPQRRKNPQEGLYNELQKDKMAEAYSEIGMKGERRRGKGHDGLYQGLSTATKDTYDALHMQALPPR

SEQ ID NO: 31589 - protein, 340 aa, synthetic construct
EDLKNVFPPEVAVFEPSEAEISHTQKATLVCLATGFYPDHVELSWWVNGKEVHSGVSTDPQPLKEQPALNDSRYCLSSRLRVSATFWQNPRNHFRCQVQFYGLSENDEWTQDRAKPVTQIVSAEAWMDPKDNCSKDANDTLLLQLTNTSAYYMYLLLLLKSVVYFAIITCCLLRRTAFCCNGEKSKRGRKKLLYIFKQPFMRPVQTTQEEDGCSCRFPEEEEGGCELRVKFSRSADAPAYQQGQNQLYNELNLGRREEYDVLDKRRGRDPEMGGKPQRRKNPQEGLYNELQKDKMAEAYSEIGMKGERRRGKGHDGLYQGLSTATKDTYDALHMQALPPR

SEQ ID NO: 31590 - protein, 348 aa, synthetic construct; identical to SEQ ID NO: 31588

SEQ ID NO: 31591 - protein, 334 aa, synthetic construct
EDLKNVFPPEVAVFEPSEAEISHTQKATLVCLATGFYPDHVELSWWVNGKEVHSGVSTDPQPLKEQPALNDSRYCLSSRLRVSATFWQNPRNHFRCQVQFYGLSENDEWTQDRAKPVTQIVSAEAWCSKDANDTLLLQLTNTSAYYMYLLLLLKSVVYFAIITCCLLRRTAFCCNGEKSKRGRKKLLYIFKQPFMRPVQTTQEEDGCSCRFPEEEEGGCELRVKFSRSADAPAYQQGQNQLYNELNLGRREEYDVLDKRRGRDPEMGGKPQRRKNPQEGLYNELQKDKMAEAYSEIGMKGERRRGKGHDGLYQGLSTATKDTYDALHMQALPPR

SEQ ID NO: 31592 - protein, 349 aa, synthetic construct
EDLKNVFPPEVAVFEPSEAEISHTQKATLVCLATGFYPDHVELSWWVNGKEVHSGVSTDPQPLKEQPALNDSRYCLSSRLRVSATFWQNPRNHFRCQVQFYGLSENDEWTQDRAKPVTQIVSAEAWEVKTDSTDHVKPKETENTKQPSKSCHKPKAIVHTEKVNMMSLTVLGLRMLFAKTVAVNFLLTAKLFFLKRGRKKLLYIFKQPFMRPVQTTQEEDGCSCRFPEEEEGGCELRVKFSRSADAPAYQQGQNQLYNELNLGRREEYDVLDKRRGRDPEMGGKPQRRKNPQEGLYNELQKDKMAEAYSEIGMKGERRRGKGHDGLYQGLSTATKDTYDALHMQALPPR

SEQ ID NO: 31593 - protein, 342 aa, synthetic construct
EDLKNVFPPEVAVFEPSEAEISHTQKATLVCLATGFYPDHVELSWWVNGKEVHSGVSTDPQPLKEQPALNDSRYCLSSRLRVSATFWQNPRNHFRCQVQFYGLSENDEWTQDRAKPVTQIVSAEAWDHVKPKETENTKQPSKSCHKPKAIVHTEKVNMMSLTVLGLRMLFAKTVAVNFLLTAKLFFLKRGRKKLLYIFKQPFMRPVQTTQEEDGCSCRFPEEEEGGCELRVKFSRSADAPAYQQGQNQLYNELNLGRREEYDVLDKRRGRDPEMGGKPQRRKNPQEGLYNELQKDKMAEAYSEIGMKGERRRGKGHDGLYQGLSTATKDTYDALHMQALPPR

SEQ ID NO: 31594 - protein, 343 aa, synthetic construct
EDLKNVFPPEVAVFEPSEAEISHTQKATLVCLATGFYPDHVELSWWVNGKEVHSGVSTDPQPLKEQPALNDSRYCLSSRLRVSATFWQNPRNHFRCQVQFYGLSENDEWTQDRAKPVTQIVSAEAWGRIPEDTFFPSPESSCDVKLVEKSFETDTNLNFQNLSVIGFRILLLKVAGFNLLMTLRLWSSKRGRKKLLYIFKQPFMRPVQTTQEEDGCSCRFPEEEEGGCELRVKFSRSADAPAYQQGQNQLYNELNLGRREEYDVLDKRRGRDPEMGGKPQRRKNPQEGLYNELQKDKMAEAYSEIGMKGERRRGKGHDGLYQGLSTATKDTYDALHMQALPPR

SEQ ID NO: 31595 - protein, 333 aa, synthetic construct
EDLKNVFPPEVAVFEPSEAEISHTQKATLVCLATGFYPDHVELSWWVNGKEVHSGVSTDPQPLKEQPALNDSRYCLSSRLRVSATFWQNPRNHFRCQVQFYGLSENDEWTQDRAKPVTQIVSAEAWGRESSCDVKLVEKSFETDTNLNFQNLSVIGFRILLLKVAGFNLLMTLRLWSSKRGRKKLLYIFKQPFMRPVQTTQEEDGCSCRFPEEEEGGCELRVKFSRSADAPAYQQGQNQLYNELNLGRREEYDVLDKRRGRDPEMGGKPQRRKNPQEGLYNELQKDKMAEAYSEIGMKGERRRGKGHDGLYQGLSTATKDTYDALHMQALPPR

SEQ ID NO: 31596 - protein, 342 aa, synthetic construct
EDLKNVFPPEVAVFEPSEAEISHTQKATLVCLATGFYPDHVELSWWVNGKEVHSGVSTDPQPLKEQPALNDSRYCLSSRLRVSATFWQNPRNHFRCQVQFYGLSENDEWTQDRAKPVTQIVSAEAWGRPEDTFFPSPESSCDVKLVEKSFETDTNLNFQNLSVIGFRILLLKVAGFNLLMTLRLWSSKRGRKKLLYIFKQPFMRPVQTTQEEDGCSCRFPEEEEGGCELRVKFSRSADAPAYQQGQNQLYNELNLGRREEYDVLDKRRGRDPEMGGKPQRRKNPQEGLYNELQKDKMAEAYSEIGMKGERRRGKGHDGLYQGLSTATKDTYDALHMQALPPR

SEQ ID NO: 31597 - protein, 352 aa, synthetic construct
EDLKNVFPPEVAVFEPSEAEISHTQKATLVCLATGFYPDHVELSWWVNGKEVHSGVSTDPQPLKEQPALNDSRYCLSSRLRVSATFWQNPRNHFRCQVQFYGLSENDEWTQDRAKPVTQIVSAEAWGRFPPIKTDVITMDPKDNCSKDANDTLLLQLTNTSAYYMYLLLLLKSVVYFAIITCCLLRRTAFCCNGEKSKRGRKKLLYIFKQPFMRPVQTTQEEDGCSCRFPEEEEGGCELRVKFSRSADAPAYQQGQNQLYNELNLGRREEYDVLDKRRGRDPEMGGKPQRRKNPQEGLYNELQKDKMAEAYSEIGMKGERRRGKGHDGLYQGLSTATKDTYDALHMQALPPR

SEQ ID NO: 31598 - protein, 350 aa, synthetic construct
EDLKNVFPPEVAVFEPSEAEISHTQKATLVCLATGFYPDHVELSWWVNGKEVHSGVSTDPQPLKEQPALNDSRYCLSSRLRVSATFWQNPRNHFRCQVQFYGLSENDEWTQDRAKPVTQIVSAEAWGRPIKTDVITMDPKDNCSKDANDTLLLQLTNTSAYYMYLLLLLKSVVYFAIITCCLLRRTAFCCNGEKSKRGRKKLLYIFKQPFMRPVQTTQEEDGCSCRFPEEEEGGCELRVKFSRSADAPAYQQGQNQLYNELNLGRREEYDVLDKRRGRDPEMGGKPQRRKNPQEGLYNELQKDKMAEAYSEIGMKGERRRGKGHDGLYQGLSTATKDTYDALHMQALPPR

SEQ ID NO: 31599 - protein, 342 aa, synthetic construct
EDLKNVFPPEVAVFEPSEAEISHTQKATLVCLATGFYPDHVELSWWVNGKEVHSGVSTDPQPLKEQPALNDSRYCLSSRLRVSATFWQNPRNHFRCQVQFYGLSENDEWTQDRAKPVTQIVSAEAWGRMDPKDNCSKDANDTLLLQLTNTSAYYMYLLLLLKSVVYFAIITCCLLRRTAFCCNGEKSKRGRKKLLYIFKQPFMRPVQTTQEEDGCSCRFPEEEEGGCELRVKFSRSADAPAYQQGQNQLYNELNLGRREEYDVLDKRRGRDPEMGGKPQRRKNPQEGLYNELQKDKMAEAYSEIGMKGERRRGKGHDGLYQGLSTATKDTYDALHMQALPPR

SEQ ID NO: 31600 - protein, 350 aa, synthetic construct; identical to SEQ ID NO: 31598

SEQ ID NO: 31601 - protein, 336 aa, synthetic construct
EDLKNVFPPEVAVFEPSEAEISHTQKATLVCLATGFYPDHVELSWWVNGKEVHSGVSTDPQPLKEQPALNDSRYCLSSRLRVSATFWQNPRNHFRCQVQFYGLSENDEWTQDRAKPVTQIVSAEAWGRCSKDANDTLLLQLTNTSAYYMYLLLLLKSVVYFAIITCCLLRRTAFCCNGEKSKRGRKKLLYIFKQPFMRPVQTTQEEDGCSCRFPEEEEGGCELRVKFSRSADAPAYQQGQNQLYNELNLGRREEYDVLDKRRGRDPEMGGKPQRRKNPQEGLYNELQKDKMAEAYSEIGMKGERRRGKGHDGLYQGLSTATKDTYDALHMQALPPR

SEQ ID NO: 31602 - protein, 351 aa, synthetic construct
EDLKNVFPPEVAVFEPSEAEISHTQKATLVCLATGFYPDHVELSWWVNGKEVHSGVSTDPQPLKEQPALNDSRYCLSSRLRVSATFWQNPRNHFRCQVQFYGLSENDEWTQDRAKPVTQIVSAEAWGREVKTDSTDHVKPKETENTKQPSKSCHKPKAIVHTEKVNMMSLTVLGLRMLFAKTVAVNFLLTAKLFFLKRGRKKLLYIFKQPFMRPVQTTQEEDGCSCRFPEEEEGGCELRVKFSRSADAPAYQQGQNQLYNELNLGRREEYDVLDKRRGRDPEMGGKPQRRKNPQEGLYNELQKDKMAEAYSEIGMKGERRRGKGHDGLYQGLSTATKDTYDALHMQALPPR

SEQ ID NO: 31603 - protein, 344 aa, synthetic construct
EDLKNVFPPEVAVFEPSEAEISHTQKATLVCLATGFYPDHVELSWWVNGKEVHSGVSTDPQPLKEQPALNDSRYCLSSRLRVSATFWQNPRNHFRCQVQFYGLSENDEWTQDRAKPVTQIVSAEAWGRDHVKPKETENTKQPSKSCHKPKAIVHTEKVNMMSLTVLGLRMLFAKTVAVNFLLTAKLFFLKRGRKKLLYIFKQPFMRPVQTTQEEDGCSCRFPEEEEGGCELRVKFSRSADAPAYQQGQNQLYNELNLGRREEYDVLDKRRGRDPEMGGKPQRRKNPQEGLYNELQKDKMAEAYSEIGMKGERRRGKGHDGLYQGLSTATKDTYDALHMQALPPR

SEQ ID NO: 31604 - protein, 346 aa, synthetic construct
EDLKNVFPPEVAVFEPSEAEISHTQKATLVCLATGFYPDHVELSWWVNGKEVHSGVSTDPQPLKEQPALNDSRYCLSSRLRVSATFWQNPRNHFRCQVQFYGLSENDEWTQDRAKPVTQIVSAEAWGRADCIPEDTFFPSPESSCDVKLVEKSFETDTNLNFQNLSVIGFRILLLKVAGFNLLMTLRLWSSKRGRKKLLYIFKQPFMRPVQTTQEEDGCSCRFPEEEEGGCELRVKFSRSADAPAYQQGQNQLYNELNLGRREEYDVLDKRRGRDPEMGGKPQRRKNPQEGLYNELQKDKMAEAYSEIGMKGERRRGKGHDGLYQGLSTATKDTYDALHMQALPPR

SEQ ID NO: 31605 - protein, 336 aa, synthetic construct
EDLKNVFPPEVAVFEPSEAEISHTQKATLVCLATGFYPDHVELSWWVNGKEVHSGVSTDPQPLKEQPALNDSRYCLSSRLRVSATFWQNPRNHFRCQVQFYGLSENDEWTQDRAKPVTQIVSAEAWGRADCESSCDVKLVEKSFETDTNLNFQNLSVIGFRILLLKVAGFNLLMTLRLWSSKRGRKKLLYIFKQPFMRPVQTTQEEDGCSCRFPEEEEGGCELRVKFSRSADAPAYQQGQNQLYNELNLGRREEYDVLDKRRGRDPEMGGKPQRRKNPQEGLYNELQKDKMAEAYSEIGMKGERRRGKGHDGLYQGLSTATKDTYDALHMQALPPR

SEQ ID NO: 31606 - protein, 345 aa, synthetic construct
EDLKNVFPPEVAVFEPSEAEISHTQKATLVCLATGFYPDHVELSWWVNGKEVHSGVSTDPQPLKEQPALNDSRYCLSSRLRVSATFWQNPRNHFRCQVQFYGLSENDEWTQDRAKPVTQIVSAEAWGRADCPEDTFFPSPESSCDVKLVEKSFETDTNLNFQNLSVIGFRILLLKVAGFNLLMTLRLWSSKRGRKKLLYIFKQPFMRPVQTTQEEDGCSCRFPEEEEGGCELRVKFSRSADAPAYQQGQNQLYNELNLGRREEYDVLDKRRGRDPEMGGKPQRRKNPQEGLYNELQKDKMAEAYSEIGMKGERRRGKGHDGLYQGLSTATKDTYDALHMQALPPR

SEQ ID NO: 31607 - protein, 355 aa, synthetic construct
EDLKNVFPPEVAVFEPSEAEISHTQKATLVCLATGFYPDHVELSWWVNGKEVHSGVSTDPQPLKEQPALNDSRYCLSSRLRVSATFWQNPRNHFRCQVQFYGLSENDEWTQDRAKPVTQIVSAEAWGRADCFPPIKTDVITMDPKDNCSKDANDTLLLQLTNTSAYYMYLLLLLKSVVYFAIITCCLLRRTAFCCNGEKSKRGRKKLLYIFKQPFMRPVQTTQEEDGCSCRFPEEEEGGCELRVKFSRSADAPAYQQGQNQLYNELNLGRREEYDVLDKRRGRDPEMGGKPQRRKNPQEGLYNELQKDKMAEAYSEIGMKGERRRGKGHDGLYQGLSTATKDTYDALHMQALPPR

SEQ ID NO: 31608 - protein, 353 aa, synthetic construct
EDLKNVFPPEVAVFEPSEAEISHTQKATLVCLATGFYPDHVELSWWVNGKEVHSGVSTDPQPLKEQPALNDSRYCLSSRLRVSATFWQNPRNHFRCQVQFYGLSENDEWTQDRAKPVTQIVSAEAWGRADCPIKTDVITMDPKDNCSKDANDTLLLQLTNTSAYYMYLLLLLKSVVYFAIITCCLLRRTAFCCNGEKSKRGRKKLLYIFKQPFMRPVQTTQEEDGCSCRFPEEEEGGCELRVKFSRSADAPAYQQGQNQLYNELNLGRREEYDVLDKRRGRDPEMGGKPQRRKNPQEGLYNELQKDKMAEAYSEIGMKGERRRGKGHDGLYQGLSTATKDTYDALHMQALPPR

SEQ ID NO: 31609 - protein, 345 aa, synthetic construct
EDLKNVFPPEVAVFEPSEAEISHTQKATLVCLATGFYPDHVELSWWVNGKEVHSGVSTDPQPLKEQPALNDSRYCLSSRLRVSATFWQNPRNHFRCQVQFYGLSENDEWTQDRAKPVTQIVSAEAWGRADCMDPKDNCSKDANDTLLLQLTNTSAYYMYLLLLLKSVVYFAIITCCLLRRTAFCCNGEKSKRGRKKLLYIFKQPFMRPVQTTQEEDGCSCRFPEEEEGGCELRVKFSRSADAPAYQQGQNQLYNELNLGRREEYDVLDKRRGRDPEMGGKPQRRKNPQEGLYNELQKDKMAEAYSEIGMKGERRRGKGHDGLYQGLSTATKDTYDALHMQALPPR

SEQ ID NO: 31610 - protein, 353 aa, synthetic construct; identical to SEQ ID NO: 31608

SEQ ID NO: 31611 - protein, 339 aa, synthetic construct
EDLKNVFPPEVAVFEPSEAEISHTQKATLVCLATGFYPDHVELSWWVNGKEVHSGVSTDPQPLKEQPALNDSRYCLSSRLRVSATFWQNPRNHFRCQVQFYGLSENDEWTQDRAKPVTQIVSAEAWGRADCCSKDANDTLLLQLTNTSAYYMYLLLLLKSVVYFAIITCCLLRRTAFCCNGEKSKRGRKKLLYIFKQPFMRPVQTTQEEDGCSCRFPEEEEGGCELRVKFSRSADAPAYQQGQNQLYNELNLGRREEYDVLDKRRGRDPEMGGKPQRRKNPQEGLYNELQKDKMAEAYSEIGMKGERRRGKGHDGLYQGLSTATKDTYDALHMQALPPR

SEQ ID NO: 31612 - protein, 354 aa, synthetic construct
EDLKNVFPPEVAVFEPSEAEISHTQKATLVCLATGFYPDHVELSWWVNGKEVHSGVSTDPQPLKEQPALNDSRYCLSSRLRVSATFWQNPRNHFRCQVQFYGLSENDEWTQDRAKPVTQIVSAEAWGRADCEVKTDSTDHVKPKETENTKQPSKSCHKPKAIVHTEKVNMMSLTVLGLRMLFAKTVAVNFLLTAKLFFLKRGRKKLLYIFKQPFMRPVQTTQEEDGCSCRFPEEEEGGCELRVKFSRSADAPAYQQGQNQLYNELNLGRREEYDVLDKRRGRDPEMGGKPQRRKNPQEGLYNELQKDKMAEAYSEIGMKGERRRGKGHDGLYQGLSTATKDTYDALHMQALPPR

SEQ ID NO: 31613 - protein, 347 aa, synthetic construct
EDLKNVFPPEVAVFEPSEAEISHTQKATLVCLATGFYPDHVELSWWVNGKEVHSGVSTDPQPLKEQPALNDSRYCLSSRLRVSATFWQNPRNHFRCQVQFYGLSENDEWTQDRAKPVTQIVSAEAWGRADCDHVKPKETENTKQPSKSCHKPKAIVHTEKVNMMSLTVLGLRMLFAKTVAVNFLLTAKLFFLKRGRKKLLYIFKQPFMRPVQTTQEEDGCSCRFPEEEEGGCELRVKFSRSADAPAYQQGQNQLYNELNLGRREEYDVLDKRRGRDPEMGGKPQRRKNPQEGLYNELQKDKMAEAYSEIGMKGERRRGKGHDGLYQGLSTATKDTYDALHMQALPPR

SEQ ID NO: 31614 - protein, 333 aa, synthetic construct
EDLKNVFPPEVAVFEPSEAEISHTQKATLVCLATGFYPDHVELSWWVNGKEVHSGVSTDPQPLKEQPALNDSRYCLSSRLRVSATFWQNPRNHFRCQVQFYGLSENDEWTQDRAKPVTIPEDTFFPSPESSCDVKLVEKSFETDTNLNFQNLSVIGFRILLLKVAGFNLLMTLRLWSSKRGRKKLLYIFKQPFMRPVQTTQEEDGCSCRFPEEEEGGCELRVKFSRSADAPAYQQGQNQLYNELNLGRREEYDVLDKRRGRDPEMGGKPQRRKNPQEGLYNELQKDKMAEAYSEIGMKGERRRGKGHDGLYQGLSTATKDTYDALHMQALPPR

SEQ ID NO: 31615 - protein, 323 aa, synthetic construct
EDLKNVFPPEVAVFEPSEAEISHTQKATLVCLATGFYPDHVELSWWVNGKEVHSGVSTDPQPLKEQPALNDSRYCLSSRLRVSATFWQNPRNHFRCQVQFYGLSENDEWTQDRAKPVTESSCDVKLVEKSFETDTNLNFQNLSVIGFRILLLKVAGFNLLMTLRLWSSKRGRKKLLYIFKQPFMRPVQTTQEEDGCSCRFPEEEEGGCELRVKFSRSADAPAYQQGQNQLYNELNLGRREEYDVLDKRRGRDPEMGGKPQRRKNPQEGLYNELQKDKMAEAYSEIGMKGERRRGKGHDGLYQGLSTATKDTYDALHMQALPPR

SEQ ID NO: 31616 - protein, 332 aa, synthetic construct
EDLKNVFPPEVAVFEPSEAEISHTQKATLVCLATGFYPDHVELSWWVNGKEVHSGVSTDPQPLKEQPALNDSRYCLSSRLRVSATFWQNPRNHFRCQVQFYGLSENDEWTQDRAKPVTPEDTFFPSPESSCDVKLVEKSFETDTNLNFQNLSVIGFRILLLKVAGFNLLMTLRLWSSKRGRKKLLYIFKQPFMRPVQTTQEEDGCSCRFPEEEEGGCELRVKFSRSADAPAYQQGQNQLYNELNLGRREEYDVLDKRRGRDPEMGGKPQRRKNPQEGLYNELQKDKMAEAYSEIGMKGERRRGKGHDGLYQGLSTATKDTYDALHMQALPPR

SEQ ID NO: 31617 - protein, 342 aa, synthetic construct
EDLKNVFPPEVAVFEPSEAEISHTQKATLVCLATGFYPDHVELSWWVNGKEVHSGVSTDPQPLKEQPALNDSRYCLSSRLRVSATFWQNPRNHFRCQVQFYGLSENDEWTQDRAKPVTFPPIKTDVITMDPKDNCSKDANDTLLLQLTNTSAYYMYLLLLLKSVVYFAIITCCLLRRTAFCCNGEKSKRGRKKLLYIFKQPFMRPVQTTQEEDGCSCRFPEEEEGGCELRVKFSRSADAPAYQQGQNQLYNELNLGRREEYDVLDKRRGRDPEMGGKPQRRKNPQEGLYNELQKDKMAEAYSEIGMKGERRRGKGHDGLYQGLSTATKDTYDALHMQALPPR

SEQ ID NO: 31618 - protein, 340 aa, synthetic construct
EDLKNVFPPEVAVFEPSEAEISHTQKATLVCLATGFYPDHVELSWWVNGKEVHSGVSTDPQPLKEQPALNDSRYCLSSRLRVSATFWQNPRNHFRCQVQFYGLSENDEWTQDRAKPVTPIKTDVITMDPKDNCSKDANDTLLLQLTNTSAYYMYLLLLLKSVVYFAIITCCLLRRTAFCCNGEKSKRGRKKLLYIFKQPFMRPVQTTQEEDGCSCRFPEEEEGGCELRVKFSRSADAPAYQQGQNQLYNELNLGRREEYDVLDKRRGRDPEMGGKPQRRKNPQEGLYNELQKDKMAEAYSEIGMKGERRRGKGHDGLYQGLSTATKDTYDALHMQALPPR

SEQ ID NO: 31619 - protein, 332 aa, synthetic construct
EDLKNVFPPEVAVFEPSEAEISHTQKATLVCLATGFYPDHVELSWWVNGKEVHSGVSTDPQPLKEQPALNDSRYCLSSRLRVSATFWQNPRNHFRCQVQFYGLSENDEWTQDRAKPVTMDPKDNCSKDANDTLLLQLTNTSAYYMYLLLLLKSVVYFAIITCCLLRRTAFCCNGEKSKRGRKKLLYIFKQPFMRPVQTTQEEDGCSCRFPEEEEGGCELRVKFSRSADAPAYQQGQNQLYNELNLGRREEYDVLDKRRGRDPEMGGKPQRRKNPQEGLYNELQKDKMAEAYSEIGMKGERRRGKGHDGLYQGLSTATKDTYDALHMQALPPR

SEQ ID NO: 31620 - protein, 340 aa, synthetic construct; identical to SEQ ID NO: 31618

SEQ ID NO: 31621 - protein, 326 aa, synthetic construct
EDLKNVFPPEVAVFEPSEAEISHTQKATLVCLATGFYPDHVELSWWVNGKEVHSGVSTDPQPLKEQPALNDSRYCLSSRLRVSATFWQNPRNHFRCQVQFYGLSENDEWTQDRAKPVTCSKDANDTLLLQLTNTSAYYMYLLLLLKSVVYFAIITCCLLRRTAFCCNGEKSKRGRKKLLYIFKQPFMRPVQTTQEEDGCSCRFPEEEEGGCELRVKFSRSADAPAYQQGQNQLYNELNLGRREEYDVLDKRRGRDPEMGGKPQRRKNPQEGLYNELQKDKMAEAYSEIGMKGERRRGKGHDGLYQGLSTATKDTYDALHMQALPPR

SEQ ID NO: 31622 - protein, 341 aa, synthetic construct
EDLKNVFPPEVAVFEPSEAEISHTQKATLVCLATGFYPDHVELSWWVNGKEVHSGVSTDPQPLKEQPALNDSRYCLSSRLRVSATFWQNPRNHFRCQVQFYGLSENDEWTQDRAKPVTEVKTDSTDHVKPKETENTKQPSKSCHKPKAIVHTEKVNMMSLTVLGLRMLFAKTVAVNFLLTAKLFFLKRGRKKLLYIFKQPFMRPVQTTQEEDGCSCRFPEEEEGGCELRVKFSRSADAPAYQQGQNQLYNELNLGRREEYDVLDKRRGRDPEMGGKPQRRKNPQEGLYNELQKDKMAEAYSEIGMKGERRRGKGHDGLYQGLSTATKDTYDALHMQALPPR

SEQ ID NO: 31623 - protein, 334 aa, synthetic construct
EDLKNVFPPEVAVFEPSEAEISHTQKATLVCLATGFYPDHVELSWWVNGKEVHSGVSTDPQPLKEQPALNDSRYCLSSRLRVSATFWQNPRNHFRCQVQFYGLSENDEWTQDRAKPVTDHVKPKETENTKQPSKSCHKPKAIVHTEKVNMMSLTVLGLRMLFAKTVAVNFLLTAKLFFLKRGRKKLLYIFKQPFMRPVQTTQEEDGCSCRFPEEEEGGCELRVKFSRSADAPAYQQGQNQLYNELNLGRREEYDVLDKRRGRDPEMGGKPQRRKNPQEGLYNELQKDKMAEAYSEIGMKGERRRGKGHDGLYQGLSTATKDTYDALHMQALPPR

SEQ ID NO: 31624 - protein, 341 aa, synthetic construct; identical to SEQ ID NO: 31584

SEQ ID NO: 31625 - protein, 331 aa, synthetic construct; identical to SEQ ID NO: 31585

SEQ ID NO: 31626 - protein, 340 aa, synthetic construct; identical to SEQ ID NO: 31586

SEQ ID NO: 31627 - protein, 350 aa, synthetic construct; identical to SEQ ID NO: 31587

SEQ ID NO: 31628 - protein, 348 aa, synthetic construct; identical to SEQ ID NO: 31588

SEQ ID NO: 31629 - protein, 340 aa, synthetic construct; identical to SEQ ID NO: 31589

SEQ ID NO: 31630 - protein, 348 aa, synthetic construct; identical to SEQ ID NO: 31588

SEQ ID NO: 31631 - protein, 334 aa, synthetic construct; identical to SEQ ID NO: 31591

SEQ ID NO: 31632 - protein, 349 aa, synthetic construct; identical to SEQ ID NO: 31592

SEQ ID NO: 31633 - protein, 342 aa, synthetic construct; identical to SEQ ID NO: 31593

SEQ ID NO: 31634 - protein, 325 aa, synthetic construct
PEVAVFEPSEAEISHTQKATLVCLATGFYPDHVELSWWVNGKEVHSGVSTDPQPLKEQPALNDSRYCLSSRLRVSATFWQNPRNHFRCQVQFYGLSENDEWTQDRAKPVTIPEDTFFPSPESSCDVKLVEKSFETDTNLNFQNLSVIGFRILLLKVAGFNLLMTLRLWSSKRGRKKLLYIFKQPFMRPVQTTQEEDGCSCRFPEEEEGGCELRVKFSRSADAPAYQQGQNQLYNELNLGRREEYDVLDKRRGRDPEMGGKPQRRKNPQEGLYNELQKDKMAEAYSEIGMKGERRRGKGHDGLYQGLSTATKDTYDALHMQALPPR

SEQ ID NO: 31635 - protein, 315 aa, synthetic construct
PEVAVFEPSEAEISHTQKATLVCLATGFYPDHVELSWWVNGKEVHSGVSTDPQPLKEQPALNDSRYCLSSRLRVSATFWQNPRNHFRCQVQFYGLSENDEWTQDRAKPVTESSCDVKLVEKSFETDTNLNFQNLSVIGFRILLLKVAGFNLLMTLRLWSSKRGRKKLLYIFKQPFMRPVQTTQEEDGCSCRFPEEEEGGCELRVKFSRSADAPAYQQGQNQLYNELNLGRREEYDVLDKRRGRDPEMGGKPQRRKNPQEGLYNELQKDKMAEAYSEIGMKGERRRGKGHDGLYQGLSTATKDTYDALHMQALPPR

SEQ ID NO: 31636 - protein, 324 aa, synthetic construct
PEVAVFEPSEAEISHTQKATLVCLATGFYPDHVELSWWVNGKEVHSGVSTDPQPLKEQPALNDSRYCLSSRLRVSATFWQNPRNHFRCQVQFYGLSENDEWTQDRAKPVTPEDTFFPSPESSCDVKLVEKSFETDTNLNFQNLSVIGFRILLLKVAGFNLLMTLRLWSSKRGRKKLLYIFKQPFMRPVQTTQEEDGCSCRFPEEEEGGCELRVKFSRSADAPAYQQGQNQLYNELNLGRREEYDVLDKRRGRDPEMGGKPQRRKNPQEGLYNELQKDKMAEAYSEIGMKGERRRGKGHDGLYQGLSTATKDTYDALHMQALPPR

SEQ ID NO: 31637 - protein, 334 aa, synthetic construct
PEVAVFEPSEAEISHTQKATLVCLATGFYPDHVELSWWVNGKEVHSGVSTDPQPLKEQPALNDSRYCLSSRLRVSATFWQNPRNHFRCQVQFYGLSENDEWTQDRAKPVTFPPIKTDVITMDPKDNCSKDANDTLLLQLTNTSAYYMYLLLLLKSVVYFAIITCCLLRRTAFCCNGEKSKRGRKKLLYIFKQPFMRPVQTTQEEDGCSCRFPEEEEGGCELRVKFSRSADAPAYQQGQNQLYNELNLGRREEYDVLDKRRGRDPEMGGKPQRRKNPQEGLYNELQKDKMAEAYSEIGMKGERRRGKGHDGLYQGLSTATKDTYDALHMQALPPR

SEQ ID NO: 31638 - protein, 332 aa, synthetic construct
PEVAVFEPSEAEISHTQKATLVCLATGFYPDHVELSWWVNGKEVHSGVSTDPQPLKEQPALNDSRYCLSSRLRVSATFWQNPRNHFRCQVQFYGLSENDEWTQDRAKPVTPIKTDVITMDPKDNCSKDANDTLLLQLTNTSAYYMYLLLLLKSVVYFAIITCCLLRRTAFCCNGEKSKRGRKKLLYIFKQPFMRPVQTTQEEDGCSCRFPEEEEGGCELRVKFSRSADAPAYQQGQNQLYNELNLGRREEYDVLDKRRGRDPEMGGKPQRRKNPQEGLYNELQKDKMAEAYSEIGMKGERRRGKGHDGLYQGLSTATKDTYDALHMQALPPR

SEQ ID NO: 31639 - protein, 324 aa, synthetic construct
PEVAVFEPSEAEISHTQKATLVCLATGFYPDHVELSWWVNGKEVHSGVSTDPQPLKEQPALNDSRYCLSSRLRVSATFWQNPRNHFRCQVQFYGLSENDEWTQDRAKPVTMDPKDNCSKDANDTLLLQLTNTSAYYMYLLLLLKSVVYFAIITCCLLRRTAFCCNGEKSKRGRKKLLYIFKQPFMRPVQTTQEEDGCSCRFPEEEEGGCELRVKFSRSADAPAYQQGQNQLYNELNLGRREEYDVLDKRRGRDPEMGGKPQRRKNPQEGLYNELQKDKMAEAYSEIGMKGERRRGKGHDGLYQGLSTATKDTYDALHMQALPPR

SEQ ID NO: 31640 - protein, 332 aa, synthetic construct; identical to SEQ ID NO: 31638

SEQ ID NO: 31641 - protein, 318 aa, synthetic construct
PEVAVFEPSEAEISHTQKATLVCLATGFYPDHVELSWWVNGKEVHSGVSTDPQPLKEQPALNDSRYCLSSRLRVSATFWQNPRNHFRCQVQFYGLSENDEWTQDRAKPVTCSKDANDTLLLQLTNTSAYYMYLLLLLKSVVYFAIITCCLLRRTAFCCNGEKSKRGRKKLLYIFKQPFMRPVQTTQEEDGCSCRFPEEEEGGCELRVKFSRSADAPAYQQGQNQLYNELNLGRREEYDVLDKRRGRDPEMGGKPQRRKNPQEGLYNELQKDKMAEAYSEIGMKGERRRGKGHDGLYQGLSTATKDTYDALHMQALPPR

SEQ ID NO: 31642 - protein, 333 aa, synthetic construct
PEVAVFEPSEAEISHTQKATLVCLATGFYPDHVELSWWVNGKEVHSGVSTDPQPLKEQPALNDSRYCLSSRLRVSATFWQNPRNHFRCQVQFYGLSENDEWTQDRAKPVTEVKTDSTDHVKPKETENTKQPSKSCHKPKAIVHTEKVNMMSLTVLGLRMLFAKTVAVNFLLTAKLFFLKRGRKKLLYIFKQPFMRPVQTTQEEDGCSCRFPEEEEGGCELRVKFSRSADAPAYQQGQNQLYNELNLGRREEYDVLDKRRGRDPEMGGKPQRRKNPQEGLYNELQKDKMAEAYSEIGMKGERRRGKGHDGLYQGLSTATKDTYDALHMQALPPR

SEQ ID NO: 31643 - protein, 326 aa, synthetic construct
PEVAVFEPSEAEISHTQKATLVCLATGFYPDHVELSWWVNGKEVHSGVSTDPQPLKEQPALNDSRYCLSSRLRVSATFWQNPRNHFRCQVQFYGLSENDEWTQDRAKPVTDHVKPKETENTKQPSKSCHKPKAIVHTEKVNMMSLTVLGLRMLFAKTVAVNFLLTAKLFFLKRGRKKLLYIFKQPFMRPVQTTQEEDGCSCRFPEEEEGGCELRVKFSRSADAPAYQQGQNQLYNELNLGRREEYDVLDKRRGRDPEMGGKPQRRKNPQEGLYNELQKDKMAEAYSEIGMKGERRRGKGHDGLYQGLSTATKDTYDALHMQALPPR

SEQ ID NO: 31644 - protein, 319 aa, synthetic construct
DKQLDADVSPKPTIFLPSIAETKLQKAGTYLCLLEKFFPDVIKIHWQEKKSNTILGSQEGNTMKTNDTYMKFSWLTVPEKSLDKEHRCIVRHENNKNGVDQEIIIPEDTFFPSPESSCDVKLVEKSFETDTNLNFQNLSVIGFRILLLKVAGFNLLMTLRLWSSKRGRKKLLYIFKQPFMRPVQTTQEEDGCSCRFPEEEEGGCELRVKFSRSADAPAYQQGQNQLYNELNLGRREEYDVLDKRRGRDPEMGGKPQRRKNPQEGLYNELQKDKMAEAYSEIGMKGERRRGKGHDGLYQGLSTATKDTYDALHMQALPPR

SEQ ID NO: 31645 - protein, 309 aa, synthetic construct
DKQLDADVSPKPTIFLPSIAETKLQKAGTYLCLLEKFFPDVIKIHWQEKKSNTILGSQEGNTMKTNDTYMKFSWLTVPEKSLDKEHRCIVRHENNKNGVDQEIIESSCDVKLVEKSFETDTNLNFQNLSVIGFRILLLKVAGFNLLMTLRLWSSKRGRKKLLYIFKQPFMRPVQTTQEEDGCSCRFPEEEEGGCELRVKFSRSADAPAYQQGQNQLYNELNLGRREEYDVLDKRRGRDPEMGGKPQRRKNPQEGLYNELQKDKMAEAYSEIGMKGERRRGKGHDGLYQGLSTATKDTYDALHMQALPPR

SEQ ID NO: 31646 - protein, 318 aa, synthetic construct
DKQLDADVSPKPTIFLPSIAETKLQKAGTYLCLLEKFFPDVIKIHWQEKKSNTILGSQEGNTMKTNDTYMKFSWLTVPEKSLDKEHRCIVRHENNKNGVDQEIIPEDTFFPSPESSCDVKLVEKSFETDTNLNFQNLSVIGFRILLLKVAGFNLLMTLRLWSSKRGRKKLLYIFKQPFMRPVQTTQEEDGCSCRFPEEEEGGCELRVKFSRSADAPAYQQGQNQLYNELNLGRREEYDVLDKRRGRDPEMGGKPQRRKNPQEGLYNELQKDKMAEAYSEIGMKGERRRGKGHDGLYQGLSTATKDTYDALHMQALPPR

SEQ ID NO: 31647 - protein, 312 aa, synthetic construct
DKQLDADVSPKPTIFLPSIAETKLQKAGTYLCLLEKFFPDVIKIHWQEKKSNTILGSQEGNTMKTNDTYMKFSWLTVPEKSLDKEHRCIVRHENNKNGVDQEIIGRADCGFTSESYQQGVLSATILYEILLGKATLYAVLVSALVLMAMVKRKDSRGKRGRKKLLYIFKQPFMRPVQTTQEEDGCSCRFPEEEEGGCELRVKFSRSADAPAYQQGQNQLYNELNLGRREEYDVLDKRRGRDPEMGGKPQRRKNPQEGLYNELQKDKMAEAYSEIGMKGERRRGKGHDGLYQGLSTATKDTYDALHMQALPPR

SEQ ID NO: 31648 - protein, 310 aa, synthetic construct
DKQLDADVSPKPTIFLPSIAETKLQKAGTYLCLLEKFFPDVIKIHWQEKKSNTILGSQEGNTMKTNDTYMKFSWLTVPEKSLDKEHRCIVRHENNKNGVDQEIIADCGFTSESYQQGVLSATILYEILLGKATLYAVLVSALVLMAMVKRKDSRGKRGRKKLLYIFKQPFMRPVQTTQEEDGCSCRFPEEEEGGCELRVKFSRSADAPAYQQGQNQLYNELNLGRREEYDVLDKRRGRDPEMGGKPQRRKNPQEGLYNELQKDKMAEAYSEIGMKGERRRGKGHDGLYQGLSTATKDTYDALHMQALPPR

SEQ ID NO: 31649 - protein, 320 aa, synthetic construct
DKQLDADVSPKPTIFLPSIAETKLQKAGTYLCLLEKFFPDVIKIHWQEKKSNTILGSQEGNTMKTNDTYMKFSWLTVPEKSLDKEHRCIVRHENNKNGVDQEIIQIVSAEAWGRADCGFTSESYQQGVLSATILYEILLGKATLYAVLVSALVLMAMVKRKDSRGKRGRKKLLYIFKQPFMRPVQTTQEEDGCSCRFPEEEEGGCELRVKFSRSADAPAYQQGQNQLYNELNLGRREEYDVLDKRRGRDPEMGGKPQRRKNPQEGLYNELQKDKMAEAYSEIGMKGERRRGKGHDGLYQGLSTATKDTYDALHMQALPPR

SEQ ID NO: 31650 - protein, 327 aa, synthetic construct
DKQLDADVSPKPTIFLPSIAETKLQKAGTYLCLLEKFFPDVIKIHWQEKKSNTILGSQEGNTMKTNDTYMKFSWLTVPEKSLDKEHRCIVRHENNKNGVDQEIIEVKTDSTDHVKPKETENTKQPSKSCHKPKAIVHTEKVNMMSLTVLGLRMLFAKTVAVNFLLTAKLFFLKRGRKKLLYIFKQPFMRPVQTTQEEDGCSCRFPEEEEGGCELRVKFSRSADAPAYQQGQNQLYNELNLGRREEYDVLDKRRGRDPEMGGKPQRRKNPQEGLYNELQKDKMAEAYSEIGMKGERRRGKGHDGLYQGLSTATKDTYDALHMQALPPR

SEQ ID NO: 31651 - protein, 320 aa, synthetic construct
DKQLDADVSPKPTIFLPSIAETKLQKAGTYLCLLEKFFPDVIKIHWQEKKSNTILGSQEGNTMKTNDTYMKFSWLTVPEKSLDKEHRCIVRHENNKNGVDQEIIDHVKPKETENTKQPSKSCHKPKAIVHTEKVNMMSLTVLGLRMLFAKTVAVNFLLTAKLFFLKRGRKKLLYIFKQPFMRPVQTTQEEDGCSCRFPEEEEGGCELRVKFSRSADAPAYQQGQNQLYNELNLGRREEYDVLDKRRGRDPEMGGKPQRRKNPQEGLYNELQKDKMAEAYSEIGMKGERRRGKGHDGLYQGLSTATKDTYDALHMQALPPR

SEQ ID NO: 31652 - protein, 321 aa, synthetic construct
DKQLDADVSPKPTIFLPSIAETKLQKAGTYLCLLEKFFPDVIKIHWQEKKSNTILGSQEGNTMKTNDTYMKFSWLTVPEKSLDKEHRCIVRHENNKNGVDQEIIFPIPEDTFFPSPESSCDVKLVEKSFETDTNLNFQNLSVIGFRILLLKVAGFNLLMTLRLWSSKRGRKKLLYIFKQPFMRPVQTTQEEDGCSCRFPEEEEGGCELRVKFSRSADAPAYQQGQNQLYNELNLGRREEYDVLDKRRGRDPEMGGKPQRRKNPQEGLYNELQKDKMAEAYSEIGMKGERRRGKGHDGLYQGLSTATKDTYDALHMQALPPR

SEQ ID NO: 31653 - protein, 311 aa, synthetic construct
DKQLDADVSPKPTIFLPSIAETKLQKAGTYLCLLEKFFPDVIKIHWQEKKSNTILGSQEGNTMKTNDTYMKFSWLTVPEKSLDKEHRCIVRHENNKNGVDQEIIFPESSCDVKLVEKSFETDTNLNFQNLSVIGFRILLLKVAGFNLLMTLRLWSSKRGRKKLLYIFKQPFMRPVQTTQEEDGCSCRFPEEEEGGCELRVKFSRSADAPAYQQGQNQLYNELNLGRREEYDVLDKRRGRDPEMGGKPQRRKNPQEGLYNELQKDKMAEAYSEIGMKGERRRGKGHDGLYQGLSTATKDTYDALHMQALPPR

SEQ ID NO: 31654 - protein, 320 aa, synthetic construct
DKQLDADVSPKPTIFLPSIAETKLQKAGTYLCLLEKFFPDVIKIHWQEKKSNTILGSQEGNTMKTNDTYMKFSWLTVPEKSLDKEHRCIVRHENNKNGVDQEIIFPPEDTFFPSPESSCDVKLVEKSFETDTNLNFQNLSVIGFRILLLKVAGFNLLMTLRLWSSKRGRKKLLYIFKQPFMRPVQTTQEEDGCSCRFPEEEEGGCELRVKFSRSADAPAYQQGQNQLYNELNLGRREEYDVLDKRRGRDPEMGGKPQRRKNPQEGLYNELQKDKMAEAYSEIGMKGERRRGKGHDGLYQGLSTATKDTYDALHMQALPPR

SEQ ID NO: 31655 - protein, 314 aa, synthetic construct
DKQLDADVSPKPTIFLPSIAETKLQKAGTYLCLLEKFFPDVIKIHWQEKKSNTILGSQEGNTMKTNDTYMKFSWLTVPEKSLDKEHRCIVRHENNKNGVDQEIIFPGRADCGFTSESYQQGVLSATILYEILLGKATLYAVLVSALVLMAMVKRKDSRGKRGRKKLLYIFKQPFMRPVQTTQEEDGCSCRFPEEEEGGCELRVKFSRSADAPAYQQGQNQLYNELNLGRREEYDVLDKRRGRDPEMGGKPQRRKNPQEGLYNELQKDKMAEAYSEIGMKGERRRGKGHDGLYQGLSTATKDTYDALHMQALPPR

SEQ ID NO: 31656 - protein, 312 aa, synthetic construct
DKQLDADVSPKPTIFLPSIAETKLQKAGTYLCLLEKFFPDVIKIHWQEKKSNTILGSQEGNTMKTNDTYMKFSWLTVPEKSLDKEHRCIVRHENNKNGVDQEIIFPADCGFTSESYQQGVLSATILYEILLGKATLYAVLVSALVLMAMVKRKDSRGKRGRKKLLYIFKQPFMRPVQTTQEEDGCSCRFPEEEEGGCELRVKFSRSADAPAYQQGQNQLYNELNLGRREEYDVLDKRRGRDPEMGGKPQRRKNPQEGLYNELQKDKMAEAYSEIGMKGERRRGKGHDGLYQGLSTATKDTYDALHMQALPPR

SEQ ID NO: 31657 - protein, 322 aa, synthetic construct
DKQLDADVSPKPTIFLPSIAETKLQKAGTYLCLLEKFFPDVIKIHWQEKKSNTILGSQEGNTMKTNDTYMKFSWLTVPEKSLDKEHRCIVRHENNKNGVDQEIIFPQIVSAEAWGRADCGFTSESYQQGVLSATILYEILLGKATLYAVLVSALVLMAMVKRKDSRGKRGRKKLLYIFKQPFMRPVQTTQEEDGCSCRFPEEEEGGCELRVKFSRSADAPAYQQGQNQLYNELNLGRREEYDVLDKRRGRDPEMGGKPQRRKNPQEGLYNELQKDKMAEAYSEIGMKGERRRGKGHDGLYQGLSTATKDTYDALHMQALPPR

SEQ ID NO: 31658 - protein, 329 aa, synthetic construct
DKQLDADVSPKPTIFLPSIAETKLQKAGTYLCLLEKFFPDVIKIHWQEKKSNTILGSQEGNTMKTNDTYMKFSWLTVPEKSLDKEHRCIVRHENNKNGVDQEIIFPEVKTDSTDHVKPKETENTKQPSKSCHKPKAIVHTEKVNMMSLTVLGLRMLFAKTVAVNFLLTAKLFFLKRGRKKLLYIFKQPFMRPVQTTQEEDGCSCRFPEEEEGGCELRVKFSRSADAPAYQQGQNQLYNELNLGRREEYDVLDKRRGRDPEMGGKPQRRKNPQEGLYNELQKDKMAEAYSEIGMKGERRRGKGHDGLYQGLSTATKDTYDALHMQALPPR

SEQ ID NO: 31659 - protein, 322 aa, synthetic construct
DKQLDADVSPKPTIFLPSIAETKLQKAGTYLCLLEKFFPDVIKIHWQEKKSNTILGSQEGNTMKTNDTYMKFSWLTVPEKSLDKEHRCIVRHENNKNGVDQEIIFPDHVKPKETENTKQPSKSCHKPKAIVHTEKVNMMSLTVLGLRMLFAKTVAVNFLLTAKLFFLKRGRKKLLYIFKQPFMRPVQTTQEEDGCSCRFPEEEEGGCELRVKFSRSADAPAYQQGQNQLYNELNLGRREEYDVLDKRRGRDPEMGGKPQRRKNPQEGLYNELQKDKMAEAYSEIGMKGERRRGKGHDGLYQGLSTATKDTYDALHMQALPPR

SEQ ID NO: 31660 - protein, 329 aa, synthetic construct
DKQLDADVSPKPTIFLPSIAETKLQKAGTYLCLLEKFFPDVIKIHWQEKKSNTILGSQEGNTMKTNDTYMKFSWLTVPEKSLDKEHRCIVRHENNKNGVDQEIIFPPIKTDVITIPEDTFFPSPESSCDVKLVEKSFETDTNLNFQNLSVIGFRILLLKVAGFNLLMTLRLWSSKRGRKKLLYIFKQPFMRPVQTTQEEDGCSCRFPEEEEGGCELRVKFSRSADAPAYQQGQNQLYNELNLGRREEYDVLDKRRGRDPEMGGKPQRRKNPQEGLYNELQKDKMAEAYSEIGMKGERRRGKGHDGLYQGLSTATKDTYDALHMQALPPR

SEQ ID NO: 31661 - protein, 319 aa, synthetic construct
DKQLDADVSPKPTIFLPSIAETKLQKAGTYLCLLEKFFPDVIKIHWQEKKSNTILGSQEGNTMKTNDTYMKFSWLTVPEKSLDKEHRCIVRHENNKNGVDQEIIFPPIKTDVITESSCDVKLVEKSFETDTNLNFQNLSVIGFRILLLKVAGFNLLMTLRLWSSKRGRKKLLYIFKQPFMRPVQTTQEEDGCSCRFPEEEEGGCELRVKFSRSADAPAYQQGQNQLYNELNLGRREEYDVLDKRRGRDPEMGGKPQRRKNPQEGLYNELQKDKMAEAYSEIGMKGERRRGKGHDGLYQGLSTATKDTYDALHMQALPPR

SEQ ID NO: 31662 - protein, 328 aa, synthetic construct
DKQLDADVSPKPTIFLPSIAETKLQKAGTYLCLLEKFFPDVIKIHWQEKKSNTILGSQEGNTMKTNDTYMKFSWLTVPEKSLDKEHRCIVRHENNKNGVDQEIIFPPIKTDVITPEDTFFPSPESSCDVKLVEKSFETDTNLNFQNLSVIGFRILLLKVAGFNLLMTLRLWSSKRGRKKLLYIFKQPFMRPVQTTQEEDGCSCRFPEEEEGGCELRVKFSRSADAPAYQQGQNQLYNELNLGRREEYDVLDKRRGRDPEMGGKPQRRKNPQEGLYNELQKDKMAEAYSEIGMKGERRRGKGHDGLYQGLSTATKDTYDALHMQALPPR

SEQ ID NO: 31663 - protein, 322 aa, synthetic construct
DKQLDADVSPKPTIFLPSIAETKLQKAGTYLCLLEKFFPDVIKIHWQEKKSNTILGSQEGNTMKTNDTYMKFSWLTVPEKSLDKEHRCIVRHENNKNGVDQEIIFPPIKTDVITGRADCGFTSESYQQGVLSATILYEILLGKATLYAVLVSALVLMAMVKRKDSRGKRGRKKLLYIFKQPFMRPVQTTQEEDGCSCRFPEEEEGGCELRVKFSRSADAPAYQQGQNQLYNELNLGRREEYDVLDKRRGRDPEMGGKPQRRKNPQEGLYNELQKDKMAEAYSEIGMKGERRRGKGHDGLYQGLSTATKDTYDALHMQALPPR

SEQ ID NO: 31664 - protein, 320 aa, synthetic construct
DKQLDADVSPKPTIFLPSIAETKLQKAGTYLCLLEKFFPDVIKIHWQEKKSNTILGSQEGNTMKTNDTYMKFSWLTVPEKSLDKEHRCIVRHENNKNGVDQEIIFPPIKTDVITADCGFTSESYQQGVLSATILYEILLGKATLYAVLVSALVLMAMVKRKDSRGKRGRKKLLYIFKQPFMRPVQTTQEEDGCSCRFPEEEEGGCELRVKFSRSADAPAYQQGQNQLYNELNLGRREEYDVLDKRRGRDPEMGGKPQRRKNPQEGLYNELQKDKMAEAYSEIGMKGERRRGKGHDGLYQGLSTATKDTYDALHMQALPPR

SEQ ID NO: 31665 - protein, 330 aa, synthetic construct
DKQLDADVSPKPTIFLPSIAETKLQKAGTYLCLLEKFFPDVIKIHWQEKKSNTILGSQEGNTMKTNDTYMKFSWLTVPEKSLDKEHRCIVRHENNKNGVDQEIIFPPIKTDVITQIVSAEAWGRADCGFTSESYQQGVLSATILYEILLGKATLYAVLVSALVLMAMVKRKDSRGKRGRKKLLYIFKQPFMRPVQTTQEEDGCSCRFPEEEEGGCELRVKFSRSADAPAYQQGQNQLYNELNLGRREEYDVLDKRRGRDPEMGGKPQRRKNPQEGLYNELQKDKMAEAYSEIGMKGERRRGKGHDGLYQGLSTATKDTYDALHMQALPPR

SEQ ID NO: 31666 - protein, 337 aa, synthetic construct
DKQLDADVSPKPTIFLPSIAETKLQKAGTYLCLLEKFFPDVIKIHWQEKKSNTILGSQEGNTMKTNDTYMKFSWLTVPEKSLDKEHRCIVRHENNKNGVDQEIIFPPIKTDVITEVKTDSTDHVKPKETENTKQPSKSCHKPKAIVHTEKVNMMSLTVLGLRMLFAKTVAVNFLLTAKLFFLKRGRKKLLYIFKQPFMRPVQTTQEEDGCSCRFPEEEEGGCELRVKFSRSADAPAYQQGQNQLYNELNLGRREEYDVLDKRRGRDPEMGGKPQRRKNPQEGLYNELQKDKMAEAYSEIGMKGERRRGKGHDGLYQGLSTATKDTYDALHMQALPPR

SEQ ID NO: 31667 - protein, 330 aa, synthetic construct
DKQLDADVSPKPTIFLPSIAETKLQKAGTYLCLLEKFFPDVIKIHWQEKKSNTILGSQEGNTMKTNDTYMKFSWLTVPEKSLDKEHRCIVRHENNKNGVDQEIIFPPIKTDVITDHVKPKETENTKQPSKSCHKPKAIVHTEKVNMMSLTVLGLRMLFAKTVAVNFLLTAKLFFLKRGRKKLLYIFKQPFMRPVQTTQEEDGCSCRFPEEEEGGCELRVKFSRSADAPAYQQGQNQLYNELNLGRREEYDVLDKRRGRDPEMGGKPQRRKNPQEGLYNELQKDKMAEAYSEIGMKGERRRGKGHDGLYQGLSTATKDTYDALHMQALPPR

SEQ ID NO: 31668 - protein, 282 aa, synthetic construct
PIKTDVITMDPKDNCSKDANDTLLLQLTNTSAYYMYLLLLLKSVVYFAIITCCLLRRTAFCCNGEKSIPEDTFFPSPESSCDVKLVEKSFETDTNLNFQNLSVIGFRILLLKVAGFNLLMTLRLWSSKRGRKKLLYIFKQPFMRPVQTTQEEDGCSCRFPEEEEGGCELRVKFSRSADAPAYQQGQNQLYNELNLGRREEYDVLDKRRGRDPEMGGKPQRRKNPQEGLYNELQKDKMAEAYSEIGMKGERRRGKGHDGLYQGLSTATKDTYDALHMQALPPR

SEQ ID NO: 31669 - protein, 272 aa, synthetic construct
PIKTDVITMDPKDNCSKDANDTLLLQLTNTSAYYMYLLLLLKSVVYFAIITCCLLRRTAFCCNGEKSESSCDVKLVEKSFETDTNLNFQNLSVIGFRILLLKVAGFNLLMTLRLWSSKRGRKKLLYIFKQPFMRPVQTTQEEDGCSCRFPEEEEGGCELRVKFSRSADAPAYQQGQNQLYNELNLGRREEYDVLDKRRGRDPEMGGKPQRRKNPQEGLYNELQKDKMAEAYSEIGMKGERRRGKGHDGLYQGLSTATKDTYDALHMQALPPR

SEQ ID NO: 31670 - protein, 281 aa, synthetic construct
PIKTDVITMDPKDNCSKDANDTLLLQLTNTSAYYMYLLLLLKSVVYFAIITCCLLRRTAFCCNGEKSPEDTFFPSPESSCDVKLVEKSFETDTNLNFQNLSVIGFRILLLKVAGFNLLMTLRLWSSKRGRKKLLYIFKQPFMRPVQTTQEEDGCSCRFPEEEEGGCELRVKFSRSADAPAYQQGQNQLYNELNLGRREEYDVLDKRRGRDPEMGGKPQRRKNPQEGLYNELQKDKMAEAYSEIGMKGERRRGKGHDGLYQGLSTATKDTYDALHMQALPPR

SEQ ID NO: 31671 - protein, 275 aa, synthetic construct
PIKTDVITMDPKDNCSKDANDTLLLQLTNTSAYYMYLLLLLKSVVYFAIITCCLLRRTAFCCNGEKSGRADCGFTSESYQQGVLSATILYEILLGKATLYAVLVSALVLMAMVKRKDSRGKRGRKKLLYIFKQPFMRPVQTTQEEDGCSCRFPEEEEGGCELRVKFSRSADAPAYQQGQNQLYNELNLGRREEYDVLDKRRGRDPEMGGKPQRRKNPQEGLYNELQKDKMAEAYSEIGMKGERRRGKGHDGLYQGLSTATKDTYDALHMQALPPR

SEQ ID NO: 31672 - protein, 273 aa, synthetic construct
PIKTDVITMDPKDNCSKDANDTLLLQLTNTSAYYMYLLLLLKSVVYFAIITCCLLRRTAFCCNGEKSADCGFTSESYQQGVLSATILYEILLGKATLYAVLVSALVLMAMVKRKDSRGKRGRKKLLYIFKQPFMRPVQTTQEEDGCSCRFPEEEEGGCELRVKFSRSADAPAYQQGQNQLYNELNLGRREEYDVLDKRRGRDPEMGGKPQRRKNPQEGLYNELQKDKMAEAYSEIGMKGERRRGKGHDGLYQGLSTATKDTYDALHMQALPPR

SEQ ID NO: 31673 - protein, 283 aa, synthetic construct
PIKTDVITMDPKDNCSKDANDTLLLQLTNTSAYYMYLLLLLKSVVYFAIITCCLLRRTAFCCNGEKSQIVSAEAWGRADCGFTSESYQQGVLSATILYEILLGKATLYAVLVSALVLMAMVKRKDSRGKRGRKKLLYIFKQPFMRPVQTTQEEDGCSCRFPEEEEGGCELRVKFSRSADAPAYQQGQNQLYNELNLGRREEYDVLDKRRGRDPEMGGKPQRRKNPQEGLYNELQKDKMAEAYSEIGMKGERRRGKGHDGLYQGLSTATKDTYDALHMQALPPR

SEQ ID NO: 31674 - protein, 290 aa, synthetic construct
PIKTDVITMDPKDNCSKDANDTLLLQLTNTSAYYMYLLLLLKSVVYFAIITCCLLRRTAFCCNGEKSEVKTDSTDHVKPKETENTKQPSKSCHKPKAIVHTEKVNMMSLTVLGLRMLFAKTVAVNFLLTAKLFFLKRGRKKLLYIFKQPFMRPVQTTQEEDGCSCRFPEEEEGGCELRVKFSRSADAPAYQQGQNQLYNELNLGRREEYDVLDKRRGRDPEMGGKPQRRKNPQEGLYNELQKDKMAEAYSEIGMKGERRRGKGHDGLYQGLSTATKDTYDALHMQALPPR

SEQ ID NO: 31675 - protein, 283 aa, synthetic construct
PIKTDVITMDPKDNCSKDANDTLLLQLTNTSAYYMYLLLLLKSVVYFAIITCCLLRRTAFCCNGEKSDHVKPKETENTKQPSKSCHKPKAIVHTEKVNMMSLTVLGLRMLFAKTVAVNFLLTAKLFFLKRGRKKLLYIFKQPFMRPVQTTQEEDGCSCRFPEEEEGGCELRVKFSRSADAPAYQQGQNQLYNELNLGRREEYDVLDKRRGRDPEMGGKPQRRKNPQEGLYNELQKDKMAEAYSEIGMKGERRRGKGHDGLYQGLSTATKDTYDALHMQALPPR

SEQ ID NO: 31676 - protein, 334 aa, synthetic construct
DKQLDADVSPKPTIFLPSIAETKLQKAGTYLCLLEKFFPDVIKIHWQEKKSNTILGSQEGNTMKTNDTYMKFSWLTVPEKSLDKEHRCIVRHENNKNGVDQEIIFPPIKTDVITMDPKDIPEDTFFPSPESSCDVKLVEKSFETDTNLNFQNLSVIGFRILLLKVAGFNLLMTLRLWSSKRGRKKLLYIFKQPFMRPVQTTQEEDGCSCRFPEEEEGGCELRVKFSRSADAPAYQQGQNQLYNELNLGRREEYDVLDKRRGRDPEMGGKPQRRKNPQEGLYNELQKDKMAEAYSEIGMKGERRRGKGHDGLYQGLSTATKDTYDALHMQALPPR

SEQ ID NO: 31677 - protein, 324 aa, synthetic construct
DKQLDADVSPKPTIFLPSIAETKLQKAGTYLCLLEKFFPDVIKIHWQEKKSNTILGSQEGNTMKTNDTYMKFSWLTVPEKSLDKEHRCIVRHENNKNGVDQEIIFPPIKTDVITMDPKDESSCDVKLVEKSFETDTNLNFQNLSVIGFRILLLKVAGFNLLMTLRLWSSKRGRKKLLYIFKQPFMRPVQTTQEEDGCSCRFPEEEEGGCELRVKFSRSADAPAYQQGQNQLYNELNLGRREEYDVLDKRRGRDPEMGGKPQRRKNPQEGLYNELQKDKMAEAYSEIGMKGERRRGKGHDGLYQGLSTATKDTYDALHMQALPPR

SEQ ID NO: 31678 - protein, 333 aa, synthetic construct
DKQLDADVSPKPTIFLPSIAETKLQKAGTYLCLLEKFFPDVIKIHWQEKKSNTILGSQEGNTMKTNDTYMKFSWLTVPEKSLDKEHRCIVRHENNKNGVDQEIIFPPIKTDVITMDPKDPEDTFFPSPESSCDVKLVEKSFETDTNLNFQNLSVIGFRILLLKVAGFNLLMTLRLWSSKRGRKKLLYIFKQPFMRPVQTTQEEDGCSCRFPEEEEGGCELRVKFSRSADAPAYQQGQNQLYNELNLGRREEYDVLDKRRGRDPEMGGKPQRRKNPQEGLYNELQKDKMAEAYSEIGMKGERRRGKGHDGLYQGLSTATKDTYDALHMQALPPR

SEQ ID NO: 31679 - protein, 327 aa, synthetic construct
DKQLDADVSPKPTIFLPSIAETKLQKAGTYLCLLEKFFPDVIKIHWQEKKSNTILGSQEGNTMKTNDTYMKFSWLTVPEKSLDKEHRCIVRHENNKNGVDQEIIFPPIKTDVITMDPKDGRADCGFTSESYQQGVLSATILYEILLGKATLYAVLVSALVLMAMVKRKDSRGKRGRKKLLYIFKQPFMRPVQTTQEEDGCSCRFPEEEEGGCELRVKFSRSADAPAYQQGQNQLYNELNLGRREEYDVLDKRRGRDPEMGGKPQRRKNPQEGLYNELQKDKMAEAYSEIGMKGERRRGKGHDGLYQGLSTATKDTYDALHMQALPPR

SEQ ID NO: 31680 - protein, 325 aa, synthetic construct
DKQLDADVSPKPTIFLPSIAETKLQKAGTYLCLLEKFFPDVIKIHWQEKKSNTILGSQEGNTMKTNDTYMKFSWLTVPEKSLDKEHRCIVRHENNKNGVDQEIIFPPIKTDVITMDPKDADCGFTSESYQQGVLSATILYEILLGKATLYAVLVSALVLMAMVKRKDSRGKRGRKKLLYIFKQPFMRPVQTTQEEDGCSCRFPEEEEGGCELRVKFSRSADAPAYQQGQNQLYNELNLGRREEYDVLDKRRGRDPEMGGKPQRRKNPQEGLYNELQKDKMAEAYSEIGMKGERRRGKGHDGLYQGLSTATKDTYDALHMQALPPR

SEQ ID NO: 31681 - protein, 335 aa, synthetic construct
DKQLDADVSPKPTIFLPSIAETKLQKAGTYLCLLEKFFPDVIKIHWQEKKSNTILGSQEGNTMKTNDTYMKFSWLTVPEKSLDKEHRCIVRHENNKNGVDQEIIFPPIKTDVITMDPKDQIVSAEAWGRADCGFTSESYQQGVLSATILYEILLGKATLYAVLVSALVLMAMVKRKDSRGKRGRKKLLYIFKQPFMRPVQTTQEEDGCSCRFPEEEEGGCELRVKFSRSADAPAYQQGQNQLYNELNLGRREEYDVLDKRRGRDPEMGGKPQRRKNPQEGLYNELQKDKMAEAYSEIGMKGERRRGKGHDGLYQGLSTATKDTYDALHMQALPPR

SEQ ID NO: 31682 - protein, 342 aa, synthetic construct
DKQLDADVSPKPTIFLPSIAETKLQKAGTYLCLLEKFFPDVIKIHWQEKKSNTILGSQEGNTMKTNDTYMKFSWLTVPEKSLDKEHRCIVRHENNKNGVDQEIIFPPIKTDVITMDPKDEVKTDSTDHVKPKETENTKQPSKSCHKPKAIVHTEKVNMMSLTVLGLRMLFAKTVAVNFLLTAKLFFLKRGRKKLLYIFKQPFMRPVQTTQEEDGCSCRFPEEEEGGCELRVKFSRSADAPAYQQGQNQLYNELNLGRREEYDVLDKRRGRDPEMGGKPQRRKNPQEGLYNELQKDKMAEAYSEIGMKGERRRGKGHDGLYQGLSTATKDTYDALHMQALPPR

SEQ ID NO: 31683 - protein, 335 aa, synthetic construct
DKQLDADVSPKPTIFLPSIAETKLQKAGTYLCLLEKFFPDVIKIHWQEKKSNTILGSQEGNTMKTNDTYMKFSWLTVPEKSLDKEHRCIVRHENNKNGVDQEIIFPPIKTDVITMDPKDDHVKPKETENTKQPSKSCHKPKAIVHTEKVNMMSLTVLGLRMLFAKTVAVNFLLTAKLFFLKRGRKKLLYIFKQPFMRPVQTTQEEDGCSCRFPEEEEGGCELRVKFSRSADAPAYQQGQNQLYNELNLGRREEYDVLDKRRGRDPEMGGKPQRRKNPQEGLYNELQKDKMAEAYSEIGMKGERRRGKGHDGLYQGLSTATKDTYDALHMQALPPR

SEQ ID NO: 31684 - protein, 329 aa, synthetic construct; identical to SEQ ID NO: 31660

SEQ ID NO: 31685 - protein, 319 aa, synthetic construct; identical to SEQ ID NO: 31661

SEQ ID NO: 31686 - protein, 328 aa, synthetic construct; identical to SEQ ID NO: 31662

SEQ ID NO: 31687 - protein, 322 aa, synthetic construct; identical to SEQ ID NO: 31663

SEQ ID NO: 31688 - protein, 320 aa, synthetic construct; identical to SEQ ID NO: 31664

SEQ ID NO: 31689 - protein, 330 aa, synthetic construct; identical to SEQ ID NO: 31665

SEQ ID NO: 31690 - protein, 337 aa, synthetic construct; identical to SEQ ID NO: 31666

SEQ ID NO: 31691 - protein, 330 aa, synthetic construct; identical to SEQ ID NO: 31667

SEQ ID NO: 31692 - protein, 310 aa, synthetic construct
PKPTIFLPSIAETKLQKAGTYLCLLEKFFPDVIKIHWQEKKSNTILGSQEGNTMKTNDTYMKFSWLTVPEKSLDKEHRCIVRHENNKNGVDQEIIIPEDTFFPSPESSCDVKLVEKSFETDTNLNFQNLSVIGFRILLLKVAGFNLLMTLRLWSSKRGRKKLLYIFKQPFMRPVQTTQEEDGCSCRFPEEEEGGCELRVKFSRSADAPAYQQGQNQLYNELNLGRREEYDVLDKRRGRDPEMGGKPQRRKNPQEGLYNELQKDKMAEAYSEIGMKGERRRGKGHDGLYQGLSTATKDTYDALHMQALPPR

SEQ ID NO: 31693 - protein, 300 aa, synthetic construct
PKPTIFLPSIAETKLQKAGTYLCLLEKFFPDVIKIHWQEKKSNTILGSQEGNTMKTNDTYMKFSWLTVPEKSLDKEHRCIVRHENNKNGVDQEIIESSCDVKLVEKSFETDTNLNFQNLSVIGFRILLLKVAGFNLLMTLRLWSSKRGRKKLLYIFKQPFMRPVQTTQEEDGCSCRFPEEEEGGCELRVKFSRSADAPAYQQGQNQLYNELNLGRREEYDVLDKRRGRDPEMGGKPQRRKNPQEGLYNELQKDKMAEAYSEIGMKGERRRGKGHDGLYQGLSTATKDTYDALHMQALPPR

SEQ ID NO: 31694 - protein, 309 aa, synthetic construct
PKPTIFLPSIAETKLQKAGTYLCLLEKFFPDVIKIHWQEKKSNTILGSQEGNTMKTNDTYMKFSWLTVPEKSLDKEHRCIVRHENNKNGVDQEIIPEDTFFPSPESSCDVKLVEKSFETDTNLNFQNLSVIGFRILLLKVAGFNLLMTLRLWSSKRGRKKLLYIFKQPFMRPVQTTQEEDGCSCRFPEEEEGGCELRVKFSRSADAPAYQQGQNQLYNELNLGRREEYDVLDKRRGRDPEMGGKPQRRKNPQEGLYNELQKDKMAEAYSEIGMKGERRRGKGHDGLYQGLSTATKDTYDALHMQALPPR

SEQ ID NO: 31695 - protein, 303 aa, synthetic construct
PKPTIFLPSIAETKLQKAGTYLCLLEKFFPDVIKIHWQEKKSNTILGSQEGNTMKTNDTYMKFSWLTVPEKSLDKEHRCIVRHENNKNGVDQEIIGRADCGFTSESYQQGVLSATILYEILLGKATLYAVLVSALVLMAMVKRKDSRGKRGRKKLLYIFKQPFMRPVQTTQEEDGCSCRFPEEEEGGCELRVKFSRSADAPAYQQGQNQLYNELNLGRREEYDVLDKRRGRDPEMGGKPQRRKNPQEGLYNELQKDKMAEAYSEIGMKGERRRGKGHDGLYQGLSTATKDTYDALHMQALPPR

SEQ ID NO: 31696 - protein, 301 aa, synthetic construct
PKPTIFLPSIAETKLQKAGTYLCLLEKFFPDVIKIHWQEKKSNTILGSQEGNTMKTNDTYMKFSWLTVPEKSLDKEHRCIVRHENNKNGVDQEIIADCGFTSESYQQGVLSATILYEILLGKATLYAVLVSALVLMAMVKRKDSRGKRGRKKLLYIFKQPFMRPVQTTQEEDGCSCRFPEEEEGGCELRVKFSRSADAPAYQQGQNQLYNELNLGRREEYDVLDKRRGRDPEMGGKPQRRKNPQEGLYNELQKDKMAEAYSEIGMKGERRRGKGHDGLYQGLSTATKDTYDALHMQALPPR

SEQ ID NO: 31697 - protein, 311 aa, synthetic construct
PKPTIFLPSIAETKLQKAGTYLCLLEKFFPDVIKIHWQEKKSNTILGSQEGNTMKTNDTYMKFSWLTVPEKSLDKEHRCIVRHENNKNGVDQEIIQIVSAEAWGRADCGFTSESYQQGVLSATILYEILLGKATLYAVLVSALVLMAMVKRKDSRGKRGRKKLLYIFKQPFMRPVQTTQEEDGCSCRFPEEEEGGCELRVKFSRSADAPAYQQGQNQLYNELNLGRREEYDVLDKRRGRDPEMGGKPQRRKNPQEGLYNELQKDKMAEAYSEIGMKGERRRGKGHDGLYQGLSTATKDTYDALHMQALPPR

SEQ ID NO: 31698 - protein, 319 aa, synthetic construct; identical to SEQ ID NO: 31134

SEQ ID NO: 31699 - protein, 317 aa, synthetic construct
PKPTIFLPSIAETKLQKAGTYLCLLEKFFPDVIKIHWQEKKSNTILGSQEGNTMKTNDTYMKFSWLTVPEKSLDKEHRCIVRHENNKNGVDQEIIPIKTDVITMDPKDNCSKDANDTLLLQLTNTSAYYMYLLLLLKSVVYFAIITCCLLRRTAFCCNGEKSKRGRKKLLYIFKQPFMRPVQTTQEEDGCSCRFPEEEEGGCELRVKFSRSADAPAYQQGQNQLYNELNLGRREEYDVLDKRRGRDPEMGGKPQRRKNPQEGLYNELQKDKMAEAYSEIGMKGERRRGKGHDGLYQGLSTATKDTYDALHMQALPPR

SEQ ID NO: 31700 - protein, 309 aa, synthetic construct
PKPTIFLPSIAETKLQKAGTYLCLLEKFFPDVIKIHWQEKKSNTILGSQEGNTMKTNDTYMKFSWLTVPEKSLDKEHRCIVRHENNKNGVDQEIIMDPKDNCSKDANDTLLLQLTNTSAYYMYLLLLLKSVVYFAIITCCLLRRTAFCCNGEKSKRGRKKLLYIFKQPFMRPVQTTQEEDGCSCRFPEEEEGGCELRVKFSRSADAPAYQQGQNQLYNELNLGRREEYDVLDKRRGRDPEMGGKPQRRKNPQEGLYNELQKDKMAEAYSEIGMKGERRRGKGHDGLYQGLSTATKDTYDALHMQALPPR

SEQ ID NO: 31701 - protein, 317 aa, synthetic construct; identical to SEQ ID NO: 31699

SEQ ID NO: 31702 - protein, 303 aa, synthetic construct
PKPTIFLPSIAETKLQKAGTYLCLLEKFFPDVIKIHWQEKKSNTILGSQEGNTMKTNDTYMKFSWLTVPEKSLDKEHRCIVRHENNKNGVDQEIICSKDANDTLLLQLTNTSAYYMYLLLLLKSVVYFAIITCCLLRRTAFCCNGEKSKRGRKKLLYIFKQPFMRPVQTTQEEDGCSCRFPEEEEGGCELRVKFSRSADAPAYQQGQNQLYNELNLGRREEYDVLDKRRGRDPEMGGKPQRRKNPQEGLYNELQKDKMAEAYSEIGMKGERRRGKGHDGLYQGLSTATKDTYDALHMQALPPR

SEQ ID NO: 31703 - protein, 318 aa, synthetic construct
PKPTIFLPSIAETKLQKAGTYLCLLEKFFPDVIKIHWQEKKSNTILGSQEGNTMKTNDTYMKFSWLTVPEKSLDKEHRCIVRHENNKNGVDQEIIEVKTDSTDHVKPKETENTKQPSKSCHKPKAIVHTEKVNMMSLTVLGLRMLFAKTVAVNFLLTAKLFFLKRGRKKLLYIFKQPFMRPVQTTQEEDGCSCRFPEEEEGGCELRVKFSRSADAPAYQQGQNQLYNELNLGRREEYDVLDKRRGRDPEMGGKPQRRKNPQEGLYNELQKDKMAEAYSEIGMKGERRRGKGHDGLYQGLSTATKDTYDALHMQALPPR

SEQ ID NO: 31704 - protein, 311 aa, synthetic construct
PKPTIFLPSIAETKLQKAGTYLCLLEKFFPDVIKIHWQEKKSNTILGSQEGNTMKTNDTYMKFSWLTVPEKSLDKEHRCIVRHENNKNGVDQEIIDHVKPKETENTKQPSKSCHKPKAIVHTEKVNMMSLTVLGLRMLFAKTVAVNFLLTAKLFFLKRGRKKLLYIFKQPFMRPVQTTQEEDGCSCRFPEEEEGGCELRVKFSRSADAPAYQQGQNQLYNELNLGRREEYDVLDKRRGRDPEMGGKPQRRKNPQEGLYNELQKDKMAEAYSEIGMKGERRRGKGHDGLYQGLSTATKDTYDALHMQALPPR

SEQ ID NO: 31705 - protein, 300 aa, synthetic construct
SQPHTKPSVFVMKNGTNVACLVKEFYPKDIRINLVSSKKITEFDPAIVISPSGKYNAVKLGKYEDSNSVTCSVQHDNKTVHSTDFIPEDTFFPSPESSCDVKLVEKSFETDTNLNFQNLSVIGFRILLLKVAGFNLLMTLRLWSSKRGRKKLLYIFKQPFMRPVQTTQEEDGCSCRFPEEEEGGCELRVKFSRSADAPAYQQGQNQLYNELNLGRREEYDVLDKRRGRDPEMGGKPQRRKNPQEGLYNELQKDKMAEAYSEIGMKGERRRGKGHDGLYQGLSTATKDTYDALHMQALPPR

SEQ ID NO: 31706 - protein, 290 aa, synthetic construct
SQPHTKPSVFVMKNGTNVACLVKEFYPKDIRINLVSSKKITEFDPAIVISPSGKYNAVKLGKYEDSNSVTCSVQHDNKTVHSTDFESSCDVKLVEKSFETDTNLNFQNLSVIGFRILLLKVAGFNLLMTLRLWSSKRGRKKLLYIFKQPFMRPVQTTQEEDGCSCRFPEEEEGGCELRVKFSRSADAPAYQQGQNQLYNELNLGRREEYDVLDKRRGRDPEMGGKPQRRKNPQEGLYNELQKDKMAEAYSEIGMKGERRRGKGHDGLYQGLSTATKDTYDALHMQALPPR

SEQ ID NO: 31707 - protein, 299 aa, synthetic construct
SQPHTKPSVFVMKNGTNVACLVKEFYPKDIRINLVSSKKITEFDPAIVISPSGKYNAVKLGKYEDSNSVTCSVQHDNKTVHSTDFPEDTFFPSPESSCDVKLVEKSFETDTNLNFQNLSVIGFRILLLKVAGFNLLMTLRLWSSKRGRKKLLYIFKQPFMRPVQTTQEEDGCSCRFPEEEEGGCELRVKFSRSADAPAYQQGQNQLYNELNLGRREEYDVLDKRRGRDPEMGGKPQRRKNPQEGLYNELQKDKMAEAYSEIGMKGERRRGKGHDGLYQGLSTATKDTYDALHMQALPPR

SEQ ID NO: 31708 - protein, 293 aa, synthetic construct
SQPHTKPSVFVMKNGTNVACLVKEFYPKDIRINLVSSKKITEFDPAIVISPSGKYNAVKLGKYEDSNSVTCSVQHDNKTVHSTDFGRADCGFTSESYQQGVLSATILYEILLGKATLYAVLVSALVLMAMVKRKDSRGKRGRKKLLYIFKQPFMRPVQTTQEEDGCSCRFPEEEEGGCELRVKFSRSADAPAYQQGQNQLYNELNLGRREEYDVLDKRRGRDPEMGGKPQRRKNPQEGLYNELQKDKMAEAYSEIGMKGERRRGKGHDGLYQGLSTATKDTYDALHMQALPPR

SEQ ID NO: 31709 - protein, 291 aa, synthetic construct
SQPHTKPSVFVMKNGTNVACLVKEFYPKDIRINLVSSKKITEFDPAIVISPSGKYNAVKLGKYEDSNSVTCSVQHDNKTVHSTDFADCGFTSESYQQGVLSATILYEILLGKATLYAVLVSALVLMAMVKRKDSRGKRGRKKLLYIFKQPFMRPVQTTQEEDGCSCRFPEEEEGGCELRVKFSRSADAPAYQQGQNQLYNELNLGRREEYDVLDKRRGRDPEMGGKPQRRKNPQEGLYNELQKDKMAEAYSEIGMKGERRRGKGHDGLYQGLSTATKDTYDALHMQALPPR

SEQ ID NO: 31710 - protein, 301 aa, synthetic construct
SQPHTKPSVFVMKNGTNVACLVKEFYPKDIRINLVSSKKITEFDPAIVISPSGKYNAVKLGKYEDSNSVTCSVQHDNKTVHSTDFQIVSAEAWGRADCGFTSESYQQGVLSATILYEILLGKATLYAVLVSALVLMAMVKRKDSRGKRGRKKLLYIFKQPFMRPVQTTQEEDGCSCRFPEEEEGGCELRVKFSRSADAPAYQQGQNQLYNELNLGRREEYDVLDKRRGRDPEMGGKPQRRKNPQEGLYNELQKDKMAEAYSEIGMKGERRRGKGHDGLYQGLSTATKDTYDALHMQALPPR

SEQ ID NO: 31711 - protein, 309 aa, synthetic construct
SQPHTKPSVFVMKNGTNVACLVKEFYPKDIRINLVSSKKITEFDPAIVISPSGKYNAVKLGKYEDSNSVTCSVQHDNKTVHSTDFFPPIKTDVITMDPKDNCSKDANDTLLLQLTNTSAYYMYLLLLLKSVVYFAIITCCLLRRTAFCCNGEKSKRGRKKLLYIFKQPFMRPVQTTQEEDGCSCRFPEEEEGGCELRVKFSRSADAPAYQQGQNQLYNELNLGRREEYDVLDKRRGRDPEMGGKPQRRKNPQEGLYNELQKDKMAEAYSEIGMKGERRRGKGHDGLYQGLSTATKDTYDALHMQALPPR

SEQ ID NO: 31712 - protein, 307 aa, synthetic construct
SQPHTKPSVFVMKNGTNVACLVKEFYPKDIRINLVSSKKITEFDPAIVISPSGKYNAVKLGKYEDSNSVTCSVQHDNKTVHSTDFPIKTDVITMDPKDNCSKDANDTLLLQLTNTSAYYMYLLLLLKSVVYFAIITCCLLRRTAFCCNGEKSKRGRKKLLYIFKQPFMRPVQTTQEEDGCSCRFPEEEEGGCELRVKFSRSADAPAYQQGQNQLYNELNLGRREEYDVLDKRRGRDPEMGGKPQRRKNPQEGLYNELQKDKMAEAYSEIGMKGERRRGKGHDGLYQGLSTATKDTYDALHMQALPPR

SEQ ID NO: 31713 - protein, 299 aa, synthetic construct
SQPHTKPSVFVMKNGTNVACLVKEFYPKDIRINLVSSKKITEFDPAIVISPSGKYNAVKLGKYEDSNSVTCSVQHDNKTVHSTDFMDPKDNCSKDANDTLLLQLTNTSAYYMYLLLLLKSVVYFAIITCCLLRRTAFCCNGEKSKRGRKKLLYIFKQPFMRPVQTTQEEDGCSCRFPEEEEGGCELRVKFSRSADAPAYQQGQNQLYNELNLGRREEYDVLDKRRGRDPEMGGKPQRRKNPQEGLYNELQKDKMAEAYSEIGMKGERRRGKGHDGLYQGLSTATKDTYDALHMQALPPR

SEQ ID NO: 31714 - protein, 308 aa, synthetic construct; identical to SEQ ID NO: 30657

SEQ ID NO: 31715 - protein, 301 aa, synthetic construct
SQPHTKPSVFVMKNGTNVACLVKEFYPKDIRINLVSSKKITEFDPAIVISPSGKYNAVKLGKYEDSNSVTCSVQHDNKTVHSTDFDHVKPKETENTKQPSKSCHKPKAIVHTEKVNMMSLTVLGLRMLFAKTVAVNFLLTAKLFFLKRGRKKLLYIFKQPFMRPVQTTQEEDGCSCRFPEEEEGGCELRVKFSRSADAPAYQQGQNQLYNELNLGRREEYDVLDKRRGRDPEMGGKPQRRKNPQEGLYNELQKDKMAEAYSEIGMKGERRRGKGHDGLYQGLSTATKDTYDALHMQALPPR

SEQ ID NO: 31716 - protein, 307 aa, synthetic construct
SQPHTKPSVFVMKNGTNVACLVKEFYPKDIRINLVSSKKITEFDPAIVISPSGKYNAVKLGKYEDSNSVTCSVQHDNKTVHSTDFEVKTDSTIPEDTFFPSPESSCDVKLVEKSFETDTNLNFQNLSVIGFRILLLKVAGFNLLMTLRLWSSKRGRKKLLYIFKQPFMRPVQTTQEEDGCSCRFPEEEEGGCELRVKFSRSADAPAYQQGQNQLYNELNLGRREEYDVLDKRRGRDPEMGGKPQRRKNPQEGLYNELQKDKMAEAYSEIGMKGERRRGKGHDGLYQGLSTATKDTYDALHMQALPPR

SEQ ID NO: 31717 - protein, 297 aa, synthetic construct
SQPHTKPSVFVMKNGTNVACLVKEFYPKDIRINLVSSKKITEFDPAIVISPSGKYNAVKLGKYEDSNSVTCSVQHDNKTVHSTDFEVKTDSTESSCDVKLVEKSFETDTNLNFQNLSVIGFRILLLKVAGFNLLMTLRLWSSKRGRKKLLYIFKQPFMRPVQTTQEEDGCSCRFPEEEEGGCELRVKFSRSADAPAYQQGQNQLYNELNLGRREEYDVLDKRRGRDPEMGGKPQRRKNPQEGLYNELQKDKMAEAYSEIGMKGERRRGKGHDGLYQGLSTATKDTYDALHMQALPPR

SEQ ID NO: 31718 - protein, 306 aa, synthetic construct
SQPHTKPSVFVMKNGTNVACLVKEFYPKDIRINLVSSKKITEFDPAIVISPSGKYNAVKLGKYEDSNSVTCSVQHDNKTVHSTDFEVKTDSTPEDTFFPSPESSCDVKLVEKSFETDTNLNFQNLSVIGFRILLLKVAGFNLLMTLRLWSSKRGRKKLLYIFKQPFMRPVQTTQEEDGCSCRFPEEEEGGCELRVKFSRSADAPAYQQGQNQLYNELNLGRREEYDVLDKRRGRDPEMGGKPQRRKNPQEGLYNELQKDKMAEAYSEIGMKGERRRGKGHDGLYQGLSTATKDTYDALHMQALPPR

SEQ ID NO: 31719 - protein, 300 aa, synthetic construct
SQPHTKPSVFVMKNGTNVACLVKEFYPKDIRINLVSSKKITEFDPAIVISPSGKYNAVKLGKYEDSNSVTCSVQHDNKTVHSTDFEVKTDSTGRADCGFTSESYQQGVLSATILYEILLGKATLYAVLVSALVLMAMVKRKDSRGKRGRKKLLYIFKQPFMRPVQTTQEEDGCSCRFPEEEEGGCELRVKFSRSADAPAYQQGQNQLYNELNLGRREEYDVLDKRRGRDPEMGGKPQRRKNPQEGLYNELQKDKMAEAYSEIGMKGERRRGKGHDGLYQGLSTATKDTYDALHMQALPPR

SEQ ID NO: 31720 - protein, 298 aa, synthetic construct
SQPHTKPSVFVMKNGTNVACLVKEFYPKDIRINLVSSKKITEFDPAIVISPSGKYNAVKLGKYEDSNSVTCSVQHDNKTVHSTDFEVKTDSTADCGFTSESYQQGVLSATILYEILLGKATLYAVLVSALVLMAMVKRKDSRGKRGRKKLLYIFKQPFMRPVQTTQEEDGCSCRFPEEEEGGCELRVKFSRSADAPAYQQGQNQLYNELNLGRREEYDVLDKRRGRDPEMGGKPQRRKNPQEGLYNELQKDKMAEAYSEIGMKGERRRGKGHDGLYQGLSTATKDTYDALHMQALPPR

SEQ ID NO: 31721 - protein, 308 aa, synthetic construct
SQPHTKPSVFVMKNGTNVACLVKEFYPKDIRINLVSSKKITEFDPAIVISPSGKYNAVKLGKYEDSNSVTCSVQHDNKTVHSTDFEVKTDSTQIVSAEAWGRADCGFTSESYQQGVLSATILYEILLGKATLYAVLVSALVLMAMVKRKDSRGKRGRKKLLYIFKQPFMRPVQTTQEEDGCSCRFPEEEEGGCELRVKFSRSADAPAYQQGQNQLYNELNLGRREEYDVLDKRRGRDPEMGGKPQRRKNPQEGLYNELQKDKMAEAYSEIGMKGERRRGKGHDGLYQGLSTATKDTYDALHMQALPPR

SEQ ID NO: 31722 - protein, 316 aa, synthetic construct
SQPHTKPSVFVMKNGTNVACLVKEFYPKDIRINLVSSKKITEFDPAIVISPSGKYNAVKLGKYEDSNSVTCSVQHDNKTVHSTDFEVKTDSTFPPIKTDVITMDPKDNCSKDANDTLLLQLTNTSAYYMYLLLLLKSVVYFAIITCCLLRRTAFCCNGEKSKRGRKKLLYIFKQPFMRPVQTTQEEDGCSCRFPEEEEGGCELRVKFSRSADAPAYQQGQNQLYNELNLGRREEYDVLDKRRGRDPEMGGKPQRRKNPQEGLYNELQKDKMAEAYSEIGMKGERRRGKGHDGLYQGLSTATKDTYDALHMQALPPR

SEQ ID NO: 31723 - protein, 314 aa, synthetic construct
SQPHTKPSVFVMKNGTNVACLVKEFYPKDIRINLVSSKKITEFDPAIVISPSGKYNAVKLGKYEDSNSVTCSVQHDNKTVHSTDFEVKTDSTPIKTDVITMDPKDNCSKDANDTLLLQLTNTSAYYMYLLLLLKSVVYFAIITCCLLRRTAFCCNGEKSKRGRKKLLYIFKQPFMRPVQTTQEEDGCSCRFPEEEEGGCELRVKFSRSADAPAYQQGQNQLYNELNLGRREEYDVLDKRRGRDPEMGGKPQRRKNPQEGLYNELQKDKMAEAYSEIGMKGERRRGKGHDGLYQGLSTATKDTYDALHMQALPPR

SEQ ID NO: 31724 - protein, 306 aa, synthetic construct
SQPHTKPSVFVMKNGTNVACLVKEFYPKDIRINLVSSKKITEFDPAIVISPSGKYNAVKLGKYEDSNSVTCSVQHDNKTVHSTDFEVKTDSTMDPKDNCSKDANDTLLLQLTNTSAYYMYLLLLLKSVVYFAIITCCLLRRTAFCCNGEKSKRGRKKLLYIFKQPFMRPVQTTQEEDGCSCRFPEEEEGGCELRVKFSRSADAPAYQQGQNQLYNELNLGRREEYDVLDKRRGRDPEMGGKPQRRKNPQEGLYNELQKDKMAEAYSEIGMKGERRRGKGHDGLYQGLSTATKDTYDALHMQALPPR

SEQ ID NO: 31725 - protein, 314 aa, synthetic construct; identical to SEQ ID NO: 31723

SEQ ID NO: 31726 - protein, 300 aa, synthetic construct
SQPHTKPSVFVMKNGTNVACLVKEFYPKDIRINLVSSKKITEFDPAIVISPSGKYNAVKLGKYEDSNSVTCSVQHDNKTVHSTDFEVKTDSTCSKDANDTLLLQLTNTSAYYMYLLLLLKSVVYFAIITCCLLRRTAFCCNGEKSKRGRKKLLYIFKQPFMRPVQTTQEEDGCSCRFPEEEEGGCELRVKFSRSADAPAYQQGQNQLYNELNLGRREEYDVLDKRRGRDPEMGGKPQRRKNPQEGLYNELQKDKMAEAYSEIGMKGERRRGKGHDGLYQGLSTATKDTYDALHMQALPPR

SEQ ID NO: 31727 - protein, 300 aa, synthetic construct; identical to SEQ ID NO: 31705

SEQ ID NO: 31728 - protein, 290 aa, synthetic construct; identical to SEQ ID NO: 31706

SEQ ID NO: 31729 - protein, 299 aa, synthetic construct; identical to SEQ ID NO: 31707

SEQ ID NO: 31730 - protein, 293 aa, synthetic construct; identical to SEQ ID NO: 31708

SEQ ID NO: 31731 - protein, 291 aa, synthetic construct; identical to SEQ ID NO: 31709

SEQ ID NO: 31732 - protein, 301 aa, synthetic construct; identical to SEQ ID NO: 31710

SEQ ID NO: 31733 - protein, 309 aa, synthetic construct; identical to SEQ ID NO: 31711

SEQ ID NO: 31734 - protein, 307 aa, synthetic construct; identical to SEQ ID NO: 31712

SEQ ID NO: 31735 - protein, 299 aa, synthetic construct; identical to SEQ ID NO: 31713

SEQ ID NO: 31736 - protein, 307 aa, synthetic construct; identical to SEQ ID NO: 31712

SEQ ID NO: 31737 - protein, 293 aa, synthetic construct
SQPHTKPSVFVMKNGTNVACLVKEFYPKDIRINLVSSKKITEFDPAIVISPSGKYNAVKLGKYEDSNSVTCSVQHDNKTVHSTDFCSKDANDTLLLQLTNTSAYYMYLLLLLKSVVYFAIITCCLLRRTAFCCNGEKSKRGRKKLLYIFKQPFMRPVQTTQEEDGCSCRFPEEEEGGCELRVKFSRSADAPAYQQGQNQLYNELNLGRREEYDVLDKRRGRDPEMGGKPQRRKNPQEGLYNELQKDKMAEAYSEIGMKGERRRGKGHDGLYQGLSTATKDTYDALHMQALPPR

SEQ ID NO: 31738 - protein, 307 aa, synthetic construct; identical to SEQ ID NO: 31716

SEQ ID NO: 31739 - protein, 297 aa, synthetic construct; identical to SEQ ID NO: 31717

SEQ ID NO: 31740 - protein, 306 aa, synthetic construct; identical to SEQ ID NO: 31718

SEQ ID NO: 31741 - protein, 300 aa, synthetic construct; identical to SEQ ID NO: 31719

SEQ ID NO: 31742 - protein, 298 aa, synthetic construct; identical to SEQ ID NO: 31720

SEQ ID NO: 31743 - protein, 308 aa, synthetic construct; identical to SEQ ID NO: 31721

SEQ ID NO: 31744 - protein, 316 aa, synthetic construct; identical to SEQ ID NO: 31722

SEQ ID NO: 31745 - protein, 314 aa, synthetic construct; identical to SEQ ID NO: 31723

SEQ ID NO: 31746 - protein, 306 aa, synthetic construct; identical to SEQ ID NO: 31724

SEQ ID NO: 31747 - protein, 314 aa, synthetic construct; identical to SEQ ID NO: 31723

SEQ ID NO: 31748 - protein, 300 aa, synthetic construct; identical to SEQ ID NO: 31726

SEQ ID NO: 31749 - protein, 278 aa, synthetic construct
LRDSKSSDKSVCLFTDFDSQTNVSQSKDSDVYITDKTVLDMRSMDFKSNSAVAWSNKSDFACANAFNNSIGRADCGFTSESYQQGVLSATILYEILLGKATLYAVLVSALVLMAMVKRKDSRGKRGRKKLLYIFKQPFMRPVQTTQEEDGCSCRFPEEEEGGCELRVKFSRSADAPAYQQGQNQLYNELNLGRREEYDVLDKRRGRDPEMGGKPQRRKNPQEGLYNELQKDKMAEAYSEIGMKGERRRGKGHDGLYQGLSTATKDTYDALHMQALPPR

SEQ ID NO: 31750 - protein, 276 aa, synthetic construct
LRDSKSSDKSVCLFTDFDSQTNVSQSKDSDVYITDKTVLDMRSMDFKSNSAVAWSNKSDFACANAFNNSIADCGFTSESYQQGVLSATILYEILLGKATLYAVLVSALVLMAMVKRKDSRGKRGRKKLLYIFKQPFMRPVQTTQEEDGCSCRFPEEEEGGCELRVKFSRSADAPAYQQGQNQLYNELNLGRREEYDVLDKRRGRDPEMGGKPQRRKNPQEGLYNELQKDKMAEAYSEIGMKGERRRGKGHDGLYQGLSTATKDTYDALHMQALPPR

SEQ ID NO: 31751 - protein, 286 aa, synthetic construct
LRDSKSSDKSVCLFTDFDSQTNVSQSKDSDVYITDKTVLDMRSMDFKSNSAVAWSNKSDFACANAFNNSIQIVSAEAWGRADCGFTSESYQQGVLSATILYEILLGKATLYAVLVSALVLMAMVKRKDSRGKRGRKKLLYIFKQPFMRPVQTTQEEDGCSCRFPEEEEGGCELRVKFSRSADAPAYQQGQNQLYNELNLGRREEYDVLDKRRGRDPEMGGKPQRRKNPQEGLYNELQKDKMAEAYSEIGMKGERRRGKGHDGLYQGLSTATKDTYDALHMQALPPR

SEQ ID NO: 31752 - protein, 294 aa, synthetic construct
LRDSKSSDKSVCLFTDFDSQTNVSQSKDSDVYITDKTVLDMRSMDFKSNSAVAWSNKSDFACANAFNNSIFPPIKTDVITMDPKDNCSKDANDTLLLQLTNTSAYYMYLLLLLKSVVYFAIITCCLLRRTAFCCNGEKSKRGRKKLLYIFKQPFMRPVQTTQEEDGCSCRFPEEEEGGCELRVKFSRSADAPAYQQGQNQLYNELNLGRREEYDVLDKRRGRDPEMGGKPQRRKNPQEGLYNELQKDKMAEAYSEIGMKGERRRGKGHDGLYQGLSTATKDTYDALHMQALPPR

SEQ ID NO: 31753 - protein, 292 aa, synthetic construct
LRDSKSSDKSVCLFTDFDSQTNVSQSKDSDVYITDKTVLDMRSMDFKSNSAVAWSNKSDFACANAFNNSIPIKTDVITMDPKDNCSKDANDTLLLQLTNTSAYYMYLLLLLKSVVYFAIITCCLLRRTAFCCNGEKSKRGRKKLLYIFKQPFMRPVQTTQEEDGCSCRFPEEEEGGCELRVKFSRSADAPAYQQGQNQLYNELNLGRREEYDVLDKRRGRDPEMGGKPQRRKNPQEGLYNELQKDKMAEAYSEIGMKGERRRGKGHDGLYQGLSTATKDTYDALHMQALPPR

SEQ ID NO: 31754 - protein, 284 aa, synthetic construct
LRDSKSSDKSVCLFTDFDSQTNVSQSKDSDVYITDKTVLDMRSMDFKSNSAVAWSNKSDFACANAFNNSIMDPKDNCSKDANDTLLLQLTNTSAYYMYLLLLLKSVVYFAIITCCLLRRTAFCCNGEKSKRGRKKLLYIFKQPFMRPVQTTQEEDGCSCRFPEEEEGGCELRVKFSRSADAPAYQQGQNQLYNELNLGRREEYDVLDKRRGRDPEMGGKPQRRKNPQEGLYNELQKDKMAEAYSEIGMKGERRRGKGHDGLYQGLSTATKDTYDALHMQALPPR

SEQ ID NO: 31755 - protein, 292 aa, synthetic construct; identical to SEQ ID NO: 31753

SEQ ID NO: 31756 - protein, 278 aa, synthetic construct
LRDSKSSDKSVCLFTDFDSQTNVSQSKDSDVYITDKTVLDMRSMDFKSNSAVAWSNKSDFACANAFNNSICSKDANDTLLLQLTNTSAYYMYLLLLLKSVVYFAIITCCLLRRTAFCCNGEKSKRGRKKLLYIFKQPFMRPVQTTQEEDGCSCRFPEEEEGGCELRVKFSRSADAPAYQQGQNQLYNELNLGRREEYDVLDKRRGRDPEMGGKPQRRKNPQEGLYNELQKDKMAEAYSEIGMKGERRRGKGHDGLYQGLSTATKDTYDALHMQALPPR

SEQ ID NO: 31757 - protein, 293 aa, synthetic construct
LRDSKSSDKSVCLFTDFDSQTNVSQSKDSDVYITDKTVLDMRSMDFKSNSAVAWSNKSDFACANAFNNSIEVKTDSTDHVKPKETENTKQPSKSCHKPKAIVHTEKVNMMSLTVLGLRMLFAKTVAVNFLLTAKLFFLKRGRKKLLYIFKQPFMRPVQTTQEEDGCSCRFPEEEEGGCELRVKFSRSADAPAYQQGQNQLYNELNLGRREEYDVLDKRRGRDPEMGGKPQRRKNPQEGLYNELQKDKMAEAYSEIGMKGERRRGKGHDGLYQGLSTATKDTYDALHMQALPPR

SEQ ID NO: 31758 - protein, 286 aa, synthetic construct
LRDSKSSDKSVCLFTDFDSQTNVSQSKDSDVYITDKTVLDMRSMDFKSNSAVAWSNKSDFACANAFNNSIDHVKPKETENTKQPSKSCHKPKAIVHTEKVNMMSLTVLGLRMLFAKTVAVNFLLTAKLFFLKRGRKKLLYIFKQPFMRPVQTTQEEDGCSCRFPEEEEGGCELRVKFSRSADAPAYQQGQNQLYNELNLGRREEYDVLDKRRGRDPEMGGKPQRRKNPQEGLYNELQKDKMAEAYSEIGMKGERRRGKGHDGLYQGLSTATKDTYDALHMQALPPR

SEQ ID NO: 31759 - protein, 288 aa, synthetic construct
LRDSKSSDKSVCLFTDFDSQTNVSQSKDSDVYITDKTVLDMRSMDFKSNSAVAWSNKSDFACANAFNNSIIPEDTFFPSPGRADCGFTSESYQQGVLSATILYEILLGKATLYAVLVSALVLMAMVKRKDSRGKRGRKKLLYIFKQPFMRPVQTTQEEDGCSCRFPEEEEGGCELRVKFSRSADAPAYQQGQNQLYNELNLGRREEYDVLDKRRGRDPEMGGKPQRRKNPQEGLYNELQKDKMAEAYSEIGMKGERRRGKGHDGLYQGLSTATKDTYDALHMQALPPR

SEQ ID NO: 31760 - protein, 286 aa, synthetic construct
LRDSKSSDKSVCLFTDFDSQTNVSQSKDSDVYITDKTVLDMRSMDFKSNSAVAWSNKSDFACANAFNNSIIPEDTFFPSPADCGFTSESYQQGVLSATILYEILLGKATLYAVLVSALVLMAMVKRKDSRGKRGRKKLLYIFKQPFMRPVQTTQEEDGCSCRFPEEEEGGCELRVKFSRSADAPAYQQGQNQLYNELNLGRREEYDVLDKRRGRDPEMGGKPQRRKNPQEGLYNELQKDKMAEAYSEIGMKGERRRGKGHDGLYQGLSTATKDTYDALHMQALPPR

SEQ ID NO: 31761 - protein, 296 aa, synthetic construct
LRDSKSSDKSVCLFTDFDSQTNVSQSKDSDVYITDKTVLDMRSMDFKSNSAVAWSNKSDFACANAFNNSIIPEDTFFPSPQIVSAEAWGRADCGFTSESYQQGVLSATILYEILLGKATLYAVLVSALVLMAMVKRKDSRGKRGRKKLLYIFKQPFMRPVQTTQEEDGCSCRFPEEEEGGCELRVKFSRSADAPAYQQGQNQLYNELNLGRREEYDVLDKRRGRDPEMGGKPQRRKNPQEGLYNELQKDKMAEAYSEIGMKGERRRGKGHDGLYQGLSTATKDTYDALHMQALPPR

SEQ ID NO: 31762 - protein, 304 aa, synthetic construct
LRDSKSSDKSVCLFTDFDSQTNVSQSKDSDVYITDKTVLDMRSMDFKSNSAVAWSNKSDFACANAFNNSIIPEDTFFPSPFPPIKTDVITMDPKDNCSKDANDTLLLQLTNTSAYYMYLLLLLKSVVYFAIITCCLLRRTAFCCNGEKSKRGRKKLLYIFKQPFMRPVQTTQEEDGCSCRFPEEEEGGCELRVKFSRSADAPAYQQGQNQLYNELNLGRREEYDVLDKRRGRDPEMGGKPQRRKNPQEGLYNELQKDKMAEAYSEIGMKGERRRGKGHDGLYQGLSTATKDTYDALHMQALPPR

SEQ ID NO: 31763 - protein, 302 aa, synthetic construct
LRDSKSSDKSVCLFTDFDSQTNVSQSKDSDVYITDKTVLDMRSMDFKSNSAVAWSNKSDFACANAFNNSIIPEDTFFPSPPIKTDVITMDPKDNCSKDANDTLLLQLTNTSAYYMYLLLLLKSVVYFAIITCCLLRRTAFCCNGEKSKRGRKKLLYIFKQPFMRPVQTTQEEDGCSCRFPEEEEGGCELRVKFSRSADAPAYQQGQNQLYNELNLGRREEYDVLDKRRGRDPEMGGKPQRRKNPQEGLYNELQKDKMAEAYSEIGMKGERRRGKGHDGLYQGLSTATKDTYDALHMQALPPR

SEQ ID NO: 31764 - protein, 294 aa, synthetic construct
LRDSKSSDKSVCLFTDFDSQTNVSQSKDSDVYITDKTVLDMRSMDFKSNSAVAWSNKSDFACANAFNNSIIPEDTFFPSPMDPKDNCSKDANDTLLLQLTNTSAYYMYLLLLLKSVVYFAIITCCLLRRTAFCCNGEKSKRGRKKLLYIFKQPFMRPVQTTQEEDGCSCRFPEEEEGGCELRVKFSRSADAPAYQQGQNQLYNELNLGRREEYDVLDKRRGRDPEMGGKPQRRKNPQEGLYNELQKDKMAEAYSEIGMKGERRRGKGHDGLYQGLSTATKDTYDALHMQALPPR

SEQ ID NO: 31765 - protein, 302 aa, synthetic construct; identical to SEQ ID NO: 31763

SEQ ID NO: 31766 - protein, 288 aa, synthetic construct
LRDSKSSDKSVCLFTDFDSQTNVSQSKDSDVYITDKTVLDMRSMDFKSNSAVAWSNKSDFACANAFNNSIIPEDTFFPSPCSKDANDTLLLQLTNTSAYYMYLLLLLKSVVYFAIITCCLLRRTAFCCNGEKSKRGRKKLLYIFKQPFMRPVQTTQEEDGCSCRFPEEEEGGCELRVKFSRSADAPAYQQGQNQLYNELNLGRREEYDVLDKRRGRDPEMGGKPQRRKNPQEGLYNELQKDKMAEAYSEIGMKGERRRGKGHDGLYQGLSTATKDTYDALHMQALPPR

SEQ ID NO: 31767 - protein, 303 aa, synthetic construct
LRDSKSSDKSVCLFTDFDSQTNVSQSKDSDVYITDKTVLDMRSMDFKSNSAVAWSNKSDFACANAFNNSIIPEDTFFPSPEVKTDSTDHVKPKETENTKQPSKSCHKPKAIVHTEKVNMMSLTVLGLRMLFAKTVAVNFLLTAKLFFLKRGRKKLLYIFKQPFMRPVQTTQEEDGCSCRFPEEEEGGCELRVKFSRSADAPAYQQGQNQLYNELNLGRREEYDVLDKRRGRDPEMGGKPQRRKNPQEGLYNELQKDKMAEAYSEIGMKGERRRGKGHDGLYQGLSTATKDTYDALHMQALPPR

SEQ ID NO: 31768 - protein, 296 aa, synthetic construct
LRDSKSSDKSVCLFTDFDSQTNVSQSKDSDVYITDKTVLDMRSMDFKSNSAVAWSNKSDFACANAFNNSIIPEDTFFPSPDHVKPKETENTKQPSKSCHKPKAIVHTEKVNMMSLTVLGLRMLFAKTVAVNFLLTAKLFFLKRGRKKLLYIFKQPFMRPVQTTQEEDGCSCRFPEEEEGGCELRVKFSRSADAPAYQQGQNQLYNELNLGRREEYDVLDKRRGRDPEMGGKPQRRKNPQEGLYNELQKDKMAEAYSEIGMKGERRRGKGHDGLYQGLSTATKDTYDALHMQALPPR

SEQ ID NO: 31769 - protein, 292 aa, synthetic construct
LRDSKSSDKSVCLFTDFDSQTNVSQSKDSDVYITDKTVLDMRSMDFKSNSAVAWSNKSDFACANAFNNSIIPEDTFFPSPESSCGRADCGFTSESYQQGVLSATILYEILLGKATLYAVLVSALVLMAMVKRKDSRGKRGRKKLLYIFKQPFMRPVQTTQEEDGCSCRFPEEEEGGCELRVKFSRSADAPAYQQGQNQLYNELNLGRREEYDVLDKRRGRDPEMGGKPQRRKNPQEGLYNELQKDKMAEAYSEIGMKGERRRGKGHDGLYQGLSTATKDTYDALHMQALPPR

SEQ ID NO: 31770 - protein, 290 aa, synthetic construct
LRDSKSSDKSVCLFTDFDSQTNVSQSKDSDVYITDKTVLDMRSMDFKSNSAVAWSNKSDFACANAFNNSIIPEDTFFPSPESSCADCGFTSESYQQGVLSATILYEILLGKATLYAVLVSALVLMAMVKRKDSRGKRGRKKLLYIFKQPFMRPVQTTQEEDGCSCRFPEEEEGGCELRVKFSRSADAPAYQQGQNQLYNELNLGRREEYDVLDKRRGRDPEMGGKPQRRKNPQEGLYNELQKDKMAEAYSEIGMKGERRRGKGHDGLYQGLSTATKDTYDALHMQALPPR

SEQ ID NO: 31771 - protein, 300 aa, synthetic construct
LRDSKSSDKSVCLFTDFDSQTNVSQSKDSDVYITDKTVLDMRSMDFKSNSAVAWSNKSDFACANAFNNSIIPEDTFFPSPESSCQIVSAEAWGRADCGFTSESYQQGVLSATILYEILLGKATLYAVLVSALVLMAMVKRKDSRGKRGRKKLLYIFKQPFMRPVQTTQEEDGCSCRFPEEEEGGCELRVKFSRSADAPAYQQGQNQLYNELNLGRREEYDVLDKRRGRDPEMGGKPQRRKNPQEGLYNELQKDKMAEAYSEIGMKGERRRGKGHDGLYQGLSTATKDTYDALHMQALPPR

SEQ ID NO: 31772 - protein, 308 aa, synthetic construct
LRDSKSSDKSVCLFTDFDSQTNVSQSKDSDVYITDKTVLDMRSMDFKSNSAVAWSNKSDFACANAFNNSIIPEDTFFPSPESSCFPPIKTDVITMDPKDNCSKDANDTLLLQLTNTSAYYMYLLLLLKSVVYFAIITCCLLRRTAFCCNGEKSKRGRKKLLYIFKQPFMRPVQTTQEEDGCSCRFPEEEEGGCELRVKFSRSADAPAYQQGQNQLYNELNLGRREEYDVLDKRRGRDPEMGGKPQRRKNPQEGLYNELQKDKMAEAYSEIGMKGERRRGKGHDGLYQGLSTATKDTYDALHMQALPPR

SEQ ID NO: 31773 - protein, 306 aa, synthetic construct
LRDSKSSDKSVCLFTDFDSQTNVSQSKDSDVYITDKTVLDMRSMDFKSNSAVAWSNKSDFACANAFNNSIIPEDTFFPSPESSCPIKTDVITMDPKDNCSKDANDTLLLQLTNTSAYYMYLLLLLKSVVYFAIITCCLLRRTAFCCNGEKSKRGRKKLLYIFKQPFMRPVQTTQEEDGCSCRFPEEEEGGCELRVKFSRSADAPAYQQGQNQLYNELNLGRREEYDVLDKRRGRDPEMGGKPQRRKNPQEGLYNELQKDKMAEAYSEIGMKGERRRGKGHDGLYQGLSTATKDTYDALHMQALPPR

SEQ ID NO: 31774 - protein, 298 aa, synthetic construct
LRDSKSSDKSVCLFTDFDSQTNVSQSKDSDVYITDKTVLDMRSMDFKSNSAVAWSNKSDFACANAFNNSIIPEDTFFPSPESSCMDPKDNCSKDANDTLLLQLTNTSAYYMYLLLLLKSVVYFAIITCCLLRRTAFCCNGEKSKRGRKKLLYIFKQPFMRPVQTTQEEDGCSCRFPEEEEGGCELRVKFSRSADAPAYQQGQNQLYNELNLGRREEYDVLDKRRGRDPEMGGKPQRRKNPQEGLYNELQKDKMAEAYSEIGMKGERRRGKGHDGLYQGLSTATKDTYDALHMQALPPR

SEQ ID NO: 31775 - protein, 306 aa, synthetic construct; identical to SEQ ID NO: 31773

SEQ ID NO: 31776 - protein, 292 aa, synthetic construct
LRDSKSSDKSVCLFTDFDSQTNVSQSKDSDVYITDKTVLDMRSMDFKSNSAVAWSNKSDFACANAFNNSIIPEDTFFPSPESSCCSKDANDTLLLQLTNTSAYYMYLLLLLKSVVYFAIITCCLLRRTAFCCNGEKSKRGRKKLLYIFKQPFMRPVQTTQEEDGCSCRFPEEEEGGCELRVKFSRSADAPAYQQGQNQLYNELNLGRREEYDVLDKRRGRDPEMGGKPQRRKNPQEGLYNELQKDKMAEAYSEIGMKGERRRGKGHDGLYQGLSTATKDTYDALHMQALPPR

SEQ ID NO: 31777 - protein, 307 aa, synthetic construct
LRDSKSSDKSVCLFTDFDSQTNVSQSKDSDVYITDKTVLDMRSMDFKSNSAVAWSNKSDFACANAFNNSIIPEDTFFPSPESSCEVKTDSTDHVKPKETENTKQPSKSCHKPKAIVHTEKVNMMSLTVLGLRMLFAKTVAVNFLLTAKLFFLKRGRKKLLYIFKQPFMRPVQTTQEEDGCSCRFPEEEEGGCELRVKFSRSADAPAYQQGQNQLYNELNLGRREEYDVLDKRRGRDPEMGGKPQRRKNPQEGLYNELQKDKMAEAYSEIGMKGERRRGKGHDGLYQGLSTATKDTYDALHMQALPPR

SEQ ID NO: 31778 - protein, 300 aa, synthetic construct
LRDSKSSDKSVCLFTDFDSQTNVSQSKDSDVYITDKTVLDMRSMDFKSNSAVAWSNKSDFACANAFNNSIIPEDTFFPSPESSCDHVKPKETENTKQPSKSCHKPKAIVHTEKVNMMSLTVLGLRMLFAKTVAVNFLLTAKLFFLKRGRKKLLYIFKQPFMRPVQTTQEEDGCSCRFPEEEEGGCELRVKFSRSADAPAYQQGQNQLYNELNLGRREEYDVLDKRRGRDPEMGGKPQRRKNPQEGLYNELQKDKMAEAYSEIGMKGERRRGKGHDGLYQGLSTATKDTYDALHMQALPPR

SEQ ID NO: 31779 - protein, 279 aa, synthetic construct
LRDSKSSDKSVCLFTDFDSQTNVSQSKDSDVYITDKTVLDMRSMDFKSNSAVAWSNKSDFACANAFNNSIIGRADCGFTSESYQQGVLSATILYEILLGKATLYAVLVSALVLMAMVKRKDSRGKRGRKKLLYIFKQPFMRPVQTTQEEDGCSCRFPEEEEGGCELRVKFSRSADAPAYQQGQNQLYNELNLGRREEYDVLDKRRGRDPEMGGKPQRRKNPQEGLYNELQKDKMAEAYSEIGMKGERRRGKGHDGLYQGLSTATKDTYDALHMQALPPR

SEQ ID NO: 31780 - protein, 277 aa, synthetic construct
LRDSKSSDKSVCLFTDFDSQTNVSQSKDSDVYITDKTVLDMRSMDFKSNSAVAWSNKSDFACANAFNNSIIADCGFTSESYQQGVLSATILYEILLGKATLYAVLVSALVLMAMVKRKDSRGKRGRKKLLYIFKQPFMRPVQTTQEEDGCSCRFPEEEEGGCELRVKFSRSADAPAYQQGQNQLYNELNLGRREEYDVLDKRRGRDPEMGGKPQRRKNPQEGLYNELQKDKMAEAYSEIGMKGERRRGKGHDGLYQGLSTATKDTYDALHMQALPPR

SEQ ID NO: 31781 - protein, 287 aa, synthetic construct
LRDSKSSDKSVCLFTDFDSQTNVSQSKDSDVYITDKTVLDMRSMDFKSNSAVAWSNKSDFACANAFNNSIIQIVSAEAWGRADCGFTSESYQQGVLSATILYEILLGKATLYAVLVSALVLMAMVKRKDSRGKRGRKKLLYIFKQPFMRPVQTTQEEDGCSCRFPEEEEGGCELRVKFSRSADAPAYQQGQNQLYNELNLGRREEYDVLDKRRGRDPEMGGKPQRRKNPQEGLYNELQKDKMAEAYSEIGMKGERRRGKGHDGLYQGLSTATKDTYDALHMQALPPR

SEQ ID NO: 31782 - protein, 295 aa, synthetic construct
LRDSKSSDKSVCLFTDFDSQTNVSQSKDSDVYITDKTVLDMRSMDFKSNSAVAWSNKSDFACANAFNNSIIFPPIKTDVITMDPKDNCSKDANDTLLLQLTNTSAYYMYLLLLLKSVVYFAIITCCLLRRTAFCCNGEKSKRGRKKLLYIFKQPFMRPVQTTQEEDGCSCRFPEEEEGGCELRVKFSRSADAPAYQQGQNQLYNELNLGRREEYDVLDKRRGRDPEMGGKPQRRKNPQEGLYNELQKDKMAEAYSEIGMKGERRRGKGHDGLYQGLSTATKDTYDALHMQALPPR

SEQ ID NO: 31783 - protein, 293 aa, synthetic construct
LRDSKSSDKSVCLFTDFDSQTNVSQSKDSDVYITDKTVLDMRSMDFKSNSAVAWSNKSDFACANAFNNSIIPIKTDVITMDPKDNCSKDANDTLLLQLTNTSAYYMYLLLLLKSVVYFAIITCCLLRRTAFCCNGEKSKRGRKKLLYIFKQPFMRPVQTTQEEDGCSCRFPEEEEGGCELRVKFSRSADAPAYQQGQNQLYNELNLGRREEYDVLDKRRGRDPEMGGKPQRRKNPQEGLYNELQKDKMAEAYSEIGMKGERRRGKGHDGLYQGLSTATKDTYDALHMQALPPR

SEQ ID NO: 31784 - protein, 285 aa, synthetic construct
LRDSKSSDKSVCLFTDFDSQTNVSQSKDSDVYITDKTVLDMRSMDFKSNSAVAWSNKSDFACANAFNNSIIMDPKDNCSKDANDTLLLQLTNTSAYYMYLLLLLKSVVYFAIITCCLLRRTAFCCNGEKSKRGRKKLLYIFKQPFMRPVQTTQEEDGCSCRFPEEEEGGCELRVKFSRSADAPAYQQGQNQLYNELNLGRREEYDVLDKRRGRDPEMGGKPQRRKNPQEGLYNELQKDKMAEAYSEIGMKGERRRGKGHDGLYQGLSTATKDTYDALHMQALPPR

SEQ ID NO: 31785 - protein, 293 aa, synthetic construct; identical to SEQ ID NO: 31783

SEQ ID NO: 31786 - protein, 279 aa, synthetic construct
LRDSKSSDKSVCLFTDFDSQTNVSQSKDSDVYITDKTVLDMRSMDFKSNSAVAWSNKSDFACANAFNNSIICSKDANDTLLLQLTNTSAYYMYLLLLLKSVVYFAIITCCLLRRTAFCCNGEKSKRGRKKLLYIFKQPFMRPVQTTQEEDGCSCRFPEEEEGGCELRVKFSRSADAPAYQQGQNQLYNELNLGRREEYDVLDKRRGRDPEMGGKPQRRKNPQEGLYNELQKDKMAEAYSEIGMKGERRRGKGHDGLYQGLSTATKDTYDALHMQALPPR

SEQ ID NO: 31787 - protein, 294 aa, synthetic construct
LRDSKSSDKSVCLFTDFDSQTNVSQSKDSDVYITDKTVLDMRSMDFKSNSAVAWSNKSDFACANAFNNSIIEVKTDSTDHVKPKETENTKQPSKSCHKPKAIVHTEKVNMMSLTVLGLRMLFAKTVAVNFLLTAKLFFLKRGRKKLLYIFKQPFMRPVQTTQEEDGCSCRFPEEEEGGCELRVKFSRSADAPAYQQGQNQLYNELNLGRREEYDVLDKRRGRDPEMGGKPQRRKNPQEGLYNELQKDKMAEAYSEIGMKGERRRGKGHDGLYQGLSTATKDTYDALHMQALPPR

SEQ ID NO: 31788 - protein, 287 aa, synthetic construct
LRDSKSSDKSVCLFTDFDSQTNVSQSKDSDVYITDKTVLDMRSMDFKSNSAVAWSNKSDFACANAFNNSIIDHVKPKETENTKQPSKSCHKPKAIVHTEKVNMMSLTVLGLRMLFAKTVAVNFLLTAKLFFLKRGRKKLLYIFKQPFMRPVQTTQEEDGCSCRFPEEEEGGCELRVKFSRSADAPAYQQGQNQLYNELNLGRREEYDVLDKRRGRDPEMGGKPQRRKNPQEGLYNELQKDKMAEAYSEIGMKGERRRGKGHDGLYQGLSTATKDTYDALHMQALPPR

SEQ ID NO: 31789 - protein, 292 aa, synthetic construct; identical to SEQ ID NO: 31769

SEQ ID NO: 31790 - protein, 290 aa, synthetic construct; identical to SEQ ID NO: 31770

SEQ ID NO: 31791 - protein, 300 aa, synthetic construct; identical to SEQ ID NO: 31771

SEQ ID NO: 31792 - protein, 308 aa, synthetic construct; identical to SEQ ID NO: 31772

SEQ ID NO: 31793 - protein, 306 aa, synthetic construct; identical to SEQ ID NO: 31773

SEQ ID NO: 31794 - protein, 298 aa, synthetic construct; identical to SEQ ID NO: 31774

SEQ ID NO: 31795 - protein, 306 aa, synthetic construct; identical to SEQ ID NO: 31773

SEQ ID NO: 31796 - protein, 292 aa, synthetic construct; identical to SEQ ID NO: 31776

SEQ ID NO: 31797 - protein, 307 aa, synthetic construct; identical to SEQ ID NO: 31777

SEQ ID NO: 31798 - protein, 300 aa, synthetic construct; identical to SEQ ID NO: 31778

SEQ ID NO: 31799 - protein, 332 aa, synthetic construct
EVAVFEPSEAEISHTQKATLVCLATGFYPDHVELSWWVNGKEVHSGVSTDPQPLKEQPALNDSRYCLSSRLRVSATFWQNPRNHFRCQVQFYGLSENDEWTQDRAKPVTQIVSAEAWIPEDTFFPSPESSCDVKLVEKSFETDTNLNFQNLSVIGFRILLLKVAGFNLLMTLRLWSSKRGRKKLLYIFKQPFMRPVQTTQEEDGCSCRFPEEEEGGCELRVKFSRSADAPAYQQGQNQLYNELNLGRREEYDVLDKRRGRDPEMGGKPQRRKNPQEGLYNELQKDKMAEAYSEIGMKGERRRGKGHDGLYQGLSTATKDTYDALHMQALPPR

SEQ ID NO: 31800 - protein, 322 aa, synthetic construct
EVAVFEPSEAEISHTQKATLVCLATGFYPDHVELSWWVNGKEVHSGVSTDPQPLKEQPALNDSRYCLSSRLRVSATFWQNPRNHFRCQVQFYGLSENDEWTQDRAKPVTQIVSAEAWESSCDVKLVEKSFETDTNLNFQNLSVIGFRILLLKVAGFNLLMTLRLWSSKRGRKKLLYIFKQPFMRPVQTTQEEDGCSCRFPEEEEGGCELRVKFSRSADAPAYQQGQNQLYNELNLGRREEYDVLDKRRGRDPEMGGKPQRRKNPQEGLYNELQKDKMAEAYSEIGMKGERRRGKGHDGLYQGLSTATKDTYDALHMQALPPR

SEQ ID NO: 31801 - protein, 331 aa, synthetic construct
EVAVFEPSEAEISHTQKATLVCLATGFYPDHVELSWWVNGKEVHSGVSTDPQPLKEQPALNDSRYCLSSRLRVSATFWQNPRNHFRCQVQFYGLSENDEWTQDRAKPVTQIVSAEAWPEDTFFPSPESSCDVKLVEKSFETDTNLNFQNLSVIGFRILLLKVAGFNLLMTLRLWSSKRGRKKLLYIFKQPFMRPVQTTQEEDGCSCRFPEEEEGGCELRVKFSRSADAPAYQQGQNQLYNELNLGRREEYDVLDKRRGRDPEMGGKPQRRKNPQEGLYNELQKDKMAEAYSEIGMKGERRRGKGHDGLYQGLSTATKDTYDALHMQALPPR

SEQ ID NO: 31802 - protein, 341 aa, synthetic construct
EVAVFEPSEAEISHTQKATLVCLATGFYPDHVELSWWVNGKEVHSGVSTDPQPLKEQPALNDSRYCLSSRLRVSATFWQNPRNHFRCQVQFYGLSENDEWTQDRAKPVTQIVSAEAWFPPIKTDVITMDPKDNCSKDANDTLLLQLTNTSAYYMYLLLLLKSVVYFAIITCCLLRRTAFCCNGEKSKRGRKKLLYIFKQPFMRPVQTTQEEDGCSCRFPEEEEGGCELRVKFSRSADAPAYQQGQNQLYNELNLGRREEYDVLDKRRGRDPEMGGKPQRRKNPQEGLYNELQKDKMAEAYSEIGMKGERRRGKGHDGLYQGLSTATKDTYDALHMQALPPR

SEQ ID NO: 31803 - protein, 339 aa, synthetic construct
EVAVFEPSEAEISHTQKATLVCLATGFYPDHVELSWWVNGKEVHSGVSTDPQPLKEQPALNDSRYCLSSRLRVSATFWQNPRNHFRCQVQFYGLSENDEWTQDRAKPVTQIVSAEAWPIKTDVITMDPKDNCSKDANDTLLLQLTNTSAYYMYLLLLLKSVVYFAIITCCLLRRTAFCCNGEKSKRGRKKLLYIFKQPFMRPVQTTQEEDGCSCRFPEEEEGGCELRVKFSRSADAPAYQQGQNQLYNELNLGRREEYDVLDKRRGRDPEMGGKPQRRKNPQEGLYNELQKDKMAEAYSEIGMKGERRRGKGHDGLYQGLSTATKDTYDALHMQALPPR

SEQ ID NO: 31804 - protein, 331 aa, synthetic construct
EVAVFEPSEAEISHTQKATLVCLATGFYPDHVELSWWVNGKEVHSGVSTDPQPLKEQPALNDSRYCLSSRLRVSATFWQNPRNHFRCQVQFYGLSENDEWTQDRAKPVTQIVSAEAWMDPKDNCSKDANDTLLLQLTNTSAYYMYLLLLLKSVVYFAIITCCLLRRTAFCCNGEKSKRGRKKLLYIFKQPFMRPVQTTQEEDGCSCRFPEEEEGGCELRVKFSRSADAPAYQQGQNQLYNELNLGRREEYDVLDKRRGRDPEMGGKPQRRKNPQEGLYNELQKDKMAEAYSEIGMKGERRRGKGHDGLYQGLSTATKDTYDALHMQALPPR

SEQ ID NO: 31805 - protein, 339 aa, synthetic construct; identical to SEQ ID NO: 31803

SEQ ID NO: 31806 - protein, 325 aa, synthetic construct
EVAVFEPSEAEISHTQKATLVCLATGFYPDHVELSWWVNGKEVHSGVSTDPQPLKEQPALNDSRYCLSSRLRVSATFWQNPRNHFRCQVQFYGLSENDEWTQDRAKPVTQIVSAEAWCSKDANDTLLLQLTNTSAYYMYLLLLLKSVVYFAIITCCLLRRTAFCCNGEKSKRGRKKLLYIFKQPFMRPVQTTQEEDGCSCRFPEEEEGGCELRVKFSRSADAPAYQQGQNQLYNELNLGRREEYDVLDKRRGRDPEMGGKPQRRKNPQEGLYNELQKDKMAEAYSEIGMKGERRRGKGHDGLYQGLSTATKDTYDALHMQALPPR

SEQ ID NO: 31807 - protein, 340 aa, synthetic construct
EVAVFEPSEAEISHTQKATLVCLATGFYPDHVELSWWVNGKEVHSGVSTDPQPLKEQPALNDSRYCLSSRLRVSATFWQNPRNHFRCQVQFYGLSENDEWTQDRAKPVTQIVSAEAWEVKTDSTDHVKPKETENTKQPSKSCHKPKAIVHTEKVNMMSLTVLGLRMLFAKTVAVNFLLTAKLFFLKRGRKKLLYIFKQPFMRPVQTTQEEDGCSCRFPEEEEGGCELRVKFSRSADAPAYQQGQNQLYNELNLGRREEYDVLDKRRGRDPEMGGKPQRRKNPQEGLYNELQKDKMAEAYSEIGMKGERRRGKGHDGLYQGLSTATKDTYDALHMQALPPR

SEQ ID NO: 31808 - protein, 333 aa, synthetic construct
EVAVFEPSEAEISHTQKATLVCLATGFYPDHVELSWWVNGKEVHSGVSTDPQPLKEQPALNDSRYCLSSRLRVSATFWQNPRNHFRCQVQFYGLSENDEWTQDRAKPVTQIVSAEAWDHVKPKETENTKQPSKSCHKPKAIVHTEKVNMMSLTVLGLRMLFAKTVAVNFLLTAKLFFLKRGRKKLLYIFKQPFMRPVQTTQEEDGCSCRFPEEEEGGCELRVKFSRSADAPAYQQGQNQLYNELNLGRREEYDVLDKRRGRDPEMGGKPQRRKNPQEGLYNELQKDKMAEAYSEIGMKGERRRGKGHDGLYQGLSTATKDTYDALHMQALPPR

SEQ ID NO: 31809 - protein, 334 aa, synthetic construct
EVAVFEPSEAEISHTQKATLVCLATGFYPDHVELSWWVNGKEVHSGVSTDPQPLKEQPALNDSRYCLSSRLRVSATFWQNPRNHFRCQVQFYGLSENDEWTQDRAKPVTQIVSAEAWGRIPEDTFFPSPESSCDVKLVEKSFETDTNLNFQNLSVIGFRILLLKVAGFNLLMTLRLWSSKRGRKKLLYIFKQPFMRPVQTTQEEDGCSCRFPEEEEGGCELRVKFSRSADAPAYQQGQNQLYNELNLGRREEYDVLDKRRGRDPEMGGKPQRRKNPQEGLYNELQKDKMAEAYSEIGMKGERRRGKGHDGLYQGLSTATKDTYDALHMQALPPR

SEQ ID NO: 31810 - protein, 324 aa, synthetic construct
EVAVFEPSEAEISHTQKATLVCLATGFYPDHVELSWWVNGKEVHSGVSTDPQPLKEQPALNDSRYCLSSRLRVSATFWQNPRNHFRCQVQFYGLSENDEWTQDRAKPVTQIVSAEAWGRESSCDVKLVEKSFETDTNLNFQNLSVIGFRILLLKVAGFNLLMTLRLWSSKRGRKKLLYIFKQPFMRPVQTTQEEDGCSCRFPEEEEGGCELRVKFSRSADAPAYQQGQNQLYNELNLGRREEYDVLDKRRGRDPEMGGKPQRRKNPQEGLYNELQKDKMAEAYSEIGMKGERRRGKGHDGLYQGLSTATKDTYDALHMQALPPR

SEQ ID NO: 31811 - protein, 333 aa, synthetic construct
EVAVFEPSEAEISHTQKATLVCLATGFYPDHVELSWWVNGKEVHSGVSTDPQPLKEQPALNDSRYCLSSRLRVSATFWQNPRNHFRCQVQFYGLSENDEWTQDRAKPVTQIVSAEAWGRPEDTFFPSPESSCDVKLVEKSFETDTNLNFQNLSVIGFRILLLKVAGFNLLMTLRLWSSKRGRKKLLYIFKQPFMRPVQTTQEEDGCSCRFPEEEEGGCELRVKFSRSADAPAYQQGQNQLYNELNLGRREEYDVLDKRRGRDPEMGGKPQRRKNPQEGLYNELQKDKMAEAYSEIGMKGERRRGKGHDGLYQGLSTATKDTYDALHMQALPPR

SEQ ID NO: 31812 - protein, 343 aa, synthetic construct
EVAVFEPSEAEISHTQKATLVCLATGFYPDHVELSWWVNGKEVHSGVSTDPQPLKEQPALNDSRYCLSSRLRVSATFWQNPRNHFRCQVQFYGLSENDEWTQDRAKPVTQIVSAEAWGRFPPIKTDVITMDPKDNCSKDANDTLLLQLTNTSAYYMYLLLLLKSVVYFAIITCCLLRRTAFCCNGEKSKRGRKKLLYIFKQPFMRPVQTTQEEDGCSCRFPEEEEGGCELRVKFSRSADAPAYQQGQNQLYNELNLGRREEYDVLDKRRGRDPEMGGKPQRRKNPQEGLYNELQKDKMAEAYSEIGMKGERRRGKGHDGLYQGLSTATKDTYDALHMQALPPR

SEQ ID NO: 31813 - protein, 341 aa, synthetic construct
EVAVFEPSEAEISHTQKATLVCLATGFYPDHVELSWWVNGKEVHSGVSTDPQPLKEQPALNDSRYCLSSRLRVSATFWQNPRNHFRCQVQFYGLSENDEWTQDRAKPVTQIVSAEAWGRPIKTDVITMDPKDNCSKDANDTLLLQLTNTSAYYMYLLLLLKSVVYFAIITCCLLRRTAFCCNGEKSKRGRKKLLYIFKQPFMRPVQTTQEEDGCSCRFPEEEEGGCELRVKFSRSADAPAYQQGQNQLYNELNLGRREEYDVLDKRRGRDPEMGGKPQRRKNPQEGLYNELQKDKMAEAYSEIGMKGERRRGKGHDGLYQGLSTATKDTYDALHMQALPPR

SEQ ID NO: 31814 - protein, 333 aa, synthetic construct
EVAVFEPSEAEISHTQKATLVCLATGFYPDHVELSWWVNGKEVHSGVSTDPQPLKEQPALNDSRYCLSSRLRVSATFWQNPRNHFRCQVQFYGLSENDEWTQDRAKPVTQIVSAEAWGRMDPKDNCSKDANDTLLLQLTNTSAYYMYLLLLLKSVVYFAIITCCLLRRTAFCCNGEKSKRGRKKLLYIFKQPFMRPVQTTQEEDGCSCRFPEEEEGGCELRVKFSRSADAPAYQQGQNQLYNELNLGRREEYDVLDKRRGRDPEMGGKPQRRKNPQEGLYNELQKDKMAEAYSEIGMKGERRRGKGHDGLYQGLSTATKDTYDALHMQALPPR

SEQ ID NO: 31815 - protein, 341 aa, synthetic construct; identical to SEQ ID NO: 31813

SEQ ID NO: 31816 - protein, 327 aa, synthetic construct
EVAVFEPSEAEISHTQKATLVCLATGFYPDHVELSWWVNGKEVHSGVSTDPQPLKEQPALNDSRYCLSSRLRVSATFWQNPRNHFRCQVQFYGLSENDEWTQDRAKPVTQIVSAEAWGRCSKDANDTLLLQLTNTSAYYMYLLLLLKSVVYFAIITCCLLRRTAFCCNGEKSKRGRKKLLYIFKQPFMRPVQTTQEEDGCSCRFPEEEEGGCELRVKFSRSADAPAYQQGQNQLYNELNLGRREEYDVLDKRRGRDPEMGGKPQRRKNPQEGLYNELQKDKMAEAYSEIGMKGERRRGKGHDGLYQGLSTATKDTYDALHMQALPPR

SEQ ID NO: 31817 - protein, 342 aa, synthetic construct
EVAVFEPSEAEISHTQKATLVCLATGFYPDHVELSWWVNGKEVHSGVSTDPQPLKEQPALNDSRYCLSSRLRVSATFWQNPRNHFRCQVQFYGLSENDEWTQDRAKPVTQIVSAEAWGREVKTDSTDHVKPKETENTKQPSKSCHKPKAIVHTEKVNMMSLTVLGLRMLFAKTVAVNFLLTAKLFFLKRGRKKLLYIFKQPFMRPVQTTQEEDGCSCRFPEEEEGGCELRVKFSRSADAPAYQQGQNQLYNELNLGRREEYDVLDKRRGRDPEMGGKPQRRKNPQEGLYNELQKDKMAEAYSEIGMKGERRRGKGHDGLYQGLSTATKDTYDALHMQALPPR

SEQ ID NO: 31818 - protein, 335 aa, synthetic construct
EVAVFEPSEAEISHTQKATLVCLATGFYPDHVELSWWVNGKEVHSGVSTDPQPLKEQPALNDSRYCLSSRLRVSATFWQNPRNHFRCQVQFYGLSENDEWTQDRAKPVTQIVSAEAWGRDHVKPKETENTKQPSKSCHKPKAIVHTEKVNMMSLTVLGLRMLFAKTVAVNFLLTAKLFFLKRGRKKLLYIFKQPFMRPVQTTQEEDGCSCRFPEEEEGGCELRVKFSRSADAPAYQQGQNQLYNELNLGRREEYDVLDKRRGRDPEMGGKPQRRKNPQEGLYNELQKDKMAEAYSEIGMKGERRRGKGHDGLYQGLSTATKDTYDALHMQALPPR

SEQ ID NO: 31819 - protein, 337 aa, synthetic construct
EVAVFEPSEAEISHTQKATLVCLATGFYPDHVELSWWVNGKEVHSGVSTDPQPLKEQPALNDSRYCLSSRLRVSATFWQNPRNHFRCQVQFYGLSENDEWTQDRAKPVTQIVSAEAWGRADCIPEDTFFPSPESSCDVKLVEKSFETDTNLNFQNLSVIGFRILLLKVAGFNLLMTLRLWSSKRGRKKLLYIFKQPFMRPVQTTQEEDGCSCRFPEEEEGGCELRVKFSRSADAPAYQQGQNQLYNELNLGRREEYDVLDKRRGRDPEMGGKPQRRKNPQEGLYNELQKDKMAEAYSEIGMKGERRRGKGHDGLYQGLSTATKDTYDALHMQALPPR

SEQ ID NO: 31820 - protein, 327 aa, synthetic construct
EVAVFEPSEAEISHTQKATLVCLATGFYPDHVELSWWVNGKEVHSGVSTDPQPLKEQPALNDSRYCLSSRLRVSATFWQNPRNHFRCQVQFYGLSENDEWTQDRAKPVTQIVSAEAWGRADCESSCDVKLVEKSFETDTNLNFQNLSVIGFRILLLKVAGFNLLMTLRLWSSKRGRKKLLYIFKQPFMRPVQTTQEEDGCSCRFPEEEEGGCELRVKFSRSADAPAYQQGQNQLYNELNLGRREEYDVLDKRRGRDPEMGGKPQRRKNPQEGLYNELQKDKMAEAYSEIGMKGERRRGKGHDGLYQGLSTATKDTYDALHMQALPPR

SEQ ID NO: 31821 - protein, 336 aa, synthetic construct
EVAVFEPSEAEISHTQKATLVCLATGFYPDHVELSWWVNGKEVHSGVSTDPQPLKEQPALNDSRYCLSSRLRVSATFWQNPRNHFRCQVQFYGLSENDEWTQDRAKPVTQIVSAEAWGRADCPEDTFFPSPESSCDVKLVEKSFETDTNLNFQNLSVIGFRILLLKVAGFNLLMTLRLWSSKRGRKKLLYIFKQPFMRPVQTTQEEDGCSCRFPEEEEGGCELRVKFSRSADAPAYQQGQNQLYNELNLGRREEYDVLDKRRGRDPEMGGKPQRRKNPQEGLYNELQKDKMAEAYSEIGMKGERRRGKGHDGLYQGLSTATKDTYDALHMQALPPR

SEQ ID NO: 31822 - protein, 346 aa, synthetic construct
EVAVFEPSEAEISHTQKATLVCLATGFYPDHVELSWWVNGKEVHSGVSTDPQPLKEQPALNDSRYCLSSRLRVSATFWQNPRNHFRCQVQFYGLSENDEWTQDRAKPVTQIVSAEAWGRADCFPPIKTDVITMDPKDNCSKDANDTLLLQLTNTSAYYMYLLLLLKSVVYFAIITCCLLRRTAFCCNGEKSKRGRKKLLYIFKQPFMRPVQTTQEEDGCSCRFPEEEEGGCELRVKFSRSADAPAYQQGQNQLYNELNLGRREEYDVLDKRRGRDPEMGGKPQRRKNPQEGLYNELQKDKMAEAYSEIGMKGERRRGKGHDGLYQGLSTATKDTYDALHMQALPPR

SEQ ID NO: 31823 - protein, 344 aa, synthetic construct
EVAVFEPSEAEISHTQKATLVCLATGFYPDHVELSWWVNGKEVHSGVSTDPQPLKEQPALNDSRYCLSSRLRVSATFWQNPRNHFRCQVQFYGLSENDEWTQDRAKPVTQIVSAEAWGRADCPIKTDVITMDPKDNCSKDANDTLLLQLTNTSAYYMYLLLLLKSVVYFAIITCCLLRRTAFCCNGEKSKRGRKKLLYIFKQPFMRPVQTTQEEDGCSCRFPEEEEGGCELRVKFSRSADAPAYQQGQNQLYNELNLGRREEYDVLDKRRGRDPEMGGKPQRRKNPQEGLYNELQKDKMAEAYSEIGMKGERRRGKGHDGLYQGLSTATKDTYDALHMQALPPR

SEQ ID NO: 31824 - protein, 336 aa, synthetic construct
EVAVFEPSEAEISHTQKATLVCLATGFYPDHVELSWWVNGKEVHSGVSTDPQPLKEQPALNDSRYCLSSRLRVSATFWQNPRNHFRCQVQFYGLSENDEWTQDRAKPVTQIVSAEAWGRADCMDPKDNCSKDANDTLLLQLTNTSAYYMYLLLLLKSVVYFAIITCCLLRRTAFCCNGEKSKRGRKKLLYIFKQPFMRPVQTTQEEDGCSCRFPEEEEGGCELRVKFSRSADAPAYQQGQNQLYNELNLGRREEYDVLDKRRGRDPEMGGKPQRRKNPQEGLYNELQKDKMAEAYSEIGMKGERRRGKGHDGLYQGLSTATKDTYDALHMQALPPR

SEQ ID NO: 31825 - protein, 344 aa, synthetic construct; identical to SEQ ID NO: 31823

SEQ ID NO: 31826 - protein, 330 aa, synthetic construct
EVAVFEPSEAEISHTQKATLVCLATGFYPDHVELSWWVNGKEVHSGVSTDPQPLKEQPALNDSRYCLSSRLRVSATFWQNPRNHFRCQVQFYGLSENDEWTQDRAKPVTQIVSAEAWGRADCCSKDANDTLLLQLTNTSAYYMYLLLLLKSVVYFAIITCCLLRRTAFCCNGEKSKRGRKKLLYIFKQPFMRPVQTTQEEDGCSCRFPEEEEGGCELRVKFSRSADAPAYQQGQNQLYNELNLGRREEYDVLDKRRGRDPEMGGKPQRRKNPQEGLYNELQKDKMAEAYSEIGMKGERRRGKGHDGLYQGLSTATKDTYDALHMQALPPR

SEQ ID NO: 31827 - protein, 345 aa, synthetic construct
EVAVFEPSEAEISHTQKATLVCLATGFYPDHVELSWWVNGKEVHSGVSTDPQPLKEQPALNDSRYCLSSRLRVSATFWQNPRNHFRCQVQFYGLSENDEWTQDRAKPVTQIVSAEAWGRADCEVKTDSTDHVKPKETENTKQPSKSCHKPKAIVHTEKVNMMSLTVLGLRMLFAKTVAVNFLLTAKLFFLKRGRKKLLYIFKQPFMRPVQTTQEEDGCSCRFPEEEEGGCELRVKFSRSADAPAYQQGQNQLYNELNLGRREEYDVLDKRRGRDPEMGGKPQRRKNPQEGLYNELQKDKMAEAYSEIGMKGERRRGKGHDGLYQGLSTATKDTYDALHMQALPPR

SEQ ID NO: 31828 - protein, 338 aa, synthetic construct
EVAVFEPSEAEISHTQKATLVCLATGFYPDHVELSWWVNGKEVHSGVSTDPQPLKEQPALNDSRYCLSSRLRVSATFWQNPRNHFRCQVQFYGLSENDEWTQDRAKPVTQIVSAEAWGRADCDHVKPKETENTKQPSKSCHKPKAIVHTEKVNMMSLTVLGLRMLFAKTVAVNFLLTAKLFFLKRGRKKLLYIFKQPFMRPVQTTQEEDGCSCRFPEEEEGGCELRVKFSRSADAPAYQQGQNQLYNELNLGRREEYDVLDKRRGRDPEMGGKPQRRKNPQEGLYNELQKDKMAEAYSEIGMKGERRRGKGHDGLYQGLSTATKDTYDALHMQALPPR

SEQ ID NO: 31829 - protein, 324 aa, synthetic construct
EVAVFEPSEAEISHTQKATLVCLATGFYPDHVELSWWVNGKEVHSGVSTDPQPLKEQPALNDSRYCLSSRLRVSATFWQNPRNHFRCQVQFYGLSENDEWTQDRAKPVTIPEDTFFPSPESSCDVKLVEKSFETDTNLNFQNLSVIGFRILLLKVAGFNLLMTLRLWSSKRGRKKLLYIFKQPFMRPVQTTQEEDGCSCRFPEEEEGGCELRVKFSRSADAPAYQQGQNQLYNELNLGRREEYDVLDKRRGRDPEMGGKPQRRKNPQEGLYNELQKDKMAEAYSEIGMKGERRRGKGHDGLYQGLSTATKDTYDALHMQALPPR

SEQ ID NO: 31830 - protein, 314 aa, synthetic construct
EVAVFEPSEAEISHTQKATLVCLATGFYPDHVELSWWVNGKEVHSGVSTDPQPLKEQPALNDSRYCLSSRLRVSATFWQNPRNHFRCQVQFYGLSENDEWTQDRAKPVTESSCDVKLVEKSFETDTNLNFQNLSVIGFRILLLKVAGFNLLMTLRLWSSKRGRKKLLYIFKQPFMRPVQTTQEEDGCSCRFPEEEEGGCELRVKFSRSADAPAYQQGQNQLYNELNLGRREEYDVLDKRRGRDPEMGGKPQRRKNPQEGLYNELQKDKMAEAYSEIGMKGERRRGKGHDGLYQGLSTATKDTYDALHMQALPPR

SEQ ID NO: 31831 - protein, 323 aa, synthetic construct
EVAVFEPSEAEISHTQKATLVCLATGFYPDHVELSWWVNGKEVHSGVSTDPQPLKEQPALNDSRYCLSSRLRVSATFWQNPRNHFRCQVQFYGLSENDEWTQDRAKPVTPEDTFFPSPESSCDVKLVEKSFETDTNLNFQNLSVIGFRILLLKVAGFNLLMTLRLWSSKRGRKKLLYIFKQPFMRPVQTTQEEDGCSCRFPEEEEGGCELRVKFSRSADAPAYQQGQNQLYNELNLGRREEYDVLDKRRGRDPEMGGKPQRRKNPQEGLYNELQKDKMAEAYSEIGMKGERRRGKGHDGLYQGLSTATKDTYDALHMQALPPR

SEQ ID NO: 31832 - protein, 333 aa, synthetic construct
EVAVFEPSEAEISHTQKATLVCLATGFYPDHVELSWWVNGKEVHSGVSTDPQPLKEQPALNDSRYCLSSRLRVSATFWQNPRNHFRCQVQFYGLSENDEWTQDRAKPVTFPPIKTDVITMDPKDNCSKDANDTLLLQLTNTSAYYMYLLLLLKSVVYFAIITCCLLRRTAFCCNGEKSKRGRKKLLYIFKQPFMRPVQTTQEEDGCSCRFPEEEEGGCELRVKFSRSADAPAYQQGQNQLYNELNLGRREEYDVLDKRRGRDPEMGGKPQRRKNPQEGLYNELQKDKMAEAYSEIGMKGERRRGKGHDGLYQGLSTATKDTYDALHMQALPPR

SEQ ID NO: 31833 - protein, 331 aa, synthetic construct
EVAVFEPSEAEISHTQKATLVCLATGFYPDHVELSWWVNGKEVHSGVSTDPQPLKEQPALNDSRYCLSSRLRVSATFWQNPRNHFRCQVQFYGLSENDEWTQDRAKPVTPIKTDVITMDPKDNCSKDANDTLLLQLTNTSAYYMYLLLLLKSVVYFAIITCCLLRRTAFCCNGEKSKRGRKKLLYIFKQPFMRPVQTTQEEDGCSCRFPEEEEGGCELRVKFSRSADAPAYQQGQNQLYNELNLGRREEYDVLDKRRGRDPEMGGKPQRRKNPQEGLYNELQKDKMAEAYSEIGMKGERRRGKGHDGLYQGLSTATKDTYDALHMQALPPR

SEQ ID NO: 31834 - protein, 323 aa, synthetic construct
EVAVFEPSEAEISHTQKATLVCLATGFYPDHVELSWWVNGKEVHSGVSTDPQPLKEQPALNDSRYCLSSRLRVSATFWQNPRNHFRCQVQFYGLSENDEWTQDRAKPVTMDPKDNCSKDANDTLLLQLTNTSAYYMYLLLLLKSVVYFAIITCCLLRRTAFCCNGEKSKRGRKKLLYIFKQPFMRPVQTTQEEDGCSCRFPEEEEGGCELRVKFSRSADAPAYQQGQNQLYNELNLGRREEYDVLDKRRGRDPEMGGKPQRRKNPQEGLYNELQKDKMAEAYSEIGMKGERRRGKGHDGLYQGLSTATKDTYDALHMQALPPR

SEQ ID NO: 31835 - protein, 331 aa, synthetic construct; identical to SEQ ID NO: 31833

SEQ ID NO: 31836 - protein, 317 aa, synthetic construct
EVAVFEPSEAEISHTQKATLVCLATGFYPDHVELSWWVNGKEVHSGVSTDPQPLKEQPALNDSRYCLSSRLRVSATFWQNPRNHFRCQVQFYGLSENDEWTQDRAKPVTCSKDANDTLLLQLTNTSAYYMYLLLLLKSVVYFAIITCCLLRRTAFCCNGEKSKRGRKKLLYIFKQPFMRPVQTTQEEDGCSCRFPEEEEGGCELRVKFSRSADAPAYQQGQNQLYNELNLGRREEYDVLDKRRGRDPEMGGKPQRRKNPQEGLYNELQKDKMAEAYSEIGMKGERRRGKGHDGLYQGLSTATKDTYDALHMQALPPR

SEQ ID NO: 31837 - protein, 332 aa, synthetic construct
EVAVFEPSEAEISHTQKATLVCLATGFYPDHVELSWWVNGKEVHSGVSTDPQPLKEQPALNDSRYCLSSRLRVSATFWQNPRNHFRCQVQFYGLSENDEWTQDRAKPVTEVKTDSTDHVKPKETENTKQPSKSCHKPKAIVHTEKVNMMSLTVLGLRMLFAKTVAVNFLLTAKLFFLKRGRKKLLYIFKQPFMRPVQTTQEEDGCSCRFPEEEEGGCELRVKFSRSADAPAYQQGQNQLYNELNLGRREEYDVLDKRRGRDPEMGGKPQRRKNPQEGLYNELQKDKMAEAYSEIGMKGERRRGKGHDGLYQGLSTATKDTYDALHMQALPPR

SEQ ID NO: 31838 - protein, 325 aa, synthetic construct
EVAVFEPSEAEISHTQKATLVCLATGFYPDHVELSWWVNGKEVHSGVSTDPQPLKEQPALNDSRYCLSSRLRVSATFWQNPRNHFRCQVQFYGLSENDEWTQDRAKPVTDHVKPKETENTKQPSKSCHKPKAIVHTEKVNMMSLTVLGLRMLFAKTVAVNFLLTAKLFFLKRGRKKLLYIFKQPFMRPVQTTQEEDGCSCRFPEEEEGGCELRVKFSRSADAPAYQQGQNQLYNELNLGRREEYDVLDKRRGRDPEMGGKPQRRKNPQEGLYNELQKDKMAEAYSEIGMKGERRRGKGHDGLYQGLSTATKDTYDALHMQALPPR

SEQ ID NO: 31839 - protein, 332 aa, synthetic construct; identical to SEQ ID NO: 31799

SEQ ID NO: 31840 - protein, 322 aa, synthetic construct; identical to SEQ ID NO: 31800

SEQ ID NO: 31841 - protein, 331 aa, synthetic construct; identical to SEQ ID NO: 31801

SEQ ID NO: 31842 - protein, 341 aa, synthetic construct; identical to SEQ ID NO: 31802

SEQ ID NO: 31843 - protein, 339 aa, synthetic construct; identical to SEQ ID NO: 31803

SEQ ID NO: 31844 - protein, 331 aa, synthetic construct; identical to SEQ ID NO: 31804

SEQ ID NO: 31845 - protein, 339 aa, synthetic construct; identical to SEQ ID NO: 31803

SEQ ID NO: 31846 - protein, 325 aa, synthetic construct; identical to SEQ ID NO: 31806

SEQ ID NO: 31847 - protein, 340 aa, synthetic construct; identical to SEQ ID NO: 31807

SEQ ID NO: 31848 - protein, 333 aa, synthetic construct; identical to SEQ ID NO: 31808

SEQ ID NO: 31849 - protein, 325 aa, synthetic construct; identical to SEQ ID NO: 31634

SEQ ID NO: 31850 - protein, 315 aa, synthetic construct; identical to SEQ ID NO: 31635

SEQ ID NO: 31851 - protein, 324 aa, synthetic construct; identical to SEQ ID NO: 31636

SEQ ID NO: 31852 - protein, 334 aa, synthetic construct; identical to SEQ ID NO: 31637

SEQ ID NO: 31853 - protein, 332 aa, synthetic construct; identical to SEQ ID NO: 31638

SEQ ID NO: 31854 - protein, 324 aa, synthetic construct; identical to SEQ ID NO: 31639

SEQ ID NO: 31855 - protein, 332 aa, synthetic construct; identical to SEQ ID NO: 31638

SEQ ID NO: 31856 - protein, 318 aa, synthetic construct; identical to SEQ ID NO: 31641

SEQ ID NO: 31857 - protein, 333 aa, synthetic construct; identical to SEQ ID NO: 31642

SEQ ID NO: 31858 - protein, 326 aa, synthetic construct; identical to SEQ ID NO: 31643

SEQ ID NO: 31859 - protein, 314 aa, synthetic construct
ADVSPKPTIFLPSIAETKLQKAGTYLCLLEKFFPDVIKIHWQEKKSNTILGSQEGNTMKTNDTYMKFSWLTVPEKSLDKEHRCIVRHENNKNGVDQEIIIPEDTFFPSPESSCDVKLVEKSFETDTNLNFQNLSVIGFRILLLKVAGFNLLMTLRLWSSKRGRKKLLYIFKQPFMRPVQTTQEEDGCSCRFPEEEEGGCELRVKFSRSADAPAYQQGQNQLYNELNLGRREEYDVLDKRRGRDPEMGGKPQRRKNPQEGLYNELQKDKMAEAYSEIGMKGERRRGKGHDGLYQGLSTATKDTYDALHMQALPPR

SEQ ID NO: 31860 - protein, 304 aa, synthetic construct
ADVSPKPTIFLPSIAETKLQKAGTYLCLLEKFFPDVIKIHWQEKKSNTILGSQEGNTMKTNDTYMKFSWLTVPEKSLDKEHRCIVRHENNKNGVDQEIIESSCDVKLVEKSFETDTNLNFQNLSVIGFRILLLKVAGFNLLMTLRLWSSKRGRKKLLYIFKQPFMRPVQTTQEEDGCSCRFPEEEEGGCELRVKFSRSADAPAYQQGQNQLYNELNLGRREEYDVLDKRRGRDPEMGGKPQRRKNPQEGLYNELQKDKMAEAYSEIGMKGERRRGKGHDGLYQGLSTATKDTYDALHMQALPPR

SEQ ID NO: 31861 - protein, 313 aa, synthetic construct
ADVSPKPTIFLPSIAETKLQKAGTYLCLLEKFFPDVIKIHWQEKKSNTILGSQEGNTMKTNDTYMKFSWLTVPEKSLDKEHRCIVRHENNKNGVDQEIIPEDTFFPSPESSCDVKLVEKSFETDTNLNFQNLSVIGFRILLLKVAGFNLLMTLRLWSSKRGRKKLLYIFKQPFMRPVQTTQEEDGCSCRFPEEEEGGCELRVKFSRSADAPAYQQGQNQLYNELNLGRREEYDVLDKRRGRDPEMGGKPQRRKNPQEGLYNELQKDKMAEAYSEIGMKGERRRGKGHDGLYQGLSTATKDTYDALHMQALPPR

SEQ ID NO: 31862 - protein, 307 aa, synthetic construct
ADVSPKPTIFLPSIAETKLQKAGTYLCLLEKFFPDVIKIHWQEKKSNTILGSQEGNTMKTNDTYMKFSWLTVPEKSLDKEHRCIVRHENNKNGVDQEIIGRADCGFTSESYQQGVLSATILYEILLGKATLYAVLVSALVLMAMVKRKDSRGKRGRKKLLYIFKQPFMRPVQTTQEEDGCSCRFPEEEEGGCELRVKFSRSADAPAYQQGQNQLYNELNLGRREEYDVLDKRRGRDPEMGGKPQRRKNPQEGLYNELQKDKMAEAYSEIGMKGERRRGKGHDGLYQGLSTATKDTYDALHMQALPPR

SEQ ID NO: 31863 - protein, 305 aa, synthetic construct
ADVSPKPTIFLPSIAETKLQKAGTYLCLLEKFFPDVIKIHWQEKKSNTILGSQEGNTMKTNDTYMKFSWLTVPEKSLDKEHRCIVRHENNKNGVDQEIIADCGFTSESYQQGVLSATILYEILLGKATLYAVLVSALVLMAMVKRKDSRGKRGRKKLLYIFKQPFMRPVQTTQEEDGCSCRFPEEEEGGCELRVKFSRSADAPAYQQGQNQLYNELNLGRREEYDVLDKRRGRDPEMGGKPQRRKNPQEGLYNELQKDKMAEAYSEIGMKGERRRGKGHDGLYQGLSTATKDTYDALHMQALPPR

SEQ ID NO: 31864 - protein, 315 aa, synthetic construct
ADVSPKPTIFLPSIAETKLQKAGTYLCLLEKFFPDVIKIHWQEKKSNTILGSQEGNTMKTNDTYMKFSWLTVPEKSLDKEHRCIVRHENNKNGVDQEIIQIVSAEAWGRADCGFTSESYQQGVLSATILYEILLGKATLYAVLVSALVLMAMVKRKDSRGKRGRKKLLYIFKQPFMRPVQTTQEEDGCSCRFPEEEEGGCELRVKFSRSADAPAYQQGQNQLYNELNLGRREEYDVLDKRRGRDPEMGGKPQRRKNPQEGLYNELQKDKMAEAYSEIGMKGERRRGKGHDGLYQGLSTATKDTYDALHMQALPPR

SEQ ID NO: 31865 - protein, 322 aa, synthetic construct
ADVSPKPTIFLPSIAETKLQKAGTYLCLLEKFFPDVIKIHWQEKKSNTILGSQEGNTMKTNDTYMKFSWLTVPEKSLDKEHRCIVRHENNKNGVDQEIIEVKTDSTDHVKPKETENTKQPSKSCHKPKAIVHTEKVNMMSLTVLGLRMLFAKTVAVNFLLTAKLFFLKRGRKKLLYIFKQPFMRPVQTTQEEDGCSCRFPEEEEGGCELRVKFSRSADAPAYQQGQNQLYNELNLGRREEYDVLDKRRGRDPEMGGKPQRRKNPQEGLYNELQKDKMAEAYSEIGMKGERRRGKGHDGLYQGLSTATKDTYDALHMQALPPR

SEQ ID NO: 31866 - protein, 315 aa, synthetic construct
ADVSPKPTIFLPSIAETKLQKAGTYLCLLEKFFPDVIKIHWQEKKSNTILGSQEGNTMKTNDTYMKFSWLTVPEKSLDKEHRCIVRHENNKNGVDQEIIDHVKPKETENTKQPSKSCHKPKAIVHTEKVNMMSLTVLGLRMLFAKTVAVNFLLTAKLFFLKRGRKKLLYIFKQPFMRPVQTTQEEDGCSCRFPEEEEGGCELRVKFSRSADAPAYQQGQNQLYNELNLGRREEYDVLDKRRGRDPEMGGKPQRRKNPQEGLYNELQKDKMAEAYSEIGMKGERRRGKGHDGLYQGLSTATKDTYDALHMQALPPR

SEQ ID NO: 31867 - protein, 316 aa, synthetic construct
ADVSPKPTIFLPSIAETKLQKAGTYLCLLEKFFPDVIKIHWQEKKSNTILGSQEGNTMKTNDTYMKFSWLTVPEKSLDKEHRCIVRHENNKNGVDQEIIFPIPEDTFFPSPESSCDVKLVEKSFETDTNLNFQNLSVIGFRILLLKVAGFNLLMTLRLWSSKRGRKKLLYIFKQPFMRPVQTTQEEDGCSCRFPEEEEGGCELRVKFSRSADAPAYQQGQNQLYNELNLGRREEYDVLDKRRGRDPEMGGKPQRRKNPQEGLYNELQKDKMAEAYSEIGMKGERRRGKGHDGLYQGLSTATKDTYDALHMQALPPR

SEQ ID NO: 31868 - protein, 306 aa, synthetic construct
ADVSPKPTIFLPSIAETKLQKAGTYLCLLEKFFPDVIKIHWQEKKSNTILGSQEGNTMKTNDTYMKFSWLTVPEKSLDKEHRCIVRHENNKNGVDQEIIFPESSCDVKLVEKSFETDTNLNFQNLSVIGFRILLLKVAGFNLLMTLRLWSSKRGRKKLLYIFKQPFMRPVQTTQEEDGCSCRFPEEEEGGCELRVKFSRSADAPAYQQGQNQLYNELNLGRREEYDVLDKRRGRDPEMGGKPQRRKNPQEGLYNELQKDKMAEAYSEIGMKGERRRGKGHDGLYQGLSTATKDTYDALHMQALPPR

SEQ ID NO: 31869 - protein, 315 aa, synthetic construct
ADVSPKPTIFLPSIAETKLQKAGTYLCLLEKFFPDVIKIHWQEKKSNTILGSQEGNTMKTNDTYMKFSWLTVPEKSLDKEHRCIVRHENNKNGVDQEIIFPPEDTFFPSPESSCDVKLVEKSFETDTNLNFQNLSVIGFRILLLKVAGFNLLMTLRLWSSKRGRKKLLYIFKQPFMRPVQTTQEEDGCSCRFPEEEEGGCELRVKFSRSADAPAYQQGQNQLYNELNLGRREEYDVLDKRRGRDPEMGGKPQRRKNPQEGLYNELQKDKMAEAYSEIGMKGERRRGKGHDGLYQGLSTATKDTYDALHMQALPPR

SEQ ID NO: 31870 - protein, 309 aa, synthetic construct
ADVSPKPTIFLPSIAETKLQKAGTYLCLLEKFFPDVIKIHWQEKKSNTILGSQEGNTMKTNDTYMKFSWLTVPEKSLDKEHRCIVRHENNKNGVDQEIIFPGRADCGFTSESYQQGVLSATILYEILLGKATLYAVLVSALVLMAMVKRKDSRGKRGRKKLLYIFKQPFMRPVQTTQEEDGCSCRFPEEEEGGCELRVKFSRSADAPAYQQGQNQLYNELNLGRREEYDVLDKRRGRDPEMGGKPQRRKNPQEGLYNELQKDKMAEAYSEIGMKGERRRGKGHDGLYQGLSTATKDTYDALHMQALPPR

SEQ ID NO: 31871 - protein, 307 aa, synthetic construct
ADVSPKPTIFLPSIAETKLQKAGTYLCLLEKFFPDVIKIHWQEKKSNTILGSQEGNTMKTNDTYMKFSWLTVPEKSLDKEHRCIVRHENNKNGVDQEIIFPADCGFTSESYQQGVLSATILYEILLGKATLYAVLVSALVLMAMVKRKDSRGKRGRKKLLYIFKQPFMRPVQTTQEEDGCSCRFPEEEEGGCELRVKFSRSADAPAYQQGQNQLYNELNLGRREEYDVLDKRRGRDPEMGGKPQRRKNPQEGLYNELQKDKMAEAYSEIGMKGERRRGKGHDGLYQGLSTATKDTYDALHMQALPPR

SEQ ID NO: 31872 - protein, 317 aa, synthetic construct
ADVSPKPTIFLPSIAETKLQKAGTYLCLLEKFFPDVIKIHWQEKKSNTILGSQEGNTMKTNDTYMKFSWLTVPEKSLDKEHRCIVRHENNKNGVDQEIIFPQIVSAEAWGRADCGFTSESYQQGVLSATILYEILLGKATLYAVLVSALVLMAMVKRKDSRGKRGRKKLLYIFKQPFMRPVQTTQEEDGCSCRFPEEEEGGCELRVKFSRSADAPAYQQGQNQLYNELNLGRREEYDVLDKRRGRDPEMGGKPQRRKNPQEGLYNELQKDKMAEAYSEIGMKGERRRGKGHDGLYQGLSTATKDTYDALHMQALPPR

SEQ ID NO: 31873 - protein, 324 aa, synthetic construct
ADVSPKPTIFLPSIAETKLQKAGTYLCLLEKFFPDVIKIHWQEKKSNTILGSQEGNTMKTNDTYMKFSWLTVPEKSLDKEHRCIVRHENNKNGVDQEIIFPEVKTDSTDHVKPKETENTKQPSKSCHKPKAIVHTEKVNMMSLTVLGLRMLFAKTVAVNFLLTAKLFFLKRGRKKLLYIFKQPFMRPVQTTQEEDGCSCRFPEEEEGGCELRVKFSRSADAPAYQQGQNQLYNELNLGRREEYDVLDKRRGRDPEMGGKPQRRKNPQEGLYNELQKDKMAEAYSEIGMKGERRRGKGHDGLYQGLSTATKDTYDALHMQALPPR

SEQ ID NO: 31874 - protein, 317 aa, synthetic construct
ADVSPKPTIFLPSIAETKLQKAGTYLCLLEKFFPDVIKIHWQEKKSNTILGSQEGNTMKTNDTYMKFSWLTVPEKSLDKEHRCIVRHENNKNGVDQEIIFPDHVKPKETENTKQPSKSCHKPKAIVHTEKVNMMSLTVLGLRMLFAKTVAVNFLLTAKLFFLKRGRKKLLYIFKQPFMRPVQTTQEEDGCSCRFPEEEEGGCELRVKFSRSADAPAYQQGQNQLYNELNLGRREEYDVLDKRRGRDPEMGGKPQRRKNPQEGLYNELQKDKMAEAYSEIGMKGERRRGKGHDGLYQGLSTATKDTYDALHMQALPPR

SEQ ID NO: 31875 - protein, 324 aa, synthetic construct
ADVSPKPTIFLPSIAETKLQKAGTYLCLLEKFFPDVIKIHWQEKKSNTILGSQEGNTMKTNDTYMKFSWLTVPEKSLDKEHRCIVRHENNKNGVDQEIIFPPIKTDVITIPEDTFFPSPESSCDVKLVEKSFETDTNLNFQNLSVIGFRILLLKVAGFNLLMTLRLWSSKRGRKKLLYIFKQPFMRPVQTTQEEDGCSCRFPEEEEGGCELRVKFSRSADAPAYQQGQNQLYNELNLGRREEYDVLDKRRGRDPEMGGKPQRRKNPQEGLYNELQKDKMAEAYSEIGMKGERRRGKGHDGLYQGLSTATKDTYDALHMQALPPR

SEQ ID NO: 31876 - protein, 314 aa, synthetic construct
ADVSPKPTIFLPSIAETKLQKAGTYLCLLEKFFPDVIKIHWQEKKSNTILGSQEGNTMKTNDTYMKFSWLTVPEKSLDKEHRCIVRHENNKNGVDQEIIFPPIKTDVITESSCDVKLVEKSFETDTNLNFQNLSVIGFRILLLKVAGFNLLMTLRLWSSKRGRKKLLYIFKQPFMRPVQTTQEEDGCSCRFPEEEEGGCELRVKFSRSADAPAYQQGQNQLYNELNLGRREEYDVLDKRRGRDPEMGGKPQRRKNPQEGLYNELQKDKMAEAYSEIGMKGERRRGKGHDGLYQGLSTATKDTYDALHMQALPPR

SEQ ID NO: 31877 - protein, 323 aa, synthetic construct
ADVSPKPTIFLPSIAETKLQKAGTYLCLLEKFFPDVIKIHWQEKKSNTILGSQEGNTMKTNDTYMKFSWLTVPEKSLDKEHRCIVRHENNKNGVDQEIIFPPIKTDVITPEDTFFPSPESSCDVKLVEKSFETDTNLNFQNLSVIGFRILLLKVAGFNLLMTLRLWSSKRGRKKLLYIFKQPFMRPVQTTQEEDGCSCRFPEEEEGGCELRVKFSRSADAPAYQQGQNQLYNELNLGRREEYDVLDKRRGRDPEMGGKPQRRKNPQEGLYNELQKDKMAEAYSEIGMKGERRRGKGHDGLYQGLSTATKDTYDALHMQALPPR

SEQ ID NO: 31878 - protein, 317 aa, synthetic construct
ADVSPKPTIFLPSIAETKLQKAGTYLCLLEKFFPDVIKIHWQEKKSNTILGSQEGNTMKTNDTYMKFSWLTVPEKSLDKEHRCIVRHENNKNGVDQEIIFPPIKTDVITGRADCGFTSESYQQGVLSATILYEILLGKATLYAVLVSALVLMAMVKRKDSRGKRGRKKLLYIFKQPFMRPVQTTQEEDGCSCRFPEEEEGGCELRVKFSRSADAPAYQQGQNQLYNELNLGRREEYDVLDKRRGRDPEMGGKPQRRKNPQEGLYNELQKDKMAEAYSEIGMKGERRRGKGHDGLYQGLSTATKDTYDALHMQALPPR

SEQ ID NO: 31879 - protein, 315 aa, synthetic construct
ADVSPKPTIFLPSIAETKLQKAGTYLCLLEKFFPDVIKIHWQEKKSNTILGSQEGNTMKTNDTYMKFSWLTVPEKSLDKEHRCIVRHENNKNGVDQEIIFPPIKTDVITADCGFTSESYQQGVLSATILYEILLGKATLYAVLVSALVLMAMVKRKDSRGKRGRKKLLYIFKQPFMRPVQTTQEEDGCSCRFPEEEEGGCELRVKFSRSADAPAYQQGQNQLYNELNLGRREEYDVLDKRRGRDPEMGGKPQRRKNPQEGLYNELQKDKMAEAYSEIGMKGERRRGKGHDGLYQGLSTATKDTYDALHMQALPPR

SEQ ID NO: 31880 - protein, 325 aa, synthetic construct
ADVSPKPTIFLPSIAETKLQKAGTYLCLLEKFFPDVIKIHWQEKKSNTILGSQEGNTMKTNDTYMKFSWLTVPEKSLDKEHRCIVRHENNKNGVDQEIIFPPIKTDVITQIVSAEAWGRADCGFTSESYQQGVLSATILYEILLGKATLYAVLVSALVLMAMVKRKDSRGKRGRKKLLYIFKQPFMRPVQTTQEEDGCSCRFPEEEEGGCELRVKFSRSADAPAYQQGQNQLYNELNLGRREEYDVLDKRRGRDPEMGGKPQRRKNPQEGLYNELQKDKMAEAYSEIGMKGERRRGKGHDGLYQGLSTATKDTYDALHMQALPPR

SEQ ID NO: 31881 - protein, 332 aa, synthetic construct
ADVSPKPTIFLPSIAETKLQKAGTYLCLLEKFFPDVIKIHWQEKKSNTILGSQEGNTMKTNDTYMKFSWLTVPEKSLDKEHRCIVRHENNKNGVDQEIIFPPIKTDVITEVKTDSTDHVKPKETENTKQPSKSCHKPKAIVHTEKVNMMSLTVLGLRMLFAKTVAVNFLLTAKLFFLKRGRKKLLYIFKQPFMRPVQTTQEEDGCSCRFPEEEEGGCELRVKFSRSADAPAYQQGQNQLYNELNLGRREEYDVLDKRRGRDPEMGGKPQRRKNPQEGLYNELQKDKMAEAYSEIGMKGERRRGKGHDGLYQGLSTATKDTYDALHMQALPPR

SEQ ID NO: 31882 - protein, 325 aa, synthetic construct
ADVSPKPTIFLPSIAETKLQKAGTYLCLLEKFFPDVIKIHWQEKKSNTILGSQEGNTMKTNDTYMKFSWLTVPEKSLDKEHRCIVRHENNKNGVDQEIIFPPIKTDVITDHVKPKETENTKQPSKSCHKPKAIVHTEKVNMMSLTVLGLRMLFAKTVAVNFLLTAKLFFLKRGRKKLLYIFKQPFMRPVQTTQEEDGCSCRFPEEEEGGCELRVKFSRSADAPAYQQGQNQLYNELNLGRREEYDVLDKRRGRDPEMGGKPQRRKNPQEGLYNELQKDKMAEAYSEIGMKGERRRGKGHDGLYQGLSTATKDTYDALHMQALPPR

SEQ ID NO: 31883 - protein, 329 aa, synthetic construct
ADVSPKPTIFLPSIAETKLQKAGTYLCLLEKFFPDVIKIHWQEKKSNTILGSQEGNTMKTNDTYMKFSWLTVPEKSLDKEHRCIVRHENNKNGVDQEIIFPPIKTDVITMDPKDIPEDTFFPSPESSCDVKLVEKSFETDTNLNFQNLSVIGFRILLLKVAGFNLLMTLRLWSSKRGRKKLLYIFKQPFMRPVQTTQEEDGCSCRFPEEEEGGCELRVKFSRSADAPAYQQGQNQLYNELNLGRREEYDVLDKRRGRDPEMGGKPQRRKNPQEGLYNELQKDKMAEAYSEIGMKGERRRGKGHDGLYQGLSTATKDTYDALHMQALPPR

SEQ ID NO: 31884 - protein, 319 aa, synthetic construct
ADVSPKPTIFLPSIAETKLQKAGTYLCLLEKFFPDVIKIHWQEKKSNTILGSQEGNTMKTNDTYMKFSWLTVPEKSLDKEHRCIVRHENNKNGVDQEIIFPPIKTDVITMDPKDESSCDVKLVEKSFETDTNLNFQNLSVIGFRILLLKVAGFNLLMTLRLWSSKRGRKKLLYIFKQPFMRPVQTTQEEDGCSCRFPEEEEGGCELRVKFSRSADAPAYQQGQNQLYNELNLGRREEYDVLDKRRGRDPEMGGKPQRRKNPQEGLYNELQKDKMAEAYSEIGMKGERRRGKGHDGLYQGLSTATKDTYDALHMQALPPR

SEQ ID NO: 31885 - protein, 328 aa, synthetic construct
ADVSPKPTIFLPSIAETKLQKAGTYLCLLEKFFPDVIKIHWQEKKSNTILGSQEGNTMKTNDTYMKFSWLTVPEKSLDKEHRCIVRHENNKNGVDQEIIFPPIKTDVITMDPKDPEDTFFPSPESSCDVKLVEKSFETDTNLNFQNLSVIGFRILLLKVAGFNLLMTLRLWSSKRGRKKLLYIFKQPFMRPVQTTQEEDGCSCRFPEEEEGGCELRVKFSRSADAPAYQQGQNQLYNELNLGRREEYDVLDKRRGRDPEMGGKPQRRKNPQEGLYNELQKDKMAEAYSEIGMKGERRRGKGHDGLYQGLSTATKDTYDALHMQALPPR

SEQ ID NO: 31886 - protein, 322 aa, synthetic construct
ADVSPKPTIFLPSIAETKLQKAGTYLCLLEKFFPDVIKIHWQEKKSNTILGSQEGNTMKTNDTYMKFSWLTVPEKSLDKEHRCIVRHENNKNGVDQEIIFPPIKTDVITMDPKDGRADCGFTSESYQQGVLSATILYEILLGKATLYAVLVSALVLMAMVKRKDSRGKRGRKKLLYIFKQPFMRPVQTTQEEDGCSCRFPEEEEGGCELRVKFSRSADAPAYQQGQNQLYNELNLGRREEYDVLDKRRGRDPEMGGKPQRRKNPQEGLYNELQKDKMAEAYSEIGMKGERRRGKGHDGLYQGLSTATKDTYDALHMQALPPR

SEQ ID NO: 31887 - protein, 320 aa, synthetic construct
ADVSPKPTIFLPSIAETKLQKAGTYLCLLEKFFPDVIKIHWQEKKSNTILGSQEGNTMKTNDTYMKFSWLTVPEKSLDKEHRCIVRHENNKNGVDQEIIFPPIKTDVITMDPKDADCGFTSESYQQGVLSATILYEILLGKATLYAVLVSALVLMAMVKRKDSRGKRGRKKLLYIFKQPFMRPVQTTQEEDGCSCRFPEEEEGGCELRVKFSRSADAPAYQQGQNQLYNELNLGRREEYDVLDKRRGRDPEMGGKPQRRKNPQEGLYNELQKDKMAEAYSEIGMKGERRRGKGHDGLYQGLSTATKDTYDALHMQALPPR

SEQ ID NO: 31888 - protein, 330 aa, synthetic construct
ADVSPKPTIFLPSIAETKLQKAGTYLCLLEKFFPDVIKIHWQEKKSNTILGSQEGNTMKTNDTYMKFSWLTVPEKSLDKEHRCIVRHENNKNGVDQEIIFPPIKTDVITMDPKDQIVSAEAWGRADCGFTSESYQQGVLSATILYEILLGKATLYAVLVSALVLMAMVKRKDSRGKRGRKKLLYIFKQPFMRPVQTTQEEDGCSCRFPEEEEGGCELRVKFSRSADAPAYQQGQNQLYNELNLGRREEYDVLDKRRGRDPEMGGKPQRRKNPQEGLYNELQKDKMAEAYSEIGMKGERRRGKGHDGLYQGLSTATKDTYDALHMQALPPR

SEQ ID NO: 31889 - protein, 337 aa, synthetic construct
ADVSPKPTIFLPSIAETKLQKAGTYLCLLEKFFPDVIKIHWQEKKSNTILGSQEGNTMKTNDTYMKFSWLTVPEKSLDKEHRCIVRHENNKNGVDQEIIFPPIKTDVITMDPKDEVKTDSTDHVKPKETENTKQPSKSCHKPKAIVHTEKVNMMSLTVLGLRMLFAKTVAVNFLLTAKLFFLKRGRKKLLYIFKQPFMRPVQTTQEEDGCSCRFPEEEEGGCELRVKFSRSADAPAYQQGQNQLYNELNLGRREEYDVLDKRRGRDPEMGGKPQRRKNPQEGLYNELQKDKMAEAYSEIGMKGERRRGKGHDGLYQGLSTATKDTYDALHMQALPPR

SEQ ID NO: 31890 - protein, 330 aa, synthetic construct
ADVSPKPTIFLPSIAETKLQKAGTYLCLLEKFFPDVIKIHWQEKKSNTILGSQEGNTMKTNDTYMKFSWLTVPEKSLDKEHRCIVRHENNKNGVDQEIIFPPIKTDVITMDPKDDHVKPKETENTKQPSKSCHKPKAIVHTEKVNMMSLTVLGLRMLFAKTVAVNFLLTAKLFFLKRGRKKLLYIFKQPFMRPVQTTQEEDGCSCRFPEEEEGGCELRVKFSRSADAPAYQQGQNQLYNELNLGRREEYDVLDKRRGRDPEMGGKPQRRKNPQEGLYNELQKDKMAEAYSEIGMKGERRRGKGHDGLYQGLSTATKDTYDALHMQALPPR

SEQ ID NO: 31891 - protein, 324 aa, synthetic construct; identical to SEQ ID NO: 31875

SEQ ID NO: 31892 - protein, 314 aa, synthetic construct; identical to SEQ ID NO: 31876

SEQ ID NO: 31893 - protein, 323 aa, synthetic construct; identical to SEQ ID NO: 31877

SEQ ID NO: 31894 - protein, 317 aa, synthetic construct; identical to SEQ ID NO: 31878

SEQ ID NO: 31895 - protein, 315 aa, synthetic construct; identical to SEQ ID NO: 31879

SEQ ID NO: 31896 - protein, 325 aa, synthetic construct; identical to SEQ ID NO: 31880

SEQ ID NO: 31897 - protein, 332 aa, synthetic construct; identical to SEQ ID NO: 31881

SEQ ID NO: 31898 - protein, 325 aa, synthetic construct; identical to SEQ ID NO: 31882

SEQ ID NO: 31899 - protein, 298 aa, synthetic construct
PHTKPSVFVMKNGTNVACLVKEFYPKDIRINLVSSKKITEFDPAIVISPSGKYNAVKLGKYEDSNSVTCSVQHDNKTVHSTDFIPEDTFFPSPESSCDVKLVEKSFETDTNLNFQNLSVIGFRILLLKVAGFNLLMTLRLWSSKRGRKKLLYIFKQPFMRPVQTTQEEDGCSCRFPEEEEGGCELRVKFSRSADAPAYQQGQNQLYNELNLGRREEYDVLDKRRGRDPEMGGKPQRRKNPQEGLYNELQKDKMAEAYSEIGMKGERRRGKGHDGLYQGLSTATKDTYDALHMQALPPR

SEQ ID NO: 31900 - protein, 288 aa, synthetic construct
PHTKPSVFVMKNGTNVACLVKEFYPKDIRINLVSSKKITEFDPAIVISPSGKYNAVKLGKYEDSNSVTCSVQHDNKTVHSTDFESSCDVKLVEKSFETDTNLNFQNLSVIGFRILLLKVAGFNLLMTLRLWSSKRGRKKLLYIFKQPFMRPVQTTQEEDGCSCRFPEEEEGGCELRVKFSRSADAPAYQQGQNQLYNELNLGRREEYDVLDKRRGRDPEMGGKPQRRKNPQEGLYNELQKDKMAEAYSEIGMKGERRRGKGHDGLYQGLSTATKDTYDALHMQALPPR

SEQ ID NO: 31901 - protein, 297 aa, synthetic construct
PHTKPSVFVMKNGTNVACLVKEFYPKDIRINLVSSKKITEFDPAIVISPSGKYNAVKLGKYEDSNSVTCSVQHDNKTVHSTDFPEDTFFPSPESSCDVKLVEKSFETDTNLNFQNLSVIGFRILLLKVAGFNLLMTLRLWSSKRGRKKLLYIFKQPFMRPVQTTQEEDGCSCRFPEEEEGGCELRVKFSRSADAPAYQQGQNQLYNELNLGRREEYDVLDKRRGRDPEMGGKPQRRKNPQEGLYNELQKDKMAEAYSEIGMKGERRRGKGHDGLYQGLSTATKDTYDALHMQALPPR

SEQ ID NO: 31902 - protein, 291 aa, synthetic construct
PHTKPSVFVMKNGTNVACLVKEFYPKDIRINLVSSKKITEFDPAIVISPSGKYNAVKLGKYEDSNSVTCSVQHDNKTVHSTDFGRADCGFTSESYQQGVLSATILYEILLGKATLYAVLVSALVLMAMVKRKDSRGKRGRKKLLYIFKQPFMRPVQTTQEEDGCSCRFPEEEEGGCELRVKFSRSADAPAYQQGQNQLYNELNLGRREEYDVLDKRRGRDPEMGGKPQRRKNPQEGLYNELQKDKMAEAYSEIGMKGERRRGKGHDGLYQGLSTATKDTYDALHMQALPPR

SEQ ID NO: 31903 - protein, 289 aa, synthetic construct
PHTKPSVFVMKNGTNVACLVKEFYPKDIRINLVSSKKITEFDPAIVISPSGKYNAVKLGKYEDSNSVTCSVQHDNKTVHSTDFADCGFTSESYQQGVLSATILYEILLGKATLYAVLVSALVLMAMVKRKDSRGKRGRKKLLYIFKQPFMRPVQTTQEEDGCSCRFPEEEEGGCELRVKFSRSADAPAYQQGQNQLYNELNLGRREEYDVLDKRRGRDPEMGGKPQRRKNPQEGLYNELQKDKMAEAYSEIGMKGERRRGKGHDGLYQGLSTATKDTYDALHMQALPPR

SEQ ID NO: 31904 - protein, 299 aa, synthetic construct
PHTKPSVFVMKNGTNVACLVKEFYPKDIRINLVSSKKITEFDPAIVISPSGKYNAVKLGKYEDSNSVTCSVQHDNKTVHSTDFQIVSAEAWGRADCGFTSESYQQGVLSATILYEILLGKATLYAVLVSALVLMAMVKRKDSRGKRGRKKLLYIFKQPFMRPVQTTQEEDGCSCRFPEEEEGGCELRVKFSRSADAPAYQQGQNQLYNELNLGRREEYDVLDKRRGRDPEMGGKPQRRKNPQEGLYNELQKDKMAEAYSEIGMKGERRRGKGHDGLYQGLSTATKDTYDALHMQALPPR

SEQ ID NO: 31905 - protein, 307 aa, synthetic construct
PHTKPSVFVMKNGTNVACLVKEFYPKDIRINLVSSKKITEFDPAIVISPSGKYNAVKLGKYEDSNSVTCSVQHDNKTVHSTDFFPPIKTDVITMDPKDNCSKDANDTLLLQLTNTSAYYMYLLLLLKSVVYFAIITCCLLRRTAFCCNGEKSKRGRKKLLYIFKQPFMRPVQTTQEEDGCSCRFPEEEEGGCELRVKFSRSADAPAYQQGQNQLYNELNLGRREEYDVLDKRRGRDPEMGGKPQRRKNPQEGLYNELQKDKMAEAYSEIGMKGERRRGKGHDGLYQGLSTATKDTYDALHMQALPPR

SEQ ID NO: 31906 - protein, 305 aa, synthetic construct
PHTKPSVFVMKNGTNVACLVKEFYPKDIRINLVSSKKITEFDPAIVISPSGKYNAVKLGKYEDSNSVTCSVQHDNKTVHSTDFPIKTDVITMDPKDNCSKDANDTLLLQLTNTSAYYMYLLLLLKSVVYFAIITCCLLRRTAFCCNGEKSKRGRKKLLYIFKQPFMRPVQTTQEEDGCSCRFPEEEEGGCELRVKFSRSADAPAYQQGQNQLYNELNLGRREEYDVLDKRRGRDPEMGGKPQRRKNPQEGLYNELQKDKMAEAYSEIGMKGERRRGKGHDGLYQGLSTATKDTYDALHMQALPPR

SEQ ID NO: 31907 - protein, 297 aa, synthetic construct
PHTKPSVFVMKNGTNVACLVKEFYPKDIRINLVSSKKITEFDPAIVISPSGKYNAVKLGKYEDSNSVTCSVQHDNKTVHSTDFMDPKDNCSKDANDTLLLQLTNTSAYYMYLLLLLKSVVYFAIITCCLLRRTAFCCNGEKSKRGRKKLLYIFKQPFMRPVQTTQEEDGCSCRFPEEEEGGCELRVKFSRSADAPAYQQGQNQLYNELNLGRREEYDVLDKRRGRDPEMGGKPQRRKNPQEGLYNELQKDKMAEAYSEIGMKGERRRGKGHDGLYQGLSTATKDTYDALHMQALPPR

SEQ ID NO: 31908 - protein, 306 aa, synthetic construct; identical to SEQ ID NO: 31228

SEQ ID NO: 31909 - protein, 299 aa, synthetic construct
PHTKPSVFVMKNGTNVACLVKEFYPKDIRINLVSSKKITEFDPAIVISPSGKYNAVKLGKYEDSNSVTCSVQHDNKTVHSTDFDHVKPKETENTKQPSKSCHKPKAIVHTEKVNMMSLTVLGLRMLFAKTVAVNFLLTAKLFFLKRGRKKLLYIFKQPFMRPVQTTQEEDGCSCRFPEEEEGGCELRVKFSRSADAPAYQQGQNQLYNELNLGRREEYDVLDKRRGRDPEMGGKPQRRKNPQEGLYNELQKDKMAEAYSEIGMKGERRRGKGHDGLYQGLSTATKDTYDALHMQALPPR

SEQ ID NO: 31910 - protein, 305 aa, synthetic construct
PHTKPSVFVMKNGTNVACLVKEFYPKDIRINLVSSKKITEFDPAIVISPSGKYNAVKLGKYEDSNSVTCSVQHDNKTVHSTDFEVKTDSTIPEDTFFPSPESSCDVKLVEKSFETDTNLNFQNLSVIGFRILLLKVAGFNLLMTLRLWSSKRGRKKLLYIFKQPFMRPVQTTQEEDGCSCRFPEEEEGGCELRVKFSRSADAPAYQQGQNQLYNELNLGRREEYDVLDKRRGRDPEMGGKPQRRKNPQEGLYNELQKDKMAEAYSEIGMKGERRRGKGHDGLYQGLSTATKDTYDALHMQALPPR

SEQ ID NO: 31911 - protein, 295 aa, synthetic construct
PHTKPSVFVMKNGTNVACLVKEFYPKDIRINLVSSKKITEFDPAIVISPSGKYNAVKLGKYEDSNSVTCSVQHDNKTVHSTDFEVKTDSTESSCDVKLVEKSFETDTNLNFQNLSVIGFRILLLKVAGFNLLMTLRLWSSKRGRKKLLYIFKQPFMRPVQTTQEEDGCSCRFPEEEEGGCELRVKFSRSADAPAYQQGQNQLYNELNLGRREEYDVLDKRRGRDPEMGGKPQRRKNPQEGLYNELQKDKMAEAYSEIGMKGERRRGKGHDGLYQGLSTATKDTYDALHMQALPPR

SEQ ID NO: 31912 - protein, 304 aa, synthetic construct
PHTKPSVFVMKNGTNVACLVKEFYPKDIRINLVSSKKITEFDPAIVISPSGKYNAVKLGKYEDSNSVTCSVQHDNKTVHSTDFEVKTDSTPEDTFFPSPESSCDVKLVEKSFETDTNLNFQNLSVIGFRILLLKVAGFNLLMTLRLWSSKRGRKKLLYIFKQPFMRPVQTTQEEDGCSCRFPEEEEGGCELRVKFSRSADAPAYQQGQNQLYNELNLGRREEYDVLDKRRGRDPEMGGKPQRRKNPQEGLYNELQKDKMAEAYSEIGMKGERRRGKGHDGLYQGLSTATKDTYDALHMQALPPR

SEQ ID NO: 31913 - protein, 298 aa, synthetic construct
PHTKPSVFVMKNGTNVACLVKEFYPKDIRINLVSSKKITEFDPAIVISPSGKYNAVKLGKYEDSNSVTCSVQHDNKTVHSTDFEVKTDSTGRADCGFTSESYQQGVLSATILYEILLGKATLYAVLVSALVLMAMVKRKDSRGKRGRKKLLYIFKQPFMRPVQTTQEEDGCSCRFPEEEEGGCELRVKFSRSADAPAYQQGQNQLYNELNLGRREEYDVLDKRRGRDPEMGGKPQRRKNPQEGLYNELQKDKMAEAYSEIGMKGERRRGKGHDGLYQGLSTATKDTYDALHMQALPPR

SEQ ID NO: 31914 - protein, 296 aa, synthetic construct
PHTKPSVFVMKNGTNVACLVKEFYPKDIRINLVSSKKITEFDPAIVISPSGKYNAVKLGKYEDSNSVTCSVQHDNKTVHSTDFEVKTDSTADCGFTSESYQQGVLSATILYEILLGKATLYAVLVSALVLMAMVKRKDSRGKRGRKKLLYIFKQPFMRPVQTTQEEDGCSCRFPEEEEGGCELRVKFSRSADAPAYQQGQNQLYNELNLGRREEYDVLDKRRGRDPEMGGKPQRRKNPQEGLYNELQKDKMAEAYSEIGMKGERRRGKGHDGLYQGLSTATKDTYDALHMQALPPR

SEQ ID NO: 31915 - protein, 306 aa, synthetic construct
PHTKPSVFVMKNGTNVACLVKEFYPKDIRINLVSSKKITEFDPAIVISPSGKYNAVKLGKYEDSNSVTCSVQHDNKTVHSTDFEVKTDSTQIVSAEAWGRADCGFTSESYQQGVLSATILYEILLGKATLYAVLVSALVLMAMVKRKDSRGKRGRKKLLYIFKQPFMRPVQTTQEEDGCSCRFPEEEEGGCELRVKFSRSADAPAYQQGQNQLYNELNLGRREEYDVLDKRRGRDPEMGGKPQRRKNPQEGLYNELQKDKMAEAYSEIGMKGERRRGKGHDGLYQGLSTATKDTYDALHMQALPPR

SEQ ID NO: 31916 - protein, 314 aa, synthetic construct
PHTKPSVFVMKNGTNVACLVKEFYPKDIRINLVSSKKITEFDPAIVISPSGKYNAVKLGKYEDSNSVTCSVQHDNKTVHSTDFEVKTDSTFPPIKTDVITMDPKDNCSKDANDTLLLQLTNTSAYYMYLLLLLKSVVYFAIITCCLLRRTAFCCNGEKSKRGRKKLLYIFKQPFMRPVQTTQEEDGCSCRFPEEEEGGCELRVKFSRSADAPAYQQGQNQLYNELNLGRREEYDVLDKRRGRDPEMGGKPQRRKNPQEGLYNELQKDKMAEAYSEIGMKGERRRGKGHDGLYQGLSTATKDTYDALHMQALPPR

SEQ ID NO: 31917 - protein, 312 aa, synthetic construct
PHTKPSVFVMKNGTNVACLVKEFYPKDIRINLVSSKKITEFDPAIVISPSGKYNAVKLGKYEDSNSVTCSVQHDNKTVHSTDFEVKTDSTPIKTDVITMDPKDNCSKDANDTLLLQLTNTSAYYMYLLLLLKSVVYFAIITCCLLRRTAFCCNGEKSKRGRKKLLYIFKQPFMRPVQTTQEEDGCSCRFPEEEEGGCELRVKFSRSADAPAYQQGQNQLYNELNLGRREEYDVLDKRRGRDPEMGGKPQRRKNPQEGLYNELQKDKMAEAYSEIGMKGERRRGKGHDGLYQGLSTATKDTYDALHMQALPPR

SEQ ID NO: 31918 - protein, 304 aa, synthetic construct
PHTKPSVFVMKNGTNVACLVKEFYPKDIRINLVSSKKITEFDPAIVISPSGKYNAVKLGKYEDSNSVTCSVQHDNKTVHSTDFEVKTDSTMDPKDNCSKDANDTLLLQLTNTSAYYMYLLLLLKSVVYFAIITCCLLRRTAFCCNGEKSKRGRKKLLYIFKQPFMRPVQTTQEEDGCSCRFPEEEEGGCELRVKFSRSADAPAYQQGQNQLYNELNLGRREEYDVLDKRRGRDPEMGGKPQRRKNPQEGLYNELQKDKMAEAYSEIGMKGERRRGKGHDGLYQGLSTATKDTYDALHMQALPPR

SEQ ID NO: 31919 - protein, 312 aa, synthetic construct; identical to SEQ ID NO: 31917

SEQ ID NO: 31920 - protein, 298 aa, synthetic construct
PHTKPSVFVMKNGTNVACLVKEFYPKDIRINLVSSKKITEFDPAIVISPSGKYNAVKLGKYEDSNSVTCSVQHDNKTVHSTDFEVKTDSTCSKDANDTLLLQLTNTSAYYMYLLLLLKSVVYFAIITCCLLRRTAFCCNGEKSKRGRKKLLYIFKQPFMRPVQTTQEEDGCSCRFPEEEEGGCELRVKFSRSADAPAYQQGQNQLYNELNLGRREEYDVLDKRRGRDPEMGGKPQRRKNPQEGLYNELQKDKMAEAYSEIGMKGERRRGKGHDGLYQGLSTATKDTYDALHMQALPPR

SEQ ID NO: 31921 - protein, 298 aa, synthetic construct; identical to SEQ ID NO: 31899

SEQ ID NO: 31922 - protein, 288 aa, synthetic construct; identical to SEQ ID NO: 31900

SEQ ID NO: 31923 - protein, 297 aa, synthetic construct; identical to SEQ ID NO: 31901

SEQ ID NO: 31924 - protein, 291 aa, synthetic construct; identical to SEQ ID NO: 31902

SEQ ID NO: 31925 - protein, 289 aa, synthetic construct; identical to SEQ ID NO: 31903

SEQ ID NO: 31926 - protein, 299 aa, synthetic construct; identical to SEQ ID NO: 31904

SEQ ID NO: 31927 - protein, 307 aa, synthetic construct; identical to SEQ ID NO: 31905

SEQ ID NO: 31928 - protein, 305 aa, synthetic construct; identical to SEQ ID NO: 31906

SEQ ID NO: 31929 - protein, 297 aa, synthetic construct; identical to SEQ ID NO: 31907

SEQ ID NO: 31930 - protein, 305 aa, synthetic construct; identical to SEQ ID NO: 31906

SEQ ID NO: 31931 - protein, 291 aa, synthetic construct
PHTKPSVFVMKNGTNVACLVKEFYPKDIRINLVSSKKITEFDPAIVISPSGKYNAVKLGKYEDSNSVTCSVQHDNKTVHSTDFCSKDANDTLLLQLTNTSAYYMYLLLLLKSVVYFAIITCCLLRRTAFCCNGEKSKRGRKKLLYIFKQPFMRPVQTTQEEDGCSCRFPEEEEGGCELRVKFSRSADAPAYQQGQNQLYNELNLGRREEYDVLDKRRGRDPEMGGKPQRRKNPQEGLYNELQKDKMAEAYSEIGMKGERRRGKGHDGLYQGLSTATKDTYDALHMQALPPR

SEQ ID NO: 31932 - protein, 305 aa, synthetic construct; identical to SEQ ID NO: 31910

SEQ ID NO: 31933 - protein, 295 aa, synthetic construct; identical to SEQ ID NO: 31911

SEQ ID NO: 31934 - protein, 304 aa, synthetic construct; identical to SEQ ID NO: 31912

SEQ ID NO: 31935 - protein, 298 aa, synthetic construct; identical to SEQ ID NO: 31913

SEQ ID NO: 31936 - protein, 296 aa, synthetic construct; identical to SEQ ID NO: 31914

SEQ ID NO: 31937 - protein, 306 aa, synthetic construct; identical to SEQ ID NO: 31915

SEQ ID NO: 31938 - protein, 314 aa, synthetic construct; identical to SEQ ID NO: 31916

SEQ ID NO: 31939 - protein, 312 aa, synthetic construct; identical to SEQ ID NO: 31917

SEQ ID NO: 31940 - protein, 304 aa, synthetic construct; identical to SEQ ID NO: 31918

SEQ ID NO: 31941 - protein, 312 aa, synthetic construct; identical to SEQ ID NO: 31917

SEQ ID NO: 31942 - protein, 298 aa, synthetic construct; identical to SEQ ID NO: 31920

SEQ ID NO: 31943 - protein, 295 aa, synthetic construct
IQNPDPAVYQLRDSKSSDKSVCLFTDFDSQTNVSQSKDSDVYITDKCVLDMRSMDFKSNSAVAWSNKSDFACANAFNNSIIPEDTFFPSPESSCDVKLVEKSFETDTNLNFQNLSVIGLRMLFAKTVAVNFLLTAKLFFLKRGRKKLLYIFKQPFMRPVQTTQEEDGCSCRFPEEEEGGCELRVKFSRSADAPAYQQGQNQLYNELNLGRREEYDVLDKRRGRDPEMGGKPQRRKNPQEGLYNELQKDKMAEAYSEIGMKGERRRGKGHDGLYQGLSTATKDTYDALHMQALPPR

SEQ ID NO: 31944 - protein, 295 aa, synthetic construct
IQNPDPAVYQLRDSKSSDKSVCLFTDFDSQTNVSQSKDSDVYITDKCVLDMRSMDFKSNSAVAWSNKSDFACANAFNNSIIPEDTFFPSPESSCDVKLVEKSFETDTNLNFQNLSVLGLRMLFAKTVAVNFLLTAKLFFLKRGRKKLLYIFKQPFMRPVQTTQEEDGCSCRFPEEEEGGCELRVKFSRSADAPAYQQGQNQLYNELNLGRREEYDVLDKRRGRDPEMGGKPQRRKNPQEGLYNELQKDKMAEAYSEIGMKGERRRGKGHDGLYQGLSTATKDTYDALHMQALPPR

SEQ ID NO: 31945 - protein, 295 aa, synthetic construct; identical to SEQ ID NO: 31944

SEQ ID NO: 31946 - protein, 308 aa, synthetic construct
SQPHTKPSVFVMKNGTNVACLVKEFYPKDIRINLVSSKKITEFDPAIVISPSGKYNAVKLGKYEDSNSVTCSVQHDNKTVHSTDFEVKTDSTDHVKPKETENTKQPSKSCHKPKAIVHTEKVNMMSLTVLGFRILLLKVAGFNLLMTLRLWSSKRGRKKLLYIFKQPFMRPVQTTQEEDGCSCRFPEEEEGGCELRVKFSRSADAPAYQQGQNQLYNELNLGRREEYDVLDKRRGRDPEMGGKPQRRKNPQEGLYNELQKDKMAEAYSEIGMKGERRRGKGHDGLYQGLSTATKDTYDALHMQALPPR

SEQ ID NO: 31947 - protein, 308 aa, synthetic construct
SQPHTKPSVFVMKNGTNVACLVKEFYPKDIRINLVSSKKITEFDPAIVISPSGKYNAVKLGKYEDSNSVTCSVQHDNKTVHSTDFEVKTDSTDHVKPKETENTKQPSKSCHKPKAIVHTEKVNMMSLTVIGFRILLLKVAGFNLLMTLRLWSSKRGRKKLLYIFKQPFMRPVQTTQEEDGCSCRFPEEEEGGCELRVKFSRSADAPAYQQGQNQLYNELNLGRREEYDVLDKRRGRDPEMGGKPQRRKNPQEGLYNELQKDKMAEAYSEIGMKGERRRGKGHDGLYQGLSTATKDTYDALHMQALPPR

SEQ ID NO: 31948 - protein, 335 aa, synthetic construct
EDLKNVFPPEVAVFEPSEAEISHTQKATLVCLATGFYPDHVELSWWVNGKEVHSGVCTDPQPLKEQPALNDSRYCLSSRLRVSATFWQNPRNHFRCQVQFYGLSENDEWTQDRAKPVTQIVSAEAWGRADCGFTSESYQQGVLSATILYLLLLLKSVVYFAIITCCLLRRTAFCCNGEKSKRGRKKLLYIFKQPFMRPVQTTQEEDGCSCRFPEEEEGGCELRVKFSRSADAPAYQQGQNQLYNELNLGRREEYDVLDKRRGRDPEMGGKPQRRKNPQEGLYNELQKDKMAEAYSEIGMKGERRRGKGHDGLYQGLSTATKDTYDALHMQALPPR

SEQ ID NO: 31949 - protein, 335 aa, synthetic construct
EDLKNVFPPEVAVFEPSEAEISHTQKATLVCLATGFYPDHVELSWWVNGKEVHSGVCTDPQPLKEQPALNDSRYCLSSRLRVSATFWQNPRNHFRCQVQFYGLSENDEWTQDRAKPVTQIVSAEAWGRADCGFTSESYQQGVLSAYYMYLLLLLKSVVYFAIITCCLLRRTAFCCNGEKSKRGRKKLLYIFKQPFMRPVQTTQEEDGCSCRFPEEEEGGCELRVKFSRSADAPAYQQGQNQLYNELNLGRREEYDVLDKRRGRDPEMGGKPQRRKNPQEGLYNELQKDKMAEAYSEIGMKGERRRGKGHDGLYQGLSTATKDTYDALHMQALPPR

SEQ ID NO: 31950 - protein, 327 aa, synthetic construct
DKQLDADVSPKPTIFLPSIAETKLQKAGTYLCLLEKFFPDVIKIHWQEKKSNTILGSQEGNTMKTNDTYMKFSWLTVPEKSLDKEHRCIVRHENNKNGVDQEIIFPPIKTDVITMDPKDNCSKDANDTLLLQLTNTSAYYMYEILLGKATLYAVLVSALVLMAMVKRKDSRGKRGRKKLLYIFKQPFMRPVQTTQEEDGCSCRFPEEEEGGCELRVKFSRSADAPAYQQGQNQLYNELNLGRREEYDVLDKRRGRDPEMGGKPQRRKNPQEGLYNELQKDKMAEAYSEIGMKGERRRGKGHDGLYQGLSTATKDTYDALHMQALPPR

SEQ ID NO: 31951 - protein, 327 aa, synthetic construct
DKQLDADVSPKPTIFLPSIAETKLQKAGTYLCLLEKFFPDVIKIHWQEKKSNTILGSQEGNTMKTNDTYMKFSWLTVPEKSLDKEHRCIVRHENNKNGVDQEIIFPPIKTDVITMDPKDNCSKDANDTLLLQLTNTSATILYEILLGKATLYAVLVSALVLMAMVKRKDSRGKRGRKKLLYIFKQPFMRPVQTTQEEDGCSCRFPEEEEGGCELRVKFSRSADAPAYQQGQNQLYNELNLGRREEYDVLDKRRGRDPEMGGKPQRRKNPQEGLYNELQKDKMAEAYSEIGMKGERRRGKGHDGLYQGLSTATKDTYDALHMQALPPR

SEQ ID NO: 31952 - protein, 334 aa, synthetic construct
EDLKNVFPPEVAVFEPSEAEISHTQKATLVCLATGFYPDHVELSWWVNGKEVHSGVCTDPQPLKEQPALNDSRYCLSSRLRVSATFWQNPRNHFRCQVQFYGLSENDEWTQDRAKPVTQIVSAEAWGRADSGFTSESYQQGVLSATILYEILLGKATLYAVLVSALVLMAMVKRKDSRGKRGRKKLLYIFKQPFMRPVQTTQEEDGCSCRFPEEEEGGCELRVKFSRSADAPAYQQGQNQLYNELNLGRREEYDVLDKRRGRDPEMGGKPQRRKNPQEGLYNELQKDKMAEAYSEIGMKGERRRGKGHDGLYQGLSTATKDTYDALHMQALPPR

SEQ ID NO: 31953 - protein, 295 aa, synthetic construct
IQNPDPAVYQLRDSKSSDKSVCLFTDFDSQTNVSQSKDSDVYITDKCVLDMRSMDFKSNSAVAWSNKSDFACANAFNNSIIPEDTFFPSPESSSDVKLVEKSFETDTNLNFQNLSVIGFRILLLKVAGFNLLMTLRLWSSKRGRKKLLYIFKQPFMRPVQTTQEEDGCSCRFPEEEEGGCELRVKFSRSADAPAYQQGQNQLYNELNLGRREEYDVLDKRRGRDPEMGGKPQRRKNPQEGLYNELQKDKMAEAYSEIGMKGERRRGKGHDGLYQGLSTATKDTYDALHMQALPPR

SEQ ID NO: 31954 - protein, 334 aa, synthetic construct
EDLKNVFPPEVAVFEPSEAEISHTQKATLVCLATGFYPDHVELSWWVNGKEVHSGVCTDPQPLKEQPALNDSRYCLSSRLRVSATFWQNPRNHFRCQVQFYGLSENDEWTQDRAKPVTQIVSAEAWGRADGGFTSESYQQGVLSATILYEILLGKATLYAVLVSALVLMAMVKRKDSRGKRGRKKLLYIFKQPFMRPVQTTQEEDGCSCRFPEEEEGGCELRVKFSRSADAPAYQQGQNQLYNELNLGRREEYDVLDKRRGRDPEMGGKPQRRKNPQEGLYNELQKDKMAEAYSEIGMKGERRRGKGHDGLYQGLSTATKDTYDALHMQALPPR

SEQ ID NO: 31955 - protein, 295 aa, synthetic construct
IQNPDPAVYQLRDSKSSDKSVCLFTDFDSQTNVSQSKDSDVYITDKCVLDMRSMDFKSNSAVAWSNKSDFACANAFNNSIIPEDTFFPSPESSRDVKLVEKSFETDTNLNFQNLSVIGFRILLLKVAGFNLLMTLRLWSSKRGRKKLLYIFKQPFMRPVQTTQEEDGCSCRFPEEEEGGCELRVKFSRSADAPAYQQGQNQLYNELNLGRREEYDVLDKRRGRDPEMGGKPQRRKNPQEGLYNELQKDKMAEAYSEIGMKGERRRGKGHDGLYQGLSTATKDTYDALHMQALPPR

SEQ ID NO: 31956 - protein, 616 aa, synthetic construct
MALPVTALLLPLALLLHAARPDIQMTQSPSSLSASVGDRVTITCKASQDVGTAVDWYQQKPGKAPKLLIYWASTRHTGVPSRFSGSGSGTDFTLTISSLQPEDFATYYCQQYNSYPLTFGQGTKVEIKRLEDLKNVFPPEVAVFEPSEAEISHTQKATLVCLATGFYPDHVELSWWVNGKEVHSGVCTDPQPLKEQPALNDSRYCLSSRLRVSATFWQNPRNHFRCQVQFYGLSENDEWTQDRAKPVTQIVSAEAWGRADCGFTSESYQQGVLSATILYEILLGKATLYAVLVSALVLMAMVKRKDSRGRAKRSGSGATNFSLLKQAGDVEENPGPTSMDWIWRILFLVGAATGAHSFEEVQLVESGGGLVQPGGSLRLSCAASGYTFTEYTIHWVRQAPGKGLEWVANINPNNGGTTYNQKFEDRFTISRDNSKNTLYLQMNSLRAEDTAVYYCARGWNFDYWGQGTLVTVSSTRIQNPDPAVYQLRDSKSSDKSVCLFTDFDSQTNVSQSKDSDVYITDKCVLDMRSMDFKSNSAVAWSNKSDFACANAFNNSIIPEDTFFPSPESSCDVKLVEKSFETDTNLNFQNLSVIGFRILLLKVAGFNLLMTLRLWSS

SEQ ID NO: 31957 - protein, 735 aa, synthetic construct
MALPVTALLLPLALLLHAARPDIQMTQSPSSLSASVGDRVTITCKASDHINNWLAWYQQKPGQAPKLLIYGATTLETGVPSRFSGSGSGTDYTLTISSLQPEDFATYYCQQSWNTPWTFGQGTKLEIKRLEDLKNVFPPEVAVFEPSEAEISHTQKATLVCLATGFYPDHVELSWWVNGKEVHSGVCTDPQPLKEQPALNDSRYCLSSRLRVSATFWQNPRNHFRCQVQFYGLSENDEWTQDRAKPVTQIVSAEAWGRADCGFTSESYQQGVLSATILYEILLGKATLYAVLVSALVLMAMVKRKDSRGRVKFSRSADAPAYQQGQNQLYNELNLGRREEYDVLDKRRGRDPEMGGKPQRRKNPQEGLYNELQKDKMAEAYSEIGMKGERRRGKGHDGLYQGLSTATKDTYDALHMQALPPRRAKRSGSGATNFSLLKQAGDVEENPGPTSMDWIWRILFLVGAATGAHSFEQVQLQQPGAELVKPGASVKMSCKASGYAFSSYWINWMKQKPGQGLEWIGQIYPGDGDTNYNGKFKGRATLTADTSSSTAYMQLSSLTSEDSAVYFCARSITTVVGCAMDYWGQGTSVTVSSTRIQNPDPAVYQLRDSKSSDKSVCLFTDFDSQTNVSQSKDSDVYITDKCVLDMRSMDFKSNSAVAWSNKSDFACANAFNNSIIPEDTFFPSPESSCDVKLVEKSFETDTNLNFQNLSVIGFRILLLKVAGFNLLMTLRLWSS

SEQ ID NO: 31958 - protein, 776 aa, synthetic construct
MALPVTALLLPLALLLHAARPDIQMTQSPSSLSASVGDRVTITCKASDHINNWLAWYQQKPGQAPKLLIYGATTLETGVPSRFSGSGSGTDYTLTISSLQPEDFATYYCQQSWNTPWTFGQGTKLEIKRLEDLKNVFPPEVAVFEPSEAEISHTQKATLVCLATGFYPDHVELSWWVNGKEVHSGVCTDPQPLKEQPALNDSRYCLSSRLRVSATFWQNPRNHFRCQVQFYGLSENDEWTQDRAKPVTQIVSAEAWGRADCGFTSESYQQGVLSATILYEILLGKATLYAVLVSALVLMAMVKRKDSRGRSKRSRLLHSDYMNMTPRRPGPTRKHYQPYAPPRDFAAYRSRVKFSRSADAPAYQQGQNQLYNELNLGRREEYDVLDKRRGRDPEMGGKPQRRKNPQEGLYNELQKDKMAEAYSEIGMKGERRRGKGHDGLYQGLSTATKDTYDALHMQALPPRRAKRSGSGATNFSLLKQAGDVEENPGPTSMDWIWRILFLVGAATGAHSFEQVQLQQPGAELVKPGASVKMSCKASGYAFSSYWINWMKQKPGQGLEWIGQIYPGDGDTNYNGKFKGRATLTADTSSSTAYMQLSSLTSEDSAVYFCARSITTVVGCAMDYWGQGTSVTVSSTRIQNPDPAVYQLRDSKSSDKSVCLFTDFDSQTNVSQSKDSDVYITDKCVLDMRSMDFKSNSAVAWSNKSDFACANAFNNSIIPEDTFFPSPESSCDVKLVEKSFETDTNLNFQNLSVIGFRILLLKVAGFNLLMTLRLWSS

SEQ ID NO: 31959 - protein, 777 aa, synthetic construct
MALPVTALLLPLALLLHAARPDIQMTQSPSSLSASVGDRVTITCKASDHINNWLAWYQQKPGQAPKLLIYGATTLETGVPSRFSGSGSGTDYTLTISSLQPEDFATYYCQQSWNTPWTFGQGTKLEIKRLEDLKNVFPPEVAVFEPSEAEISHTQKATLVCLATGFYPDHVELSWWVNGKEVHSGVCTDPQPLKEQPALNDSRYCLSSRLRVSATFWQNPRNHFRCQVQFYGLSENDEWTQDRAKPVTQIVSAEAWGRADCGFTSESYQQGVLSATILYEILLGKATLYAVLVSALVLMAMVKRKDSRGKRGRKKLLYIFKQPFMRPVQTTQEEDGCSCRFPEEEEGGCELRVKFSRSADAPAYQQGQNQLYNELNLGRREEYDVLDKRRGRDPEMGGKPQRRKNPQEGLYNELQKDKMAEAYSEIGMKGERRRGKGHDGLYQGLSTATKDTYDALHMQALPPRRAKRSGSGATNFSLLKQAGDVEENPGPTSMDWIWRILFLVGAATGAHSFEQVQLQQPGAELVKPGASVKMSCKASGYAFSSYWINWMKQKPGQGLEWIGQIYPGDGDTNYNGKFKGRATLTADTSSSTAYMQLSSLTSEDSAVYFCARSITTVVGCAMDYWGQGTSVTVSSTRIQNPDPAVYQLRDSKSSDKSVCLFTDFDSQTNVSQSKDSDVYITDKCVLDMRSMDFKSNSAVAWSNKSDFACANAFNNSIIPEDTFFPSPESSCDVKLVEKSFETDTNLNFQNLSVIGFRILLLKVAGFNLLMTLRLWSS

SEQ ID NO: 31960 - protein, 735 aa, synthetic construct
MALPVTALLLPLALLLHAARPDIQMTQSPSSLSASVGDRVTITCKASDHINNWLAWYQQKPGQAPKLLIYGATTLETGVPSRFSGSGSGTDYTLTISSLQPEDFATYYCQQSWNTPWTFGQGTKLEIKRLEDLKNVFPPEVAVFEPSEAEISHTQKATLVCLATGFYPDHVELSWWVNGKEVHSGVCTDPQPLKEQPALNDSRYCLSSRLRVSATFWQNPRNHFRCQVQFYGLSENDEWTQDRAKPVTQIVSAEAWGRADCGFTSESYQQGVLSATILYEILLGKATLYAVLVSALVLMAMVKRKDSRGRAKRSGSGATNFSLLKQAGDVEENPGPTSMDWIWRILFLVGAATGAHSFEQVQLQQPGAELVKPGASVKMSCKASGYAFSSYWINWMKQKPGQGLEWIGQIYPGDGDTNYNGKFKGRATLTADTSSSTAYMQLSSLTSEDSAVYFCARSITTVVGCAMDYWGQGTSVTVSSTRIQNPDPAVYQLRDSKSSDKSVCLFTDFDSQTNVSQSKDSDVYITDKCVLDMRSMDFKSNSAVAWSNKSDFACANAFNNSIIPEDTFFPSPESSCDVKLVEKSFETDTNLNFQNLSVIGFRILLLKVAGFNLLMTLRLWSSRVKFSRSADAPAYQQGQNQLYNELNLGRREEYDVLDKRRGRDPEMGGKPQRRKNPQEGLYNELQKDKMAEAYSEIGMKGERRRGKGHDGLYQGLSTATKDTYDALHMQALPPR

SEQ ID NO: 31961 - protein, 776 aa, synthetic construct
MALPVTALLLPLALLLHAARPDIQMTQSPSSLSASVGDRVTITCKASDHINNWLAWYQQKPGQAPKLLIYGATTLETGVPSRFSGSGSGTDYTLTISSLQPEDFATYYCQQSWNTPWTFGQGTKLEIKRLEDLKNVFPPEVAVFEPSEAEISHTQKATLVCLATGFYPDHVELSWWVNGKEVHSGVCTDPQPLKEQPALNDSRYCLSSRLRVSATFWQNPRNHFRCQVQFYGLSENDEWTQDRAKPVTQIVSAEAWGRADCGFTSESYQQGVLSATILYEILLGKATLYAVLVSALVLMAMVKRKDSRGRAKRSGSGATNFSLLKQAGDVEENPGPTSMDWIWRILFLVGAATGAHSFEQVQLQQPGAELVKPGASVKMSCKASGYAFSSYWINWMKQKPGQGLEWIGQIYPGDGDTNYNGKFKGRATLTADTSSSTAYMQLSSLTSEDSAVYFCARSITTVVGCAMDYWGQGTSVTVSSTRIQNPDPAVYQLRDSKSSDKSVCLFTDFDSQTNVSQSKDSDVYITDKCVLDMRSMDFKSNSAVAWSNKSDFACANAFNNSIIPEDTFFPSPESSCDVKLVEKSFETDTNLNFQNLSVIGFRILLLKVAGFNLLMTLRLWSSRSKRSRLLHSDYMNMTPRRPGPTRKHYQPYAPPRDFAAYRSRVKFSRSADAPAYQQGQNQLYNELNLGRREEYDVLDKRRGRDPEMGGKPQRRKNPQEGLYNELQKDKMAEAYSEIGMKGERRRGKGHDGLYQGLSTATKDTYDALHMQALPPR

SEQ ID NO: 31962 - protein, 777 aa, synthetic construct
MALPVTALLLPLALLLHAARPDIQMTQSPSSLSASVGDRVTITCKASDHINNWLAWYQQKPGQAPKLLIYGATTLETGVPSRFSGSGSGTDYTLTISSLQPEDFATYYCQQSWNTPWTFGQGTKLEIKRLEDLKNVFPPEVAVFEPSEAEISHTQKATLVCLATGFYPDHVELSWWVNGKEVHSGVCTDPQPLKEQPALNDSRYCLSSRLRVSATFWQNPRNHFRCQVQFYGLSENDEWTQDRAKPVTQIVSAEAWGRADCGFTSESYQQGVLSATILYEILLGKATLYAVLVSALVLMAMVKRKDSRGRAKRSGSGATNFSLLKQAGDVEENPGPTSMDWIWRILFLVGAATGAHSFEQVQLQQPGAELVKPGASVKMSCKASGYAFSSYWINWMKQKPGQGLEWIGQIYPGDGDTNYNGKFKGRATLTADTSSSTAYMQLSSLTSEDSAVYFCARSITTVVGCAMDYWGQGTSVTVSSTRIQNPDPAVYQLRDSKSSDKSVCLFTDFDSQTNVSQSKDSDVYITDKCVLDMRSMDFKSNSAVAWSNKSDFACANAFNNSIIPEDTFFPSPESSCDVKLVEKSFETDTNLNFQNLSVIGFRILLLKVAGFNLLMTLRLWSSKRGRKKLLYIFKQPFMRPVQTTQEEDGCSCRFPEEEEGGCELRVKFSRSADAPAYQQGQNQLYNELNLGRREEYDVLDKRRGRDPEMGGKPQRRKNPQEGLYNELQKDKMAEAYSEIGMKGERRRGKGHDGLYQGLSTATKDTYDALHMQALPPR

SEQ ID NO: 31963 - protein, 140 aa, synthetic construct
  VARIANT 14: note = S, V, W, A, C, F, G, I, L, M, P
  VARIANT 66: note = N, Q, S, T, Y
  VARIANT 119: note = F, G, I, L, M, P, V, W, A, C
  VARIANT 92: note = S, V, W, A, C, F, G, I, L, M, P
  VARIANT 118: note = G, I, L, M, P, V, W, A, C, F
  VARIANT 107: note = T, V, W, A, C, F, G, I, L, M, P
  VARIANT 115: note = S, V, W, A, C, F, G, I, L, M, P
  VARIANT 93: note = S, V, W, A, C, F, G, I, L, M, P
IQNPDPAVYQLRDXKSSDKSVCLFTDFDSQTNVSQSKDSDVYITDKTVLDMRSMDFKSNSAVAWSXKSDFACANAFNNSIIPEDTFFPSPEXXCDVKLVEKSFETDXNLNFQNLXVIXXRILLLKVAGFNLLMTLRLWSS

SEQ ID NO: 31964 - protein, 179 aa, synthetic construct
  VARIANT 4: note = K, N
  VARIANT 136: note = E, V
  VARIANT 34: note = T, D, E, H, K, N, R
  VARIANT 179: note = G or deleted
  VARIANT 178: note = R or deleted
  VARIANT 22: note = S, V, W, A, C, F, G, I, L, M, P
  VARIANT 157: note = T, V, W, A, C, F, G, I, L, M, P
  VARIANT 164: note = S, V, W, A, C, F, G, I, L, M, P
  VARIANT 37: note = Y, F
  VARIANT 177: note = S, F
  VARIANT 18: note = E, H, K, R, D
  VARIANT 5: note = N, R, D, E, H, K
EDLXXVFPPEVAVFEPSXAEIXHTQKATLVCLAXGFXPDHVELSWWVNGKEVHSGVSTDPQPLKEQPALNDSRYCLSSRLRVSATFWQNPRNHFRCQVQFYGLSENDEWTQDRAKPVTQIVSAEAWGRADCGFTSXSYQQGVLSATILYEILLGKAXLYAVLVXALVLMAMVKRKDXXX

SEQ ID NO: 31965 - protein, 140 aa, synthetic construct
IQNPDPAVYQLRDSKSSDKSVCLFTDFDSQTNVSQSKDSDVYITDKTVLDMRSMDFKSNSAVAWSSKSDFACANAFNNSIIPEDTFFPSPEMACDVKLVEKSFETDTNLNFQNLLVIWLRILLLKVAGFNLLMTLRLWSS

SEQ ID NO: 31966 - protein, 179 aa, synthetic construct
EDLKHVFPPEVAVFEPSDAEIWHTQKATLVCLATGFYPDHVELSWWVNGKEVHSGVSTDPQPLKEQPALNDSRYCLSSRLRVSATFWQNPRNHFRCQVQFYGLSENDEWTQDRAKPVTQIVSAEAWGRADCGFTSESYQQGVLSATILYEILLGKATLYAVLVSALVLMAMVKRKDSRG

SEQ ID NO: 31967 - protein, 177 aa, synthetic construct
  VARIANT 18: note = E, H, K, R, D
  VARIANT 157: note = T, V, W, A, C, F, G, I, L, M, P
  VARIANT 5: note = N, R, D, E, H, K
  VARIANT 34: note = T, D, E, H, K, N, R
  VARIANT 22: note = S, V, W, A, C, F, G, I, L, M, P
  VARIANT 164: note = S, V, W, A, C, F, G, I, L, M, P
EDLNXVFPPEVAVFEPSXAEIXHTQKATLVCLAXGFFPDHVELSWWVNGKEVHSGVSTDPQPLKEQPALNDSRYCLSSRLRVSATFWQNPRNHFRCQVQFYGLSENDEWTQDRAKPVTQIVSAEAWGRADCGFTSVSYQQGVLSATILYEILLGKAXLYAVLVXALVLMAMVKRKDF

SEQ ID NO: 31968 - protein, 179 aa, synthetic construct
  VARIANT 34: note = T, D, E, H, K, N, R
  VARIANT 5: note = N, R, D, E, H, K
  VARIANT 22: note = S, V, W, A, C, F, G, I, L, M, P
  VARIANT 18: note = E, H, K, R, D
  VARIANT 164: note = S, V, W, A, C, F, G, I, L, M, P
  VARIANT 157: note = T, V, W, A, C, F, G, I, L, M, P
EDLKXVFPPKVAVFEPSXAEIXHTQKATLVCLAXGFYPDHVELSWWVNGKEVHSGVSTDPQPLKEQPALNDSRYCLSSRLRVSATFWQNPRNHFRCQVQFYGLSENDEWTQDRAKPVTQIVSAEAWGRADCGFTSESYQQGVLSATILYEILLGKAXLYAVLVXALVLMAMVKRKDSRG

SEQ ID NO: 31969 - protein, 140 aa, synthetic construct
IQNPDPAVYQLRDSKSSDKSVCLFTDFDSQTNVSQSKDSDVYITDKTVLDMRSMDFKSNSAVAWSTKSDFACANAFNNSIIPEDTFFPSPEVVCDVKLVEKSFETDTNLNFQNLVVIGARILLLKVAGFNLLMTLRLWSS

SEQ ID NO: 31970 - protein, 179 aa, synthetic construct
EDLKNVFPPEVAVFEPSRAEISHTQKATLVCLARGFYPDHVELSWWVNGKEVHSGVSTDPQPLKEQPALNDSRYCLSSRLRVSATFWQNPRNHFRCQVQFYGLSENDEWTQDRAKPVTQIVSAEAWGRADCGFTSESYQQGVLSATILYEILLGKATLYAVLVSALVLMAMVKRKDSRG

SEQ ID NO: 31971 - protein, 140 aa, synthetic construct
IQNPDPAVYQLRDWKSSDKSVCLFTDFDSQTNVSQSKDSDVYITDKTVLDMRSMDFKSNSAVAWSQKSDFACANAFNNSIIPEDTFFPSPEMPCDVKLVEKSFETDWNLNFQNLLVIGARILLLKVAGFNLLMTLRLWSS

SEQ ID NO: 31972 - protein, 179 aa, synthetic construct
EDLKNVFPPEVAVFEPSRAEIVHTQKATLVCLATGFYPDHVELSWWVNGKEVHSGVSTDPQPLKEQPALNDSRYCLSSRLRVSATFWQNPRNHFRCQVQFYGLSENDEWTQDRAKPVTQIVSAEAWGRADCGFTSESYQQGVLSATILYEILLGKACLYAVLVSALVLMAMVKRKDSRG

SEQ ID NO: 31973 - protein, 140 aa, synthetic construct
IQNPDPAVYQLRDSKSSDKSVCLFTDFDSQTNVSQSKDSDVYITDKTVLDMRSMDFKSNSAVAWSTKSDFACANAFNNSIIPEDTFFPSPEGWCDVKLVEKSFETDVNLNFQNLSVIFMRILLLKVAGFNLLMTLRLWSS

SEQ ID NO: 31974 - protein, 179 aa, synthetic construct
EDLKRVFPPEVAVFEPSKAEIAHTQKATLVCLATGFYPDHVELSWWVNGKEVHSGVSTDPQPLKEQPALNDSRYCLSSRLRVSATFWQNPRNHFRCQVQFYGLSENDEWTQDRAKPVTQIVSAEAWGRADCGFTSESYQQGVLSATILYEILLGKATLYAVLVSALVLMAMVKRKDSRG

SEQ ID NO: 31975 - protein, 140 aa, synthetic construct
IQNPDPAVYQLRDIKSSDKSVCLFTDFDSQTNVSQSKDSDVYITDKTVLDMRSMDFKSNSAVAWSYKSDFACANAFNNSIIPEDTFFPSPEIFCDVKLVEKSFETDANLNFQNLSVIALRILLLKVAGFNLLMTLRLWSS

SEQ ID NO: 31976 - protein, 179 aa, synthetic construct
EDLKRVFPPEVAVFEPSDAEIGHTQKATLVCLANGFYPDHVELSWWVNGKEVHSGVSTDPQPLKEQPALNDSRYCLSSRLRVSATFWQNPRNHFRCQVQFYGLSENDEWTQDRAKPVTQIVSAEAWGRADCGFTSESYQQGVLSATILYEILLGKATLYAVLVCALVLMAMVKRKDSRG

SEQ ID NO: 31977 - protein, 140 aa, synthetic construct
IQNPDPAVYQLRDMKSSDKSVCLFTDFDSQTNVSQSKDSDVYITDKTVLDMRSMDFKSNSAVAWSTKSDFACANAFNNSIIPEDTFFPSPESGCDVKLVEKSFETDPNLNFQNLIVIFLRILLLKVAGFNLLMTLRLWSS

SEQ ID NO: 31978 - protein, 179 aa, synthetic construct
EDLKEVFPPEVAVFEPSDAEIMHTQKATLVCLAEGFYPDHVELSWWVNGKEVHSGVSTDPQPLKEQPALNDSRYCLSSRLRVSATFWQNPRNHFRCQVQFYGLSENDEWTQDRAKPVTQIVSAEAWGRADCGFTSESYQQGVLSATILYEILLGKALLYAVLVSALVLMAMVKRKDSRG

SEQ ID NO: 31979 - protein, 140 aa, synthetic construct
IQNPDPAVYQLRDAKSSDKSVCLFTDFDSQTNVSQSKDSDVYITDKTVLDMRSMDFKSNSAVAWSTKSDFACANAFNNSIIPEDTFFPSPEIICDVKLVEKSFETDPNLNFQNLVVILLRILLLKVAGFNLLMTLRLWSS

SEQ ID NO: 31980 - protein, 179 aa, synthetic construct
EDLKHVFPPEVAVFEPSDAEIAHTQKATLVCLATGFYPDHVELSWWVNGKEVHSGVSTDPQPLKEQPALNDSRYCLSSRLRVSATFWQNPRNHFRCQVQFYGLSENDEWTQDRAKPVTQIVSAEAWGRADCGFTSESYQQGVLSATILYEILLGKATLYAVLVSALVLMAMVKRKDSRG

SEQ ID NO: 31981 - protein, 140 aa, synthetic construct
IQNPDPAVYQLRDMKSSDKSVCLFTDFDSQTNVSQSKDSDVYITDKTVLDMRSMDFKSNSAVAWSTKSDFACANAFNNSIIPEDTFFPSPEPLCDVKLVEKSFETDPNLNFQNLAVIAMRILLLKVAGFNLLMTLRLWSS

SEQ ID NO: 31982 - protein, 179 aa, synthetic construct
EDLKEVFPPEVAVFEPSEAEIAHTQKATLVCLANGFYPDHVELSWWVNGKEVHSGVSTDPQPLKEQPALNDSRYCLSSRLRVSATFWQNPRNHFRCQVQFYGLSENDEWTQDRAKPVTQIVSAEAWGRADCGFTSESYQQGVLSATILYEILLGKATLYAVLVSALVLMAMVKRKDSRG

SEQ ID NO: 31983 - protein, 140 aa, synthetic construct
IQNPDPAVYQLRDMKSSDKSVCLFTDFDSQTNVSQSKDSDVYITDKTVLDMRSMDFKSNSAVAWSNKSDFACANAFNNSIIPEDTFFPSPEWFCDVKLVEKSFETDTNLNFQNLCVIVIRILLLKVAGFNLLMTLRLWSS

SEQ ID NO: 31984 - protein, 179 aa, synthetic construct
EDLKNVFPPEVAVFEPSDAEIIHTQKATLVCLATGFYPDHVELSWWVNGKEVHSGVSTDPQPLKEQPALNDSRYCLSSRLRVSATFWQNPRNHFRCQVQFYGLSENDEWTQDRAKPVTQIVSAEAWGRADCGFTSESYQQGVLSATILYEILLGKATLYAVLVSALVLMAMVKRKDSRG

SEQ ID NO: 31985 - protein, 26 aa, synthetic construct
  VARIANT 2: note = S, F, Y, L, A, R
  VARIANT 26: note = S, K, T, G, L, V
  VARIANT 6: note = L, F, M
  VARIANT 13: note = V, A, S, T, G
  VARIANT 22: note = L, I, F, V, M
  VARIANT 19: note = L, F, I, V
  VARIANT 10: note = L, F, T
  VARIANT 5: note = G, V, A, M, F
  VARIANT 11: note = L, V, M, I
  VARIANT 20: note = M, I, F, V
  VARIANT 9: note = L, I
  VARIANT 14: note = A, V, I
  VARIANT 3: note = V, L, M, Q
  VARIANT 23: note = R, K, L, Q
  VARIANT 24: note = L, M, I, V
  VARIANT 15: note = G, I, V, A, L, S
  VARIANT 18: note = L, I, V, M
  VARIANT 8: note = I, V, F, M
  VARIANT 4: note = I, L, M, F, T
  VARIANT 7: note = R, K
  VARIANT 1: note = L, F
XXXXXXXXXXXKXXXFNXXXTXXXWX

SEQ ID NO: 31986 - protein, 25 aa, synthetic construct
  VARIANT 9: note = L, F, Y, T
  VARIANT 3: note = T, K, V, R, M
  VARIANT 13: note = A, S, T
  VARIANT 7: note = E, I, L, V, S, T
  VARIANT 14: note = T, A, I, L, V, C, S
  VARIANT 21: note = S, M, T, L, V, G, F
  VARIANT 10: note = L, I, V, C
  VARIANT 5: note = L, S, V, A, T
  VARIANT 15: note = L, I, V, A
  VARIANT 11: note = G, F, C, A, S, L, M
  VARIANT 19: note = L, F, I, V
  VARIANT 4: note = I, L, M, F, S
  VARIANT 24: note = L, V, W, C, R
  VARIANT 25: note = M, R, K, W, V, I, T
  VARIANT 23: note = L, I, F, M, S
  VARIANT 18: note = V, L, I, A, F
  VARIANT 17: note = A, G
  VARIANT 8: note = I, L, M, V, A
  VARIANT 1: note = S, A, W, T, N, I
  VARIANT 22: note = A, G, V, T, F, I, L
  VARIANT 2: note = A, G, L, M, T
XXXXXYXXXXXKXXXYXXXVXXXXX

SEQ ID NO: 31987 - protein, 26 aa, synthetic construct
  VARIANT 23: note = C, F, S, I, L, V
  VARIANT 26: note = R, K, G, Q, L
  VARIANT 21: note = T, L, A, S, V
  VARIANT 1: note = S, T, A, L, V
  VARIANT 11: note = L, V, M, T
  VARIANT 25: note = L, Y, F, I, V, R
  VARIANT 14: note = V, S, L, A, T, I
  VARIANT 3: note = Y, T, C, F, H
  VARIANT 15: note = V, L, M, I, A
  VARIANT 19: note = I, V, F, A, T
  VARIANT 24: note = L, I, V, M
  VARIANT 22: note = F, I, C, S, A, Y
  VARIANT 8: note = L, I, V
  VARIANT 18: note = A, I, V, G, T
  VARIANT 17: note = F, L, S, C, Y, T
  VARIANT 9: note = L, I
  VARIANT 2: note = A, V
  VARIANT 10: note = L, I
  VARIANT 4: note = Y, L, F, W
  VARIANT 7: note = L, T, I, V
  VARIANT 5: note = T, V, M
  VARIANT 20: note = I, V, M, T
XXXXXYXXXXXKSXXYXXXXXXXXXX

SEQ ID NO: 31988 - protein, 26 aa, synthetic construct
  VARIANT 5: note = G, A, E, S
  VARIANT 20: note = L, M, F
  VARIANT 6: note = L, F
  VARIANT 13: note = S, T, C
  VARIANT 11: note = A, V, F
  VARIANT 19: note = L, V, M, F
  VARIANT 9: note = L, V
  VARIANT 4: note = L, M, T
  VARIANT 21: note = T, S
  VARIANT 25: note = F, L, W, C, I, S
  VARIANT 2: note = T, A, S, L, V
  VARIANT 1: note = L, M, I, V
  VARIANT 18: note = F, V, L, T, I
  VARIANT 16: note = I, V, F, L
  VARIANT 10: note = F, L
  VARIANT 14: note = V, I, L
  VARIANT 8: note = M, V, I, F
  VARIANT 3: note = V, L, I
  VARIANT 23: note = K, R, Q, T
  VARIANT 22: note = A, I, V
  VARIANT 26: note = F, L, V, C, I, S
  VARIANT 24: note = L, A, F, Y, C
XXXXXXYXXXXKXXAXNXXXXXXXXX

SEQ ID NO: 31989 - protein, 19 aa, synthetic construct
  VARIANT 12: note = D, A
  VARIANT 4: note = A, G, E
  VARIANT 3: note = A, E
SLXXVVLQNRRXLDLLTAE

SEQ ID NO: 31990 - protein, 19 aa, synthetic construct
SLAGVVLQNRRALDLLTAE

SEQ ID NO: 31991 - protein, 7 aa, synthetic construct
VVLQNRR

SEQ ID NO: 31992 - protein, 25 aa, synthetic construct
  VARIANT 23: note = S, G, T, C, H, N
  VARIANT 18: note = V, L, T
  VARIANT 2: note = R, Q, I, Q
  VARIANT 4: note = G, E, S, A
  VARIANT 25: note = L, F, G, R, S
  VARIANT 24: note = R, C, H, W, V
  VARIANT 5: note = A, V, L
  VARIANT 16: note = L, F, G
LXLXXLRLLLFKLLLXDXLLTCXXX

SEQ ID NO: 31993 - DNA, 465 bp, synthetic construct
  source 1..465: mol_type = other DNA
atggctgctggtggacctggtgctggatctgctgcccctgtgtctagcacatctagcctgcctctggccgctctgaacatgagagtcagaagaaggctgagcctgttcctgaacgtgcggactcaggtggccgctgattggacagctctggccgaggaaatggacttcgagtacctggaaatccggcagctggaaacccaggccgatcctacaggcagactgctggatgcttggcaaggcagacctggcgcttctgtggggagactgcttgagctgctgacaaagctgggcagagatgacgtgctgctggaactgggacccagcatcgaggaagattgccagaagtacatcctgaagcagcagcaagaggaagccgagaagcctctgcaagtggccgccgtggatagcagcgttccaagaacagctgagctggccggcatcaccacactggatgatcctcttgga

SEQ ID NO: 31994 - DNA, 480 bp, synthetic construct
  source 1..480: mol_type = other DNA
atggcctgcatctaccccaccaccttctacaccagcctgcctaccaagagcctgaacatgggcatcagcctgaccaccatcctgatcctgtctgtggccgtgctgctgtctacagccgctcctccaagctgtagagagtgttaccagagcctgcactaccggggcgagatgcagcagtatttcacctaccacacacacatcgagcggagctgctacggcaacctgatcgaggaatgtgtggaaagcggcaagagctactacaaagtgaagaacctgggcgtgtgcggcagcagaaacggcgctatttgtcccagaggcaagcagtggctgtgcttcaccaagatcggacagtggggcgtgaacacccaagtgctggaagatattaagcgcgagcagatcattgccaaggccaaagccagcaagcccaccacacctccagagaacagacccagacacttccacagcttcatccagaagctg

SEQ ID NO: 31995 - DNA, 744 bp, synthetic construct
  source 1..744: mol_type = other DNA
atggcctctctgagcagacctagcctgcctagctgcctgtgcagctttctgctcctgctgctgctccaggtgtccagctcttatgccggccagttcagagtgatcggccctagacaccccatcagagcccttgtgggagatgaggtggaactgccttgcagaatcagccccggcaagaatgccaccggcatggaagtcggctggtacagacctccattcagcagagtggtgcacctgtaccggaacggcaaggaccaggatggcgatcaggcccctgagtacagaggcagaacagagctgctgaaggacgccatcggcgagggcaaagtgaccctgagaatcagaaacgtgcggttcagcgacgaaggcggcttcacctgtttcttccgggaccacagctaccaagaggaagccgctatggaactgaaggtggaagatcccttctactgggtgtcccctggcgtgctggttctgctggctgttcttcctgttctgctgcttcagattaccgtgggactgatcttcctgtgcctccagtaccggctgagaggcaagctgagagccgagatcgagaacctgcaccggaccttcgatccccacttcctgagagtgccctgctggaagatcaccctgttcgtgatcgtgcccgtgctgggacctctggtggccctgattatctgctacaactggctgcacagacggctggccggacagttcctggaagaactgagaaaccccttctaa

SEQ ID NO: 31996 - DNA, 402 bp, synthetic construct
  source 1..402: mol_type = other DNA
atgtaccggatgcagctgctgagctgtatcgccctgtctctggccctggtcacaaatagcaactgggttaacgtgatctccgacctgaagaagatcgaggacctgatccagtccatgcacatcgacgccacactgtacaccgagagcgacgtgcaccctagctgtaaagtgaccgccatgaagtgctttctgctggaactgcaagtgatctccctggaaagcggcgacgccagcatccacgacaccgtggagaacctgattatcctggctaacaacagcctgagcagcaacggcaacgtgaccgagtccggctgtaaagagtgcgaggaactggaagagaagaatatcaaagagttcctccagagcttcgtgcacatcgtgcagatgttcatcaacaccagc

SEQ ID NO: 31997 - DNA, 483 bp, synthetic construct
  source 1..483: mol_type = other DNA
atccagaaccctgatcctgccgtgtaccagctgcgggatagcaagagcagcgacaagagcgtgtgtctgttcaccgacttcgacagccagaccaacgtgtcccagagcaaggactccgacgtgtacatcaccgataagaccgtgctggacatgcggagcatggacttcaagagcaactccgccgtggcctggtccaacaagtccgatttcgcctgcgccaacgccttcaacaacagcattatccccgaggacacattcttcccaagccccgagagcagctgcggtaccatcactcaaggtttggcagtgtcaaccatctcatcattctttccacctggctaccaagtgtccttctgcctggtcatggtgctgctgttcgccgtggataccggcctgtacttcagcgtcaagaccaacatccggtccagcaccagagactggaaggaccacaagttcaagtggcggaaggaccctcaggacaag

SEQ ID NO: 31998 - DNA, 408 bp, synthetic construct
  source 1..408: mol_type = other DNA
atccagaaccctgatcctgccgtgtaccagctgcgggatagcaagagcagcgacaagagcgtgtgtctgttcaccgacttcgacagccagaccaacgtgtcccagagcaaggactccgacgtgtacatcaccgataagaccgtgctggacatgcggagcatggacttcaagagcaactccgccgtggcctggtccaacaagtccgatttcgcctgcgccaacgccttcaacaacagcattatccccgaggacacattcttcccaagccccgagagcagctgcggtaccatcactcaaggtttggcagtgtcaaccatctcatcattctttccacctggctaccaagtgtccttctgcctggtcatggtgctgctgttcgccgtggataccggcctgtacttcagcgtc

SEQ ID NO: 31999 - DNA, 411 bp, synthetic construct
  source 1..411: mol_type = other DNA
atccagaaccctgatcctgccgtgtaccagctgcgggatagcaagagcagcgacaagagcgtgtgtctgttcaccgacttcgacagccagaccaacgtgtcccagagcaaggactccgacgtgtacatcaccgataagaccgtgctggacatgcggagcatggacttcaagagcaactccgccgtggcctggtccaacaagtccgatttcgcctgcgccaacgccttcaacaacagcattatccccgaggacacattcttcccaagccccgagagcagctgcggtaccatcactcaaggtttggcagtgtcaaccatctcatcattctttccacctggctaccaagtgtccttctgcctggtcatggtgctgctgttcgccgtggataccggcctgtacttcagcgtcaag

SEQ ID NO: 32000 - DNA, 660 bp, synthetic construct
  source 1..660: mol_type = other DNA
atgagcatgggcctcgaaatcacaggcacagccctggcagttctcggctggctgggaaccattgtgtgttgcgctttgcccatgtggcgggtgtccgcctttatcggcagcaacatcatcaccagccagaacatctgggaaggactgtggatgaactgcgtggtgcagagcacaggccagatgcagtgcaaggtgtacgacagcctgctggccctgcctcaggatctgcaagctgctagagccctgatcgtggtggctattctgctggccgcttttggactgctggtggctcttgtgggagcccagtgtaccaactgcgtgcaggatgataccgccaaggccaagatcacaatcgtggccggcgtgctgtttctgcttgctgctctgctgacactggtgcccgtttcttggagcgccaacaccatcatccgggacttctacaaccccgtggtgcccgaggctcagaaaagagaaatgggagccggcctgtatgtcggctgggctgctgctgcacttcaactgcttggcggagccctgctgtgctgtagctgtcctcctagagagaagaagtacaccgccaccaaggtggtgtacagcgcccctagaagtacaggccctggcgcttctctcggcaccggctacgatagaaaggactacgtg

SEQ ID NO: 32001 - DNA, 732 bp, synthetic construct
  source 1..732: mol_type = other DNA
atgtgtagcagaggctgggatagctgtctggccctggaactgctgctgctccctctgtctctgctcgtgacatccatccagggacacctggtgcacatgaccgtggtgtctggcagcaacgtgaccctgaacatcagcgagagcctgcctgagaactacaagcagctgacctggttctacaccttcgaccagaaaatcgtggaatgggacagccggaagtccaagtatttcgagagcaagttcaagggcagagtgcggctggaccctcaaagcggagccctgtacatctccaaggtgcagaaagaggacaacagcacctacatcatgcgggtgctgaagaaaaccggcaacgagcaagagtggaagatcaagctccaggtgctggaccccgtgcctaagcctgtgattaagatcgagaagattgaggacatggacgacaactgctacctgaagctgagctgcgtgatccctggcgagagcgtgaactacacttggtacggcgacaagcggccctttccaaaagaactccagaacagcgtgctggaaaccacactgatgccccacaactacagccggtgctacacttgtcaggtgtccaacagcgtgtccagcaagaacggcaccgtgtgtctgagccctccatgtacactggcccggtcctttggagtggaatggatcgcctcttggctggtggtcaccgtgcctacaattctgggcctgctgctgacataa

SEQ ID NO: 32002 - DNA, 864 bp, synthetic construct
  source 1..864: mol_type = other DNA
atgggccacacaagaaggcagggcacaagccctagcaagtgcccctacctgaacttcttccagctgctggtgctggccggcctgagccatttttgttctggcgtgatccacgtgaccaaagaagtgaaagaggtcgccacactgagctgcggccacaatgtgtccgtggaagaactggcccagaccagaatctactggcagaaagaaaagaaaatggtgctgaccatgatgagcggcgacatgaacatctggcccgagtacaagaaccggaccatcttcgacatcaccaacaacctgagcatcgtgatcctggctctgaggccatctgacgagggcacctatgagtgcgtggtgctgaagtacgagaaggacgccttcaagcgggaacacctggccgaagtgacactgagcgtgaaggccgactttcccacacctagcatcagcgacttcgagatccccaccagcaacatccggcggatcatctgttctaccagcggcggctttcctgagcctcacctgagctggcttgagaacggcgaggaactgaacgccatcaacaccaccgtgtctcaggaccccgagacagagctgtatgccgtgtccagcaagctggacttcaacatgaccaccaaccacagcttcatgtgcctgattaagtacggccacctgagagtgaaccagaccttcaactggaataccaccaagcaagagcacttccccgacaacctgctgcctagctgggccatcacactgatctccgtgaacggcatcttcgtgatctgctgcctgacctactgcttcgcccctagatgcagagagcggcggagaaacgaacggctgagaagagaatctgtgcggcccgtt

SEQ ID NO: 32003 - DNA, 987 bp, synthetic construct
  source 1..987: mol_type = other DNA
atggaccctcagtgcacaatgggcctgagcaacatcctgttcgtgatggccttcctgctgtctggcgctgcccctctgaagatccaggcttacttcaacgagacagccgacctgccttgccagttcgccaacagccagaatcagagcctgagcgagctggtggtgttctggcaggaccaagagaacctggtgctgaacgaggtgtacctgggcaaagaaaagttcgacagcgtgcacagcaagtacatgggcagaaccagcttcgactccgacagctggacactgagactgcacaacctccagatcaaggacaagggcctgtaccagtgcatcatccaccacaagaaacccaccggcatgattcgcatccaccagatgaacagcgagctgagcgtgctggctaacttcagccagcctgagatcgtgcccatcagcaacatcaccgagaacgtgtacatcaacctgacctgctccagcatccacggctaccccgagcctaagaaaatgtccgtgctgctgcggaccaagaacagcaccatcgagtacgacggcgtgatgcagaaaagccaggacaacgtgaccgagctgtacgacgtgtccatcagcctgtccgtgtcattccccgacgtgaccagcaatatgaccatcttctgcatcctggaaaccgacaagacccggctgctgtctagccccttcagcatcgagctggaagatccccagcctccgccagatcacatcccttggattacagccgtgctgcccaccgtgattatctgcgtgatggtgttttgcctgatcctgtggaagtggaagaagaagaaacggcctcggaacagctacaagtgcggcaccaacacaatggaacgggaagagagcgagcagaccaagaagagagagaagattcacatccccgagcggagcgacgaagcccagagagtgtttaagagcagcaagaccagcagctgcgacaagagcgatacctgcttc

SEQ ID NO: 32004 - DNA, 456 bp, synthetic construct
  source 1..456: mol_type = other DNA
atggccttaccagtgaccgccttgctcctgccgctggccttgctgctccacgccgccaggccggacgccagaagcgaggacagatacagaaaccccaagggcagcgcctgctccagaatctggcaaagccccagattcattgcccggaagaggggcttcaccgtgaagatgcactgctacatgaacagcgccagcggcaacgtttcctggctgtggaagcaagagatggacgagaaccctcagcagctgaagctggaaaagggccgcatggaagagagccagaacgagtctctggccacactgaccatccagggcatcagattcgaggacaacggcatctacttttgccagcagaagtgcaacaacaccagcgaggtgtaccaaggctgtggcaccgagctgagagtgatgggctttagcacactggcccagctgaaacagcggaacaccctgaag

SEQ ID NO: 32005 - DNA, 390 bp, synthetic construct
  source 1..390: mol_type = other DNA
gccagaagcgaggacagatacagaaaccccaagggcagcgcctgctccagaatctggcaaagccccagattcattgcccggaagaggggcttcaccgtgaagatgcactgctacatgaacagcgccagcggcaacgtttcctggctgtggaagcaagagatggacgagaaccctcagcagctgaagctggaaaagggccgcatggaagagagccagaacgagtctctggccacactgaccatccagggcatcagattcgaggacaacggcatctacttttgccagcagaagtgcaacaacaccagcgaggtgtaccaaggctgtggcaccgagctgagagtgatgggctttagcacactggcccagctgaaacagcggaacaccctgaag

SEQ ID NO: 32006 - DNA, 327 bp, synthetic construct
  source 1..327: mol_type = other DNA
caatctgtgctgacccagcctccaagcgtgtccgtttctcctggacagaccgccagcatcacctgtagcggagataagctgggcgacaagttcgcctgctggtatcagcagaagcccggccagtctcctgtgctggtcatctaccaggatagcaagaggcccagcggcatccccgagagattttccggcagcaacagcggcaataccgccacactgacaatcagcggcacccaggctatggacgaggccgactactattgccaggcttgggattccgatggcaaggccacagtggtgtttggcaccggcaccaaggtggaaatcaag

SEQ ID NO: 32007 - DNA, 327 bp, synthetic construct
  source 1..327: mol_type = other DNA
caatctgtgctgacccagcctccaagcgtgtccgtttctcctggacagaccgccagcatcacctgtagcggagataagctgggcgacaagtacgcctgctggtatcagcagaagcccggccagtctcctgtgctggtcatctaccaggatagcaagaggcccagcggcatccccgagagattttccggcagcaacagcggcaataccgccacactgacaatcagcggcacccaggctatggacgaggccgactactattgccaggcttgggattccgatggcaaggccacagtggtgtttggcaccggcaccaaggtggaaatcaag

SEQ ID NO: 32008 - DNA, 327 bp, synthetic construct
  source 1..327: mol_type = other DNA
caatctgtgctgacccagcctccaagcgtgtccgtttctcctggacagaccgccagcatcacctgtagcggagataagctgggcgacaagtacgcctgctggtatcagcagaagcccggccagtctcctgtgctggtcatctaccaggataccaagaggcccagcggcatccccgagagattttccggcagcaacagcggcaataccgccacactgacaatcagcggcacccaggctatggacgaggccgactactattgccaggcttgggattccgatggcaaggccacagtggtgtttggcaccggcaccaaggtggaaatcaag

SEQ ID NO: 32009 - DNA, 327 bp, synthetic construct
  source 1..327: mol_type = other DNA
caatctgtgctgacccagcctccaagcgtgtccgtttctcctggacagaccgccagcatcacctgtagcggagataagctgggcaataagtacgcctgctggtatcagcagaagcccggccagtctcctgtgctggtcatctaccaggatagcaagaggcccagcggcatccccgagagattttccggcagcaacagcggcaataccgccacactgacaatcagcggcacccaggctatggacgaggccgactactattgccaggcttgggattccgatggcaaggccacagtggtgtttggcaccggcaccaaggtggaaatcaag

SEQ ID NO: 32010 - DNA, 342 bp, synthetic construct
  source 1..342: mol_type = other DNA
aacttcatgctgacccagcctcacagcgtgtccgagtctccaggcaagaccgtgaccatcagctgcacaagaagcagcggctctatcgccagcaactacgtgcagtggtatcagcagaggccaggcagcgcacctaccaccgtgatctacgaggataaccagaggccaagcggcgtgcccgatagattttctggcagcatcgacagcagcagcaacagcgccagcctgacaatcagcggcctgaaaacagaggacgaggccgactactactgccagagctatgatctggctgccgacgtgcgcgtggtgtttggcactggaacaaaagtgaccgtgagctcc

SEQ ID NO: 32011 - DNA, 342 bp, synthetic construct
  source 1..342: mol_type = other DNA
aacttcatgctgacccagcctcacagcgtgtccgagtctccaggcaagaccgtgaccatcagctgcacaagaagaagcggctctatcgccagcaactacgtgcagtggtatcagcagaggccaggcagcgcacctaccaccgtgatctacgaggataaccagaggccaagcggcgtgcccgatagattttctggcagcatcgacagcagcagcaacagcgccagcctgacaatcagcggcctgaaaacagaggacgaggccgactactactgccagagctatgatctggctgccgacgtgcgcgtggtgtttggcactggaacaaaagtgaccgtgagctcc

SEQ ID NO: 32012 - DNA, 342 bp, synthetic construct
  source 1..342: mol_type = other DNA
aacttcatgctgacccagcctcacagcgtgtccgagtctccaggcaagaccgtgaccatcagctgcacaagaaacagcggctctatcgccagcaactacgtgcagtggtatcagcagaggccaggcagcgcacctaccaccgtgatctacgaggataaccagaggccaagcggcgtgcccgatagattttctggcagcatcgacagcagcagcaacagcgccagcctgacaatcagcggcctgaaaacagaggacgaggccgactactactgccagagctatgatctggctgccgacgtgcgcgtggtgtttggcactggaacaaaagtgaccgtgagctcc

SEQ ID NO: 32013 - DNA, 342 bp, synthetic construct
  source 1..342: mol_type = other DNA
aacttcatgctgacccagcctcacagcgtgtccgagtctccaggcaagaccgtgaccatcagctgcacaagaagcagcggctctatcgccaacaactacgtgcagtggtatcagcagaggccaggcagcgcacctaccaccgtgatctacgaggataaccagaggccaagcggcgtgcccgatagattttctggcagcatcgacagcagcagcaacagcgccagcctgacaatcagcggcctgaaaacagaggacgaggccgactactactgccagagctatgatctggctgccgacgtgcgcgtggtgtttggcactggaacaaaagtgaccgtgagctcc

SEQ ID NO: 32014 - DNA, 315 bp, synthetic construct
  source 1..315: mol_type = other DNA
gacatcgtgatgacacagacccctgccacactgtctgtgtctgccggcgagagagtgaccattacctgcaaagccagccagagcgtgtccaacgacgtgacctggtatcagcagaagcctggacaggcccctcggctgctgatctacagcgccagcaatagatacagcggcgtgcccgccagattttccggctctggatacggcaccgagttcaccttcaccatcagcagcgtgcagagcgaggacttcgccgtgtacttctgccagcaagactacagctctttcggccagggcaccaagctggaaatcaagaga

SEQ ID NO: 32015 - DNA, 315 bp, synthetic construct
  source 1..315: mol_type = other DNA
gacatccagatgacacagagccctagcagcctgtctgccagcgtgggagacagagtgaccatcacatgcaaggccagccagagcgtgtccaacgacgtgacctggtatcagcagaagcctggacaggcccctaagctgctgatctacagcgccagcaacagatacagcggagtgcccgccagattttccggctctggctacggcaccgagttcacctttaccatcagcagcgtgcagagcgaggacttcgccgtgtacttctgccagcaagactacagcagcttcggccagggcaccaagctggaaatcaagaga

SEQ ID NO: 32016 - DNA, 327 bp, synthetic construct
  source 1..327: mol_type = other DNA
gacatccagatgacacagagccctagcagcctgtctgccagcgtgggagacagagtgaccatcacctgtagagccagcagcagcgtgtccagcagctacctgcattggtatcagcagaagcccggcaaggcccctaaagtgtggatctacagcaccagcaatctggcctctggcgtgcccagcagattttctggctctggcagcggcaccgacttcaccctgacaatatctagcctccagcctgaggacttcgccacctactactgccagcagtacagcggctaccccatcacctttggacagggcaccaaggtggaaatcaagaga

SEQ ID NO: 32017 - DNA, 327 bp, synthetic construct
  source 1..327: mol_type = other DNA
gagaacgtgctgacacagagccctgccatcatgagtgcctctccaggcgagaaagtgaccatgacctgtagagccagcagcagcgtgtccagcagctacctgcactggtatcagcagaagtccggcgcaagccccaaagtgtggatctacagcaccagcaatctggcctctggcgtgccaggcagattttctggctctggcagcggcacaagctacagcctgacaatcagctccgtggaagccgaagatgccgccacctactactgccagcagtacagcggctaccccatcacatttggagccggcaccaaggtggaagtgaagaga

SEQ ID NO: 32018 - DNA, 339 bp, synthetic construct
  source 1..339: mol_type = other DNA
gacatcgtgatgacacagagccctgatagcctggccgtgtctctgggagagagagccaccatcaactgcaagagcagccagagcctgctgaacagcggcaaccagaagaactacctggcctggtatcagcagaagcccggccagcctcctaagctgctgatctactggggcagcaccagatccacaggcgtgcccgatagattttctggctctggcagcggcaccgacttcaccctgacaatttctagcctgcaagccgaggacgtggccgtgtactactgccagaacgactacacataccccttcaccttcggccagggcaccaagctggaaatcaaa

SEQ ID NO: 32019 - DNA, 339 bp, synthetic construct
  source 1..339: mol_type = other DNA
gacatcgtgatgacacagagccctgatagcctggccgtgtctctgggagagagagccaccatcaactgcaagagcagccagagcctgctgaacagcggcaacaacaagaactacgtgacatggtatcagcagaagcccggccagcctcctaagctgctgatctactggggcagcaccagatccacaggcgtgcccgatagattttctggctctggcagcggcaccgacttcaccctgacaatttctagcctgcaagccgaggacgtggccgtgtactactgccagaacgactacacataccccttcaccttcggccagggcaccaagctggaaatcaaa

SEQ ID NO: 32020 - DNA, 321 bp, synthetic construct
  source 1..321: mol_type = other DNA
cagatcgtgctgacacagagccccgccatcatgtctgttagccctggcgagaaagtgaccatgacctgtagcgccagcagcagcgtgaactacatgcactggttccagcagaagcccggcacaagccctaagctgtgggtgtacagcaccagcaatctggcctctggcgtgccagccagattttctggctctggcagcggcaccagctacagcctgacaatcagcagcatggaagccgaggatgccgccacctactattgtcagcagcggagcatctacccaccttggacatttggcggaggcaccaagctggaaatcaaa

SEQ ID NO: 32021 - DNA, 321 bp, synthetic construct
  source 1..321: mol_type = other DNA
cagatcgtgctgacacagagccctgccatcatgtccgcttctcccggcgagaaagtgaccatcacatgtagcgccagcagcagcgtgtcctacctgcactggtttcagcagaagcccggcacaagccctaagctgtgggtgtacagcaccagcaatctgcctagcggagtgcctgccagatttggcggatctggcagcggcacatcttacagcctgaccatcagccggatggaagccgaagatgccgccacctactattgccagcagcggagcatctacccaccttggacatttggaggcggcaccaagctggaaatcaaa

SEQ ID NO: 32022 - DNA, 321 bp, synthetic construct
  source 1..321: mol_type = other DNA
cagatcgtgctgacacagagccctgccatcatgtccgcttctcccggcgagaaagtgaccatcacatgtagcgccagcagcagcgtgaattacctgcactggtttcagcagaagcccggcacaagccctaagctgtgggtgtacagcaccagcaatctgcctagcggagtgcctgccagatttggcggatctggcagcggcacatcttacagcctgaccatcagccggatggaagccgaagatgccgccacctactattgccagcagcggagcatctacccaccttggacatttggaggcggcaccaagctggaaatcaaa

SEQ ID NO: 32023 - DNA, 327 bp, synthetic construct
  source 1..327: mol_type = other DNA
gagatcgtgctgacacagtctcccgccacactgtcactgtctccaggcgaaagagccacactgagctgtagcgtgtccagcagcatcagcagcagcaacctgcactggtatcagcagaagcctggacaggcccctcggctgctgatctacgccacatctaatctggcctctggcatccccgccagattttctggctctggaagcggcaccgacttcaccctgaccataagcagcctggaacctgaggacttcgccgtgtactactgccagcagtggtccagctatccccacacatttggcggaggcaccaaggtggaaatcaagaga

SEQ ID NO: 32024 - DNA, 324 bp, synthetic construct; identical to SEQ ID NO: 339
  source 1..324: mol_type = other DNA

SEQ ID NO: 32025 - DNA, 324 bp, synthetic construct; identical to SEQ ID NO: 339
  source 1..324: mol_type = other DNA

SEQ ID NO: 32026 - DNA, 324 bp, synthetic construct
  source 1..324: mol_type = other DNA
gacatccagatgacacagagccctagcagcctgtctgccagcgtgggagacagagtgaccatcacatgcaaggccagcgaccacatcaacaactggctggcctggtatcagcagaagcctggcaaggcccctaagctgctgatctacggcgctaccacactggaaacaggcgtgcccagcagattttctggcagcggctctggcaccgacttcaccctgacaatatccagcctccagcctgaggacttcgccacctactactgtcagcagagctggaacaccccttggacattcggccagggcaccaaggtggaaatcaagaga

SEQ ID NO: 32027 - DNA, 324 bp, synthetic construct; identical to SEQ ID NO: 32026
  source 1..324: mol_type = other DNA

SEQ ID NO: 32028 - DNA, 336 bp, synthetic construct
  source 1..336: mol_type = other DNA
gacatccagttgacccagtcccccagctcactcagcgccagtgtgggggaccgggtgaccattacctgtaaagccagtcagagtgtggactatgacggggatagcttcctgaattggtatcagcagaagcctggcaaagccccaaagctgctgatctacgctgcatctaatctggagtcaggcgtgccttccaggttctccggtagtgggtctgggaccgatttcacattgaccatttcatccctccaacccgaggatttcgctacatattactgtcagcagtccaatgaggaccctctcacctttggccagggcaccaaagttgaaattaagaga

SEQ ID NO: 32029 - DNA, 336 bp, synthetic construct; identical to SEQ ID NO: 32028
  source 1..336: mol_type = other DNA

SEQ ID NO: 32030 - DNA, 336 bp, synthetic construct
  source 1..336: mol_type = other DNA
gacatccagttgacccagtcccccagctcactcagcgccagtgtgggggaccgggtgaccattacctgtaaagccagtcagagtgtggactatgagggggatagcttcctgaattggtatcagcagaagcctggcaaagccccaaagctgctgatctacgctgcatctaatctggagtcaggcgtgccttctaggttctccggtagtgggtctgggaccgatttcacattgaccatttcatccctccaacccgaggatttcgctacatattactgtcagcagtccaatgaggaccctctcacctttggccagggcaccaaagttgaaattaagaga

SEQ ID NO: 32031 - DNA, 336 bp, synthetic construct; identical to SEQ ID NO: 32030
  source 1..336: mol_type = other DNA

SEQ ID NO: 32032 - DNA, 333 bp, synthetic construct
  source 1..333: mol_type = other DNA
gacatcgtgatgacacagagccctgatagcctggccgtgtctctgggagagagagccaccattaactgcaaggccagccagagcgtggactacgagggcgacagcttcctgaactggtatcagcagaagcccggccagcctcctaagctgctgatctacgccgccagcaatctggaaagcggcgtgccaagcagattttccggctctggcagcggcaccgatttcaccctgacaatatccagcctccagcctgaggacgtggccgtgtactactgccagcagagcaatgaggaccctctgacctttggccagggcaccaaggtggaaatcaag

SEQ ID NO: 32033 - DNA, 333 bp, synthetic construct
  source 1..333: mol_type = other DNA
gacatcgtgatgacacagagccctgatagcctggccgtgtctctgggagagagagccaccattaactgcaaggccagccagagcgtggactacgagggcgacagcttcctgaactggtatcagcagaagcccggccagcctcctaagctgctgatctatgccgccagaaagctcggcagaggcgtgccaagcagattttctggcagcggctctggcaccgacttcaccctgacaatatccagcctccagcctgaggacgtggccgtgtactactgccagcagagcaatgaggaccctctgacattcggccagggcaccaaggtggaaatcaag

SEQ ID NO: 32034 - DNA, 333 bp, synthetic construct
  source 1..333: mol_type = other DNA
gacatcgtgatgacacagagccctgatagcctggccgtgtctctgggagagagagccaccattaactgcaaggccagccagagcgtggactacgacggcgacagcttcctgaactggtatcagcagaagcccggccagcctcctaagctgctgatctacgccgccagcaatctggaaagcggcgtgccaagcagattttccggctctggcagcggcaccgatttcaccctgacaatatccagcctccagcctgaggacgtggccgtgtactactgccagcagagcaacgacgaccctctgacctttggacagggcaccaaggtggaaatcaaa

SEQ ID NO: 32035 - DNA, 339 bp, synthetic construct
  source 1..339: mol_type = other DNA
gacatccagatgacacagagccctagcagcctgtctgccagcgtgggagacagagtgaccatcacatgcaagagcagccagagcctgctggactccgatggcaagacctacctgaactggtatcagcagaagcccggcaaggcccctaagctgctgatctacctggtgtccaagctggatagcggcgtgcccagcagattttctggcagcggcagcggaaccgacttcaccctgacaatatccagcctccagcctgaggacttcgccacctactactgcttccaaggcacccactttccattcaccttcggccagggcaccaaggtggaaatcaaaaga

SEQ ID NO: 32036 - DNA, 339 bp, synthetic construct; identical to SEQ ID NO: 32035
  source 1..339: mol_type = other DNA

SEQ ID NO: 32037 - DNA, 339 bp, synthetic construct
  source 1..339: mol_type = other DNA
gacatccagatgacacagagccctagcagcctgtctgccagcgtgggagacagagtgaccatcacatgcaagagcagccagagcctgctggactccgatggcaagacctacctgaactggtatcagcagaagcccggcaaggcccctaagctgctgatctacctggtgtccaagctggatagcggcgtgcccagcagattttctggcagcggcagcggaaccgacttcaccctgacaatatccagcctccagcctgaggacttcgccacctactactgctggcaaggcacccactttccattcaccttcggccagggcaccaaggtggaaatcaaaaga

SEQ ID NO: 32038 - DNA, 339 bp, synthetic construct; identical to SEQ ID NO: 32037
  source 1..339: mol_type = other DNA

SEQ ID NO: 32039 - DNA, 339 bp, synthetic construct
  source 1..339: mol_type = other DNA
gacatccagatgacacagagccctagcagcctgtctgccagcgtgggagacagagtgaccatcacatgcaagagcagccagagcctgctggactccgatggcaagacctacctgaactggtatcagcagaagcccggcaaggcccctaagctgctgatctacctggtgtccaagctggatagcggcgtgcccagcagattttctggcagcggcagcggaaccgacttcaccctgacaatatccagcctccagcctgaggacttcgccacctactactgcttccaaggcacccactttccatacaccttcggccagggcaccaaggtggaaatcaaaaga

SEQ ID NO: 32040 - DNA, 339 bp, synthetic construct; identical to SEQ ID NO: 32039
  source 1..339: mol_type = other DNA

SEQ ID NO: 32041 - DNA, 339 bp, synthetic construct; identical to SEQ ID NO: 32035
  source 1..339: mol_type = other DNA

SEQ ID NO: 32042 - DNA, 333 bp, synthetic construct
  source 1..333: mol_type = other DNA
gacatcgtgctgacacagagccctgcttctctggccgtgtctctgggacagagagccaccatcagctgcaaggcttctcagagcgtggactacgacggcgacagcttcctgaactggtatcagaagccaggccagcctcctaagctgttcatctacgccgccagcaacctggaaagcggcatccctgccagattttctggcagcggctctggcaccgacttcaccctgaatatccatcctgtggaagaagaggacgccgccacctactactgccagcagtctaatgaggaccctctgacctttggagccggcaccgagctggaactgaaaaga

SEQ ID NO: 32043 - DNA, 321 bp, synthetic construct
  source 1..321: mol_type = other DNA
cagatcgtgctgacacagagccctgccatcatgtccgcttctcccggcgagaaagtgaccatgacatgtagcgccagcagcagcgtgtccttcatgcactggtatcagcagaagtccggcacaagccccaagcggtggatctacgataccagcacactggcctctggcgtgccagccagatttggcggatctggcagcggcacatcttacagcctgaccatcagcagcatggaagccgaagatgccgccacctactactgccagcagtggtccagcaatcccctgacatttggagccggcaccaagctggaactgaagaga

SEQ ID NO: 32044 - DNA, 336 bp, synthetic construct
  source 1..336: mol_type = other DNA
gacatcgtgatgacacagagccctctgagcctgcctgtgacacctggcgaacctgccagcatcagctgtagaagcagcaagagcctgctgcacagcaacggcatcacctacctgtactggtatctccagaagcctggacagagcccacagctgctgatctaccggatgagcaatagagccagcggcgtgcccgatagattttctggctctggcagcggcaccgacttcaccctgaagattagcagagtggaagccgaggacgtgggcgtgtaccattgtggacagctgctcgaaaacccctacaccttcggccagggcaccaagctggaaatcaaa

SEQ ID NO: 32045 - DNA, 333 bp, synthetic construct
  source 1..333: mol_type = other DNA
gagatcgtgctgacacagagccctggcacactgtcactgtctccaggcgaaagagccacactgagctgcaaagccagccagagcgtgtccatcagcggcatcaacctgatgaactggtatcagcagaagcccggccagcagccaagactgctgatctaccacgccagcatcctggcctctggcatccccgatagattttctggcagcggctccggcaccgacttcaccctgacaatcagcagactggaacccgaggacttcgccgtgtactactgccagcagaccagagagagccctctgacattcggccagggcacaagactggaaatcaaa

SEQ ID NO: 32046 - DNA, 336 bp, synthetic construct; identical to SEQ ID NO: 32044
  source 1..336: mol_type = other DNA

SEQ ID NO: 32047 - DNA, 333 bp, synthetic construct; identical to SEQ ID NO: 32045
  source 1..333: mol_type = other DNA

SEQ ID NO: 32048 - DNA, 321 bp, synthetic construct
  source 1..321: mol_type = other DNA
gagatcgtgctgacacagtctcccgccacactgtcactgtctccaggcgaaagagccacactgagctgtagagccagccagagcgtgtcctcttacctggcctggtatcagcagaagcctggacaggctccccggctgctgatctacgatgccagcaatagagccacaggcatccccgccagattttctggctctggcagcggcaccgatttcaccctgaccataagcagcctggaacctgaggacttcgccgtgtactactgccagcagagaagcaactggcctcctacattcggccagggcaccaaggtggaaatcaaa

SEQ ID NO: 32049 - DNA, 324 bp, synthetic construct
  source 1..324: mol_type = other DNA
gacatccagatgacacagagccctagcagcctgtctgccagcgtgggagacagagtgaccatcacctgtagagccagccaggacgtgcggaacatcgtcgtgtggttccagcagaagcctggcaaggcccctaagctgctgatctacagcggcagctacagatacagcggcgtgcccagcagattttccggctctggctctggcaccgacttcaccctgacaatatccagcctccagcctgaggacttcgccacctactactgccagcagcactacagccctccatacacattcggccagggcaccaaggtggaaatcaagaga

SEQ ID NO: 32050 - DNA, 336 bp, synthetic construct
  source 1..336: mol_type = other DNA
gacatcgtgctgacccagagccctctgagcctggccgtgtctctgggacagcctgccatcatcagctgtagggccagccagagcgtgtcctttgccggcacctctctgatgcactggtatcaccagaagcccggccagcagcccagactgctgatctacagagccagcaacctggaagccggcgtgcccgatagattttccggcagcggcagcaagaccgacttcaccctgaccatcagccccgtggaagccgaagatgccgccacctactactgccagcagagcagagagtacccctacaccttcggcggaggcaccaagctggaaatcaagagg

SEQ ID NO: 32051 - DNA, 327 bp, synthetic construct
  source 1..327: mol_type = other DNA
gacatccagatgacacagagccctagcagcctgtctgccagcgtgggagacagagtgaccatcacctgtagagccagccaggacgtgaacacagccgtggcttggtatcagcagaagcctggcaaggcccctaagctgctgatctacagcgcctacttcctgtacagcggcgtgcccagcagattcagcggaagcagaagcggcaccgacttcaccctgacaatatccagcctccagcctgaggacttcgccacctactactgccagcagtacagcagatacagccccgtgacctttggacagggcaccaaggtggaaatcaagaga

SEQ ID NO: 32052 - DNA, 327 bp, synthetic construct
  source 1..327: mol_type = other DNA
gacatccagatgacacagagccctagcagcctgtctgccagcgtgggagacagagtgaccatcacctgtagagccagccaggacatcaacacagccgtggcttggtatcagcagaagcctggcaaggcccctaagctgctgatctacagcgcctacttcctgtacagcggcgtgcccagcagattcagcggaagcagaagcggcaccgacttcaccctgacaatatccagcctccagcctgaggacttcgccacctactactgccagcagtacagcagatacagccccgtgacctttggacagggcaccaaggtggaaatcaagaga

SEQ ID NO: 32053 - DNA, 324 bp, synthetic construct; identical to SEQ ID NO: 349
  source 1..324: mol_type = other DNA

SEQ ID NO: 32054 - DNA, 324 bp, synthetic construct
  source 1..324: mol_type = other DNA
gacatccagatgacacagagccctagcagcctgtctgccagcgtgggagacagagtgaccatcacatgcaaggccagcgacctgatccacaactggctggcctggtatcagcagaagcctggcaaggcccctaagctgctgatctacggcgctacctctctggaaacaggcgtgcccagcagattttctggcagcggctctggcaccgacttcaccctgacaatatccagcctccagcctgaggacttcgccacctactactgccagcagtactggaccacacctttcaccttcggccagggcaccaaggtggaaatcaaaaga

SEQ ID NO: 32055 - DNA, 321 bp, synthetic construct
  source 1..321: mol_type = other DNA
gagatcgtgctgacacagtctcccgccacactgtcactgtctccaggcgaaagagccacactgagctgtagagccagccagagcgtgtcctcttacctggcctggtatcagcagaagcctggacaggctccccggctgctgatctacgatgccagcaatagagccacaggcatccccgccagattttctggctctggcagcggcaccgatttcaccctgaccataagcagcctggaacctgaggacttcgccgtgtactactgccagcagagaagcaactggcccctgacctttggacagggcaccaaggtggaaatcaaa

SEQ ID NO: 32056 - DNA, 321 bp, synthetic construct
  source 1..321: mol_type = other DNA
gagatcgtgctgacacagtctcccgccacactgtcactgtctccaggcgaaagagccacactgagctgtagagccagccagagcgtgtcctcttacctggcctggtatcagcagaagcctggacaggctccccggctgctgatctacgatgccagcaatagagccacaggcatccccgccagattttctggctctggcagcggcaccgatttcaccctgaccataagcagcctggaacctgaggacttcgccgtgtactactgccagcagagaagcgactggcccctgacatttggcggcggaacaaaggtggaaatcaaa

SEQ ID NO: 32057 - DNA, 324 bp, synthetic construct; identical to SEQ ID NO: 348
  source 1..324: mol_type = other DNA

SEQ ID NO: 32058 - DNA, 321 bp, synthetic construct
  source 1..321: mol_type = other DNA
gacatccagatgacacagagccctagcagcctgtctgccagcgtgggagacagagtgaccatcacctgtagagccagccagagcatcagcagctacctgaactggtatcagcagaagcccggcaaggcccctaaactgctgatctatgccgccagctctctccagagcggagtgcctagcagattttctggcagcggctccggcaccgatttcaccctgacaatatccagcctccagcctgaggacttcgccacctactactgccagcagagctacagcacccctctgacctttggacagggcaccaaggtggaaatcaag

SEQ ID NO: 32059 - DNA, 336 bp, synthetic construct
  source 1..336: mol_type = other DNA
gacatccagatgacacagagccctagcagcctgtctgccagcgtgggagacagagtgaccattacctgtcaggccagcgagaatatctacagcttcctggcctggtatcagcagaagcctggcaaggcccctaagctgctgatctacagcgcctctaaactggccgctggcgtgccaagcagattttctggctctggcagcggcaccgacttcaccctgacaatatctagcctccagcctgaggacttcgccacctactactgccagcagaccaacagatacagcaaccccgacatctacaacgtgttcggccagggcaccaagctgacagttctt

SEQ ID NO: 32060 - DNA, 339 bp, synthetic construct
  source 1..339: mol_type = other DNA
gacatcgtgatgacacagagccccgccacactgagtgtgtctccaggcgagagagccaccatcagctgtagaagcagccagagcatcgtgcacagcaacggcaacacctacctggaatggtatcagcagaagcccggacaggcccctagactgctgatctacaaggtgtccaacagattcagcggcatccccgacagattttccggctctggcagcggcaccgatttcaccctgaccatcagcagactggaacccgaggacttcgccgtgtactactgcttccaaggcagccacgtgccaagaacctttggcggaggcaccaagctggaaatcaagaga

SEQ ID NO: 32061 - DNA, 333 bp, synthetic construct
  source 1..333: mol_type = other DNA
cagtctgctctgacacagcctgcctctgtgtctggctctcctggacagagcatcaccatcagctgtaccggcaccagctctgatgtcggcggctacaattacgtgtcctggtatcagcagcaccccggcaaggcccctaagctgatgatctacgacgtgtccaacagacccagcggcgtgtccaatagattctccggcagcaagagcggcaacaccgccagcctgacaatttctggactgcaagccgaggacgaggccgactacttctgtagcagctacaccagctccagcacacccgtggtttttggcggcggaacaaagctgacagtgctc

SEQ ID NO: 32062 - DNA, 324 bp, synthetic construct
  source 1..324: mol_type = other DNA
gagatcgtgatgacacagagccccggcacactgtcactgtctccaggcgaaagagccacactgagctgtagagccagccagagcgtgtccagctcttacctggcttggtatcagcagaagcccggacaggctcccagactgctgatctacggtgcctctagcagagccacaggcatccccgatagattttctggcagcggctccggcaccgacttcaccctgacaatcagcagactggaacccgaggacttcgccgtgtactactgtcagcagtacggcagcagccctctgacatttggcggcggaacaaaggtggaaatcaaa

SEQ ID NO: 32063 - DNA, 324 bp, synthetic construct
  source 1..324: mol_type = other DNA
gagatcgtgctgacacagtctcccgccacactgtcactgtctccaggcgaaagagccacactgagctgtagagccagccagagcgtgtcctcttacctggcctggtatcagcagaagcctggacaggctccccggctgttgatctacggtgcttctagcagagccacaggcatccccgccagattttctggctctggcagcggcaccgatttcaccctgaccataagcagcctggaacctgaggacttcgccgtgtactactgccagcagagaagcaactggcctccttacacattcggccagggcaccaagctggaaatcaaa

SEQ ID NO: 32064 - DNA, 324 bp, synthetic construct; identical to SEQ ID NO: 32063
  source 1..324: mol_type = other DNA

SEQ ID NO: 32065 - DNA, 324 bp, synthetic construct; identical to SEQ ID NO: 32062
  source 1..324: mol_type = other DNA

SEQ ID NO: 32066 - DNA, 321 bp, synthetic construct
  source 1..321: mol_type = other DNA
gacatccagatgactcagagccccagcagcctgtctgcctctgtgggagacagagtgaccatcacctgtagagccagccagagcatcagctcctacctgaactggtatcagcagaagcccggcaaggcccctaagctgctgatctacgatgccagcacactccagagcggcgtgccaagcagattttctggcagcggctctggcaccgacttcaccctgacaatatccagcctccagcctgaggacttcgccacctactactgtcagcagagcgacggcaaccctaccacctttggacagggcaccaaggtggaaatcaag

SEQ ID NO: 32067 - DNA, 294 bp, synthetic construct; identical to SEQ ID NO: 19773
  source 1..294: mol_type = other DNA

SEQ ID NO: 32068 - DNA, 294 bp, synthetic construct; identical to SEQ ID NO: 19774
  source 1..294: mol_type = other DNA

SEQ ID NO: 32069 - DNA, 366 bp, synthetic construct
  source 1..366: mol_type = other DNA
gaggttcagctgcttgagtctggcggaggactggttcaacctggcggaagcctgagactgtcttgtgccgccagcggcttcacctttagcagctacgccatgagctgggtccgacaggctcctggcaaaggactggaatgggtgtccgccatctctggctctggcggcagcacatattacgccgactctgtgaagggcagattcaccatcagccgggacaacagcaagaacaccctgtacctccagatgaacagcctgagagccgaggacaccgccgtgtactactgtgccaaagagcagtgggagggcgactacttcagcgccttcgatatttggggccagggcacaatggtcaccgtgtctagc

SEQ ID NO: 32070 - DNA, 366 bp, synthetic construct; identical to SEQ ID NO: 32069
  source 1..366: mol_type = other DNA

SEQ ID NO: 32071 - DNA, 366 bp, synthetic construct; identical to SEQ ID NO: 32069
  source 1..366: mol_type = other DNA

SEQ ID NO: 32072 - DNA, 366 bp, synthetic construct; identical to SEQ ID NO: 32069
  source 1..366: mol_type = other DNA

SEQ ID NO: 32073 - DNA, 372 bp, synthetic construct
  source 1..372: mol_type = other DNA
gaagttcagctgcttgaatcaggcggcggactggttcaacctggcggatctctgagactgagctgtgccgccagcggcttcacctttagcagctacgccatgtcctgggtccgacaggctcctggcaaaggactggaatgggtgtccgccatctctggctcaggcggcagcacatattacgccgactctgtgaagggcagattcaccatcagccgggacaacagcaagaacaccctgtacctccagatgaacagcctgagagccgaggacaccgccgtgtactattgtgccaaaggcggcgagaacaccttcgagtctcaccctgtggccttcgacatctggggccagggaacaatggtcaccgtgtctagt

SEQ ID NO: 32074 - DNA, 372 bp, synthetic construct; identical to SEQ ID NO: 32073
  source 1..372: mol_type = other DNA

SEQ ID NO: 32075 - DNA, 372 bp, synthetic construct; identical to SEQ ID NO: 32073
  source 1..372: mol_type = other DNA

SEQ ID NO: 32076 - DNA, 372 bp, synthetic construct; identical to SEQ ID NO: 32073
  source 1..372: mol_type = other DNA

SEQ ID NO: 32077 - DNA, 357 bp, synthetic construct
  source 1..357: mol_type = other DNA
caggtgcagctggtggaatctggacctggcgtggtgcagcctggcagaagcctgagaatcagctgtgccgtgtccggcttcagcgtgaccaactacggcgtgcactgggtgcgccagccacctggaaaaggactggaatggctgggcgtgatctgggctggcggcatcaccaactacaacagcgccttcatgtcccggctgaccatctccaaggacaacagcaagaacaccgtgtacctccagatgaacagcctgcgggccgaggacaccgccatgtactactgtgcttccagaggcggccactacggctacgccctggattattggggccagggaaccctcgtgaccgtgtcctct

SEQ ID NO: 32078 - DNA, 357 bp, synthetic construct; identical to SEQ ID NO: 32077
  source 1..357: mol_type = other DNA

SEQ ID NO: 32079 - DNA, 354 bp, synthetic construct
  source 1..354: mol_type = other DNA
caagttcagctgcaagagtctggccctggcctggtcaagcctagccagacactgagcatcacatgcaccgtgtccggctttagcctggcctcctacaacatccactgggtccgacagcctccaggcaaaggactggaatggctgggagtgatttgggctggcggcagcaccaactacaacagcgcactgatgagccggctgaccatcagcaaggacaacagcaagaaccaggtgttcctgaagatgagcagcctgacagccgccgataccgccgtgtactactgtgccaagagaagcgacgactacagttggttcgcctactggggccagggcacactggttacagtcagctct

SEQ ID NO: 32080 - DNA, 357 bp, synthetic construct
  source 1..357: mol_type = other DNA
caggttcagctcaaagaatctggccccgtgctggtggccccaagccagacactgtctatcacctgtaccgtgtccggcttcagcctggcctcctacaacatccactgggtccgacagcctccaggcaaaggactggaatggctgggagtgatttgggctggcggcagcaccaactacaacagcgcactgatgagccggctgagcatcagcaaggacaacagcaagagccaggtgttcctccagatgaactccctccagaccgacgacaccgccatgtactactgcgccaagagaagcgacgactacagttggttcgcctactggggccagggcacactggttactgtgtctgcttct

SEQ ID NO: 32081 - DNA, 354 bp, synthetic construct
  source 1..354: mol_type = other DNA
caagttcagctggttcagagcggagccgaagtgaagaaacctggggcctctgtgaaggtgtcctgcaaggcttccggctataccttcaccagcttttggctgaactgggtccgacaggcccctggacaaggactggaatggatgggcaacatctaccccagcaccagctacaccgtgtacaaccagaaattcaaggaccgcgtgaccatgaccagggacaccagcacaagcacagtgtacatggaactgagcagcctgcggagcgaggataccgccgtgtattattgcgccagaacctggcggggcaacagcttcgattattggggccagggaaccaccgtgaccgtgtcatct

SEQ ID NO: 32082 - DNA, 354 bp, synthetic construct
  source 1..354: mol_type = other DNA
caagttcagctggttcagagcggagccgaagtgaagaaacctggggcctctgtgaaggtgtcctgcaaggcttccggctataccttcaccagcttttggctgaactgggtccgacaggcccctggacaaggactggaatggatgggcaacatctaccccagcgacagctacaccgtgtacaaccagaaattcaaggaccgcgtgaccatgaccagggacaccagcacaagcacagtgtacatggaactgagcagcctgcggagcgaggataccgccgtgtattattgcgccagaacctggcggggcaacagcttcgattattggggccagggaaccaccgtgaccgtgtcatct

SEQ ID NO: 32083 - DNA, 351 bp, synthetic construct
  source 1..351: mol_type = other DNA
gaagttcagctccagcagagcggccctgagcttgtgaaacctggcgcttccgtgaagatcagctgcaaggccagcggctacagcttcaccggctacaccatgaactgggtcaagcagtcccacggcaagaacctggaatggatcggcctgattaacccctacaacggcggcacctcctacaaccagaagttcaaggccaaggccacactgaccgtggacaagagcagcagcacagcctacatgcagctgaagtccctgaccagcgaggacagcgccgtgtactactgcgccagagattacggctacgtgctggactattggggccagggcacaagcgtgacagtgtctagt

SEQ ID NO: 32084 - DNA, 351 bp, synthetic construct
  source 1..351: mol_type = other DNA
gaagttcagctccagcagtctggccccgagcttgtgaaacctggcgcttccatgaagatcagctgcaaggccagcggctacagcttcaccggctacaccatgaactgggtcaagcagagccacggcaagaacctggaatggatcggcctgattaacccctacaacggcggcacctcctacaaccagaagttcaagggcaaagccacactgaccatcgacaagagcagcagcaccgcctacatggaactgctgagcctgacctctgaggacagcgccgtgtactactgcgccagagattacggctacgtgctggactattggggccagggcacaaccctgacagtgtctagt

SEQ ID NO: 32085 - DNA, 351 bp, synthetic construct; identical to SEQ ID NO: 32084
  source 1..351: mol_type = other DNA

SEQ ID NO: 32086 - DNA, 378 bp, synthetic construct
  source 1..378: mol_type = other DNA
caggttcagctggttcagagcggagccgaagtgaagaaacctggggcctctgtgaaggtgtcctgcaaggcttccggctacacctttaccaactacctgatcgagtgggtccgacaggctccaggacaaggactggaatggatgggcctgattaaccctggcagcggcggcaccaactacaacgagaagttcaagggcagagtgaccatgaccaccgacaccagcacaagcaccgcctacatggaactgcggagcctgagaagcgacgacaccgccgtgtattattgcgccagaagaagccctctcggctcttggatctactacgcctatgacggcgtggcctattggggccagggaacactggttacagtgtcctct

SEQ ID NO: 32087 - DNA, 363 bp, synthetic construct
  source 1..363: mol_type = other DNA
caagttcagcttcaacagcctggcgctgagctggtcaaacctggcgcttctgtgaagatgagctgcaaagccagcggctacaccttcagcagctactggatcaactggatgaagcagaaacccggccagggactcgaatggatcggccaaatctatcccggcgacggcgacaccaactacaacggcaagttcaagggcagagccacactgaccgccgatacctctagcagcacagcctacatgcagctgagcagcctgaccagcgaagatagcgccgtgtacttctgtgcccggtccatcacaacagtcgtgggctgcgctatggactattggggccagggaacaagcgtgaccgtgtctagt

SEQ ID NO: 32088 - DNA, 363 bp, synthetic construct
  source 1..363: mol_type = other DNA
caagttcagcttcaacagcctggcgctgagctggtcaaacctggcgcttctgtgaagatgagctgcaaagccagcggctacgccttcagcagctcttggatcaactggatgaagcagaaacccggccagggactcgaatggatcggccaaatctatcccggcgacggcgacaccaactacaacggcaagttcaagggcagagccacactgaccgccgatacctctagcagcacagcctacatgcagctgagcagcctgaccagcgaagatagcgccgtgtacttctgtgcccggtccatcacaacagtcgtgggctgcgctatggactattggggccagggaacaagcgtgaccgtgtctagt

SEQ ID NO: 32089 - DNA, 363 bp, synthetic construct
  source 1..363: mol_type = other DNA
gaagttcagctggttgaatctggcggcggactggttcaacctggcggatctctgagactgagctgtgccgcctctggctacacctttagcagctactgggtcaactgggttcgacaggcccctggcaaaggactggaatgggtcgcccaaatctatcccggcgacggcgacaccaactacaacggcaagttcaagggcagattcaccatcagccgggacaacagcaagaacaccctgtacctccagatgaactccctgagagccgaggacaccgccgtgtactattgtgccagatccatcaccaccgtcgtgggctgcgctatggattattggggccagggaaccctggtcaccgtgtcctct

SEQ ID NO: 32090 - DNA, 363 bp, synthetic construct
  source 1..363: mol_type = other DNA
gaagttcagctggttgaatctggcggcggactggttcaacctggcggatctctgagactgagctgtgccgcctctggctacgcctttagcaactactgggtcaactgggttcgacaggcccctggcaaaggactggaatgggtcgcccaaatctatcccggcgacggcgacaccaactacaacggcaagttcaagggcagattcaccatcagccgggacaacagcaagaacaccctgtacctccagatgaactccctgagagccgaggacaccgccgtgtactattgtgccagatccatcaccaccgtcgtgggctgcgctatggattattggggccagggaaccctggtcaccgtgtcctct

SEQ ID NO: 32091 - DNA, 351 bp, synthetic construct
  source 1..351: mol_type = other DNA
gaagtccaacttgtggagtctggagggggcctggtgcagcccggcggctctctcagactgtcttgtgcggcaagcggctacaccttcagctcttactggatagaatgggtgaggcaggcacctggaaagggactggagtggattggagagattctgccaggagggggagatacaaattacaatgaaatcttcaaggggcgggccaccttttcagcggataccagcaagaatacagcttacctgcagatgaatagcctccgggcagaagataccgctgtttattattgcacgagacgggtgccaataagactggactattgggggcaagggactcttgtcaccgtcagttca

SEQ ID NO: 32092 - DNA, 351 bp, synthetic construct
  source 1..351: mol_type = other DNA
gaagtccaacttgtggagtctggagggggcctggtgcagcccggcggctctctcagactgtcttgtgcggcaagcggctacaccttcacctcttactggatagaatgggtgaggcaggcacctggaaagggactggagtggattggagagattctgccaggagggggagatacaaattacaatgaaatcttcaaggggcgggccaccttttcagcggataccagcaagaatacagcttacctgcagatgaatagcctccgggcagaagataccgctgtttattattgcacgagacgggtgccaataagactggactattgggggcaagggactcttgtcaccgtcagttca

SEQ ID NO: 32093 - DNA, 351 bp, synthetic construct; identical to SEQ ID NO: 32092
  source 1..351: mol_type = other DNA

SEQ ID NO: 32094 - DNA, 351 bp, synthetic construct
  source 1..351: mol_type = other DNA
caggttcagctgcaacagcctggcgctgagcttgtgaaacctggcgcttccgtgaagatgagctgcaaggccagcggctacaccttcaccagctactggatcaactggatgaagcagaaaccaggccagggcctcgaatggatcggacagattcttcctggcggcggagacaccaactacaacggcaagttcaagggcagagccacactgaccgccgatacctctagcagcacagcctacatgcagctgagcagcctgaccagcgaagatagcgccgtgtacttctgcaccagacgggtgcccatcagactggattattggggccagggaaccagcgtgaccgtgtcatct

SEQ ID NO: 32095 - DNA, 351 bp, synthetic construct; identical to SEQ ID NO: 32092
  source 1..351: mol_type = other DNA

SEQ ID NO: 32096 - DNA, 351 bp, synthetic construct; identical to SEQ ID NO: 32092
  source 1..351: mol_type = other DNA

SEQ ID NO: 32097 - DNA, 351 bp, synthetic construct
  source 1..351: mol_type = other DNA
caagttcagctggttcagagcggagccgaagtgaagaaacctggggcctctgtgaaggtgtcctgcaaagccagcggctacacctttaccagctactggatcaactgggtccgacaggcccctggacaaggactggaatggatgggacagatccttccaggcggaggggacaccaactacaacggcaagttcaagggcagagtgaccatcaccgccgacaccagcacaagcaccgcctacatggaactgagcagcctgagaagcgaggacaccgccgtgtattattgcaccagacgggtgcccatccggctggattattggggacagggaaccctggtcaccgtgtctagt

SEQ ID NO: 32098 - DNA, 339 bp, synthetic construct
  source 1..339: mol_type = other DNA
gaagtgcagctggttgaatcaggcggaggactggttcagcctggcggatctctgagactgtcttgtgccgccagcggctacaccttcaccagctactggatgaactgggtccgacaggcccctggcaaaggactggaatgggtcggaatgatcgaccccagcgacagcgagacacactacaaccacatcttcaaggaccgcttcaccatcagcgccgacaccagcaagaataccgcctacctccagatgaactccctgagagccgaggacaccgccgtgtactactgcgccagaaacctgtatctgttcggccagggaaccctggtcacagtgtcatct

SEQ ID NO: 32099 - DNA, 339 bp, synthetic construct
  source 1..339: mol_type = other DNA
gaagtgcagctggttgaatcaggcggaggactggttcagcctggcggatctctgagactgtcttgtgccgccagcggctacaccttcagcagctactggatgaactgggtccgacaggcccctggcaaaggactggaatgggtcggaatgatcgaccccagcgacagcgagacacactacaaccacatcttcaaggaccgcttcaccatcagcgccgacaccagcaagaataccgcctacctccagatgaactccctgagagccgaggacaccgccgtgtactactgcgccagaaacctgtatctgtggggccagggaaccctggtcacagtgtcatct

SEQ ID NO: 32100 - DNA, 339 bp, synthetic construct; identical to SEQ ID NO: 32098
  source 1..339: mol_type = other DNA

SEQ ID NO: 32101 - DNA, 339 bp, synthetic construct; identical to SEQ ID NO: 32099
  source 1..339: mol_type = other DNA

SEQ ID NO: 32102 - DNA, 339 bp, synthetic construct; identical to SEQ ID NO: 32098
  source 1..339: mol_type = other DNA

SEQ ID NO: 32103 - DNA, 339 bp, synthetic construct
  source 1..339: mol_type = other DNA
gaagtgcagctggttgaatcaggcggaggactggttcagcctggcggatctctgagactgtcttgtgccgccagcggctacaccttcaccaactactggatgaactgggtccgacaggcccctggcaaaggactggaatgggtcggaatgatcgaccccagcgacagcgagacacactacaaccacatcttcaaggaccgcttcaccatcagcgccgacaccagcaagaataccgcctacctccagatgaactccctgagagccgaggacaccgccgtgtactactgcgccagaaacctgtatctgtggggccagggaaccctggtcacagtgtcatct

SEQ ID NO: 32104 - DNA, 339 bp, synthetic construct; identical to SEQ ID NO: 32103
  source 1..339: mol_type = other DNA

SEQ ID NO: 32105 - DNA, 351 bp, synthetic construct
  source 1..351: mol_type = other DNA
gaagttcagcttcagcagagcggagccgagctgatgaagcctggcgcttctgtgaagatttcctgcaaggccaccggctacaccttcagcagctactggatcgagtgggtcaagcagaggcccggacatggcctggaatggatcggagaaattctgcctggcggcggagacaccaactacaacgagattttcaagggcaaagccaccttcaccgccgacaccagcagcaacacagcctacatgcagctgagcagcctgaccagcgaagatagcgccgtgtactactgcaccagacgggtgcccgtgtacttcgattattggggccagggcaccagcgtgaccgtttcttct

SEQ ID NO: 32106 - DNA, 348 bp, synthetic construct
  source 1..348: mol_type = other DNA
caagttcagctgcaacagagcggccctgagctggttaagcctggcgcttctgtgcggatctcttgcaaggccagcggctacaccttcaccagctactacatccactgggtcaagcagcggcctggacagggactcgaatggatcggctggatctaccccggcaacctgaacaccaagtacaacgagaagttcaagggcaaagccacactgaccgccgacaagagcagcagcacagcctacatgcagctgagcagcctgacaagcgaggacagcgccgtgtacttctgcgccagatacgactggtacttcgacgtgtggggagccggaaccaccgtgacagtttcttct

SEQ ID NO: 32107 - DNA, 348 bp, synthetic construct
  source 1..348: mol_type = other DNA
caagttcagctggttgaatccggtggcggagtggtgcaacctggcagaagtctgagactgagctgtgccgccagcggcttcagcttcagcaattatggcatggcctgggtccgacaggcccctggaaaaggacttgagtgggtcgccagcatctctaccggcggaggcaatacctactacgccgacagcgtgaaggacagattcaccatcagccgggacaacagcaagaacaccctgtacctccagatgaacagcctgagagccgaggataccgccgtgtactactgcaccagacacgatagaggcggcctgtattggggccagggaacaatggtcaccgtgtcctct

SEQ ID NO: 32108 - DNA, 351 bp, synthetic construct
  source 1..351: mol_type = other DNA
gaactgcaactgcttgaatcaggtggcggcctggttcagcctggcggatctctgagactgagctgtgccgccagcggcttcaccttctctaagtacgctatggcctgggtccgacaggcccctggaaaaggacttgagtgggtcgcctctatcagcacaggcggcgtgaacacctactacgccgacagcgtgaaggacagattcaccatcagccgggacaacgccaagaacaccctgtacctccagatgaacagcctgagagccgaggacacagccgtgtattattgcgccacacacaccggcgactacttcgactattggggccagggaacaatggtcaccgtgtcctct

SEQ ID NO: 32109 - DNA, 351 bp, synthetic construct; identical to SEQ ID NO: 32108
  source 1..351: mol_type = other DNA

SEQ ID NO: 32110 - DNA, 348 bp, synthetic construct; identical to SEQ ID NO: 32107
  source 1..348: mol_type = other DNA

SEQ ID NO: 32111 - DNA, 375 bp, synthetic construct
  source 1..375: mol_type = other DNA
caactccagctgcaagagtctggccccggactggtcaagcctagcgaaacactgagcctgacctgtaccgtgtctggcggcagcatcagcagcagctcttattggtggggctggaccagacagcctcctggcagaggactggaatggatcggcaccatgtactacagcggcaacatctactacaaccccagcctccagagccgggccaccatctctgtggacaccagcaagaaccagttcagcctgaagctgagcagcgtgacagccgccgataccgccgtgtattattgcgccagacatgtgggctacagctacggcagacggttctggtacttcgacctgtggggcagaggcaccctggtcacagtttcttct

SEQ ID NO: 32112 - DNA, 360 bp, synthetic construct
  source 1..360: mol_type = other DNA
gaagttcagctggtggaatctggccctggcctggtcaagcctagcgagacactgagcctgacctgtaccgtgtccggcttcagcctgaccagatttggcgtgcactgggtccgacagccacctggcaaaggactggaatggctgggagtgatttggagaggcggcagcaccgattacaacgccgccttcatgagccggctgaccatcagcaaggacaacagcaagaaccaggtgtccctgaagctgagcagcgtgacagccgctgataccgccgtgtactactgctccaaccactactacggcagctccgactacgccctggataattggggccagggaaccctggtcaccgtgtcatct

SEQ ID NO: 32113 - DNA, 354 bp, synthetic construct
  source 1..354: mol_type = other DNA
caggtccaactggtgcagagcggagccgaggtcgtgaagcctggcgcttccgtgaagattagctgcaaagccagcggctacacctttaccggctactttatgcactgggtcaagcagagccctggccagagcctggaatggatcggcagaatccacccctacgacggcgacaccttctacaaccagaagttccagggcaaggccaccctgacagtggacaagagcagcaacaccgcccacatggaactgctgagcctgaccagcgaggacttcgccgtgtactactgcaccagatacgacggcagccgggctatggactattggggccagggcaccaccgtgaccgtgtctagt

SEQ ID NO: 32114 - DNA, 363 bp, synthetic construct
  source 1..363: mol_type = other DNA
gaagttcagctggttgaaagtggtggcggcctggttcaacctggcggatctctgagactgagctgtgccgccagcggcttcaatgtgtacgcctctggaatgcactgggtccgacaggcccctggcaaaggacttgagtgggtcgccaaaatctaccccgacagcgactacacctattacgccgacagcgtgaagggcagattcaccatcagcgccgacaccagcaagaacaccgcctacctccagatgaactccctgagagccgaggacaccgccgtgtactactgtagcagagacagcagcttctactacgtgtacgctatggactactggggccagggcacactggtcacagtctcttct

SEQ ID NO: 32115 - DNA, 363 bp, synthetic construct; identical to SEQ ID NO: 32114
  source 1..363: mol_type = other DNA

SEQ ID NO: 32116 - DNA, 351 bp, synthetic construct; identical to SEQ ID NO: 373
  source 1..351: mol_type = other DNA

SEQ ID NO: 32117 - DNA, 348 bp, synthetic construct
  source 1..348: mol_type = other DNA
gaagtgcagctggttgaatcaggtggcggcctggttcaacctggcggatctctgagactgagctgtgccgccagcggctacagcatcaccaatgactacgcctggaactgggtccgacaggcccctggaaaaggactggaatgggtcggatatatcagctactccggctacaccacctacaatcccagcatcaagagccggttcaccatcagcagagacaccagcaagaacaccctgtacctccagatgaactccctgagagccgaggacaccgccgtgtactattgtgccagatggaccagcggcctggactattggggacagggaacactggtcaccgtgtcctct

SEQ ID NO: 32118 - DNA, 360 bp, synthetic construct
  source 1..360: mol_type = other DNA
caagttcagctggttcagagcggagccgaagtgaagaaacctggcagcagcgtgaaggtgtcctgcaaagcaagcggcggcacctttagcacctacgccatccactgggttcgacaggcaccaggacaaggactggaatggatgggcagaatcatccccatcgagggcagagcctactacgcccagaaattccagggcagagtgaccatcaccgccgacgagtctacaagcaccgcctacatggaactgagcagcctgagaagcgaggataccgctgtgtactattgcgccagaggccggtacagctacagatattggttcgactactggggccagggcaccctggttacagtctcttct

SEQ ID NO: 32119 - DNA, 360 bp, synthetic construct
  source 1..360: mol_type = other DNA
caagttcagctggttcagagcggagccgaagtgaagaaacctggcagcagcgtgaaggtgtcctgcaaagcaagcggcggcacctttagctcctacgccatccactgggttcgacaggcaccaggacaaggactggaatggatgggcagaatcatccccatcgagggcagagcctactacgcccagaaattccagggcagagtgaccatcaccgccgacgagtctacaagcaccgcctacatggaactgagcagcctgagaagcgaggataccgctgtgtactattgcgccagaggccggtacagctacagatattggttcgactactggggccagggcaccctggttacagtctcttct

SEQ ID NO: 32120 - DNA, 354 bp, synthetic construct; identical to SEQ ID NO: 372
  source 1..354: mol_type = other DNA

SEQ ID NO: 32121 - DNA, 366 bp, synthetic construct
  source 1..366: mol_type = other DNA
gaggtgcagctggttgaatctggcggaggactggttcagcctggcggatctctgagactgtcttgtgctgccagcggcttcaccttcagctcctacgccatgagctgggtccgacaggctcctggcaaaggactggaatgggtgtccgccatctctggctcaggcggcagcacatattacgccgactctgtgaagggcagattcaccatcagccgggacaacagcaagaacaccctgtacctccagatgaactccctgagagccgaggacaccgccgtgtactattgtgccagactgggctaccccaccaccacactgctgccctttgattattggggccagggcaccctggtcaccgtttcttct

SEQ ID NO: 32122 - DNA, 363 bp, synthetic construct
  source 1..363: mol_type = other DNA
gaagttcagctggttgaatctggcggcggactggttcaacctggcggatctctgagactgagctgtgccgcctctggcatcgacttcaacagcaactactacatgtgctgggtccgacaggccccaggcaaaggactggaatggatcggctgtatctacgtgggcagccacgtgaacacctattacgccaactgggccaagggcagattcaccatcagccgggacaacagcaagaacaccgtgtacctccagatgaactccctgagagccgaggacaccgccgtgtactactgtgccacatctggcagcagcgtgctgtacttcaagttctggggccagggaaccctggtcaccgtttcttct

SEQ ID NO: 32123 - DNA, 354 bp, synthetic construct
  source 1..354: mol_type = other DNA
caagttcagctggttcagtctggccccgaagtgaagaaacctggggcctctgtgaaggtgtcctgcaaggcttccggctacacctttaccagctaccacatccagtgggtccgacaggctcctggacaaggactggaatggatcggctggatctatcctggcgacggcagcacccagtacaacgagaagttcaagggcagagtgaccatcaccgccgacaagagcacaagcaccgcctacatggaactgagcagcctgaccagcgaggacacagccgtgtattattgcgccagagagggcacctactacgctatggattattggggccagggcaccagcgtgaccgtttcttct

SEQ ID NO: 32124 - DNA, 381 bp, synthetic construct
  source 1..381: mol_type = other DNA
caggttcagctgcaacaaagcggagccggcctgctgaagcctagcgaaacactgtctctgacctgtgccgtgtccggcggcagctttagcggctattactggacctggatcagacagaggccaggcaaaggactggaatggatcggcgagatcaaccacagaggctccaccgactacaaccccagcctgaagtccagagtgaccatgagcatcgacaccagcaagtcccagttcagcctgaatctgaagtccgtgacagccgccgataccgccgtgtactattgtgccagagccgcctggggcagctgctacgatggaacatgttaccccgccgagtatttccagtattggggccagggcaccctggtcacagtctcttct

SEQ ID NO: 32125 - DNA, 369 bp, synthetic construct
  source 1..369: mol_type = other DNA
caagttcagctggttcagagcggagccgaagtgaagaaacctggggcctctgtgaaggtgtcctgcaaggccagcggctacagctttaccagctacggcatcaactgggtccgacaggcacctggacaaggactggaatggatgggctggatcagcgcctacaacggcaacaccaactacgcccagaaactccagggcagagtgaccatgaccagagacaccagcaccagaaccgcctacatggaactgcggagcctgagatccgatgacaccgccgtgtattattgcgccagagagtacgacatcctgaccggctactccgacgcctttgacatctggggccagggcacactggttaccgttagctct

SEQ ID NO: 32126 - DNA, 357 bp, synthetic construct
  source 1..357: mol_type = other DNA
caagtgcagctggttgagtcaggcggtggccttgtgaaacctggcggtagcctgagactgtcttgtgccgccagcggcttcaccttcagcagctactctatgcactgggtccgacaggcccctggcaaaggacttgaatgggtgtccgacatcagcaccaacagcagaacccggaactacgccgacagcgtgaagggcagattcaccatctccagagacaacgccaagaacagcgtgtacctccagatgcacagcctgagagatgaggacacagccgtgtattattgcgccagagactacggcggcatctactacttcgactactggggccagggaaccctggtcacagtctcttct

SEQ ID NO: 32127 - DNA, 381 bp, synthetic construct; identical to SEQ ID NO: 32124
  source 1..381: mol_type = other DNA

SEQ ID NO: 32128 - DNA, 369 bp, synthetic construct
  source 1..369: mol_type = other DNA
caagttcagctggttcagagcggagccgaagtgaagaaacctggggcctctgtgaaggtgtcctgcaaggccagcggctacagctttaccagctacggcatcaactgggtccgacaggcacctggacaaggactggaatggatgggctggatcagcgcctacaacggctacaccaactacgcccagaaactccagggcagagtgaccatgaccagagacaccagcaccagaaccgcctacatggaactgcggagcctgagatccgatgacaccgccgtgtattattgcgccagagagtacgacatcctgaccggctactccgacgcctttgacatctggggccagggcacactggttaccgttagctct

SEQ ID NO: 32129 - DNA, 348 bp, synthetic construct
  source 1..348: mol_type = other DNA
gaggttcagctgcttgagtctggcggaggactggttcaacctggcggaagcctgagactgtcttgtgccgccagcggcttcacctttagcagctacgccatgagctgggtccgacaggctcctggcaaaggactggaatgggtgtccagcatcagcaccagcggcagctatacagcctacgccgatagcgtgaagggcagattcaccatcagccgggacaacagcaagaacaccctgtacctccagatgaacagcctgagagccgaggacaccgccgtgtactattgtgccaaaggcggctacaccttcgactactggggccagggaacactggtcacagtttctagc

SEQ ID NO: 32130 - DNA, 378 bp, synthetic construct; identical to SEQ ID NO: 19792
  source 1..378: mol_type = other DNA

SEQ ID NO: 32131 - DNA, 378 bp, synthetic construct; identical to SEQ ID NO: 19793
  source 1..378: mol_type = other DNA

SEQ ID NO: 32132 - DNA, 738 bp, synthetic construct
  source 1..738: mol_type = other DNA
caatctgtgctgacccagcctccaagcgtgtccgtttctcctggacagaccgccagcatcacctgtagcggagataagctgggcgacaagttcgcctgctggtatcagcagaagcccggccagtctcctgtgctggtcatctaccaggatagcaagaggcccagcggcatccccgagagattttccggcagcaacagcggcaataccgccacactgacaatcagcggcacccaggctatggacgaggccgactactattgccaggcttgggattccgatggcaaggccacagtggtgtttggcaccggcaccaaggtggaaatcaagggcggaggcggaagtggaggcggaggatctggcggcggaggctctgaggttcagctgcttgagtctggcggaggactggttcaacctggcggaagcctgagactgtcttgtgccgccagcggcttcacctttagcagctacgccatgagctgggtccgacaggctcctggcaaaggactggaatgggtgtccgccatctctggctctggcggcagcacatattacgccgactctgtgaagggcagattcaccatcagccgggacaacagcaagaacaccctgtacctccagatgaacagcctgagagccgaggacaccgccgtgtactactgtgccaaagagcagtgggagggcgactacttcagcgccttcgatatttggggccagggcacaatggtcaccgtgtctagc

SEQ ID NO: 32133 - DNA, 738 bp, synthetic construct
  source 1..738: mol_type = other DNA
caatctgtgctgacccagcctccaagcgtgtccgtttctcctggacagaccgccagcatcacctgtagcggagataagctgggcgacaagtacgcctgctggtatcagcagaagcccggccagtctcctgtgctggtcatctaccaggatagcaagaggcccagcggcatccccgagagattttccggcagcaacagcggcaataccgccacactgacaatcagcggcacccaggctatggacgaggccgactactattgccaggcttgggattccgatggcaaggccacagtggtgtttggcaccggcaccaaggtggaaatcaagggcggaggcggaagtggaggcggaggatctggcggcggaggctctgaggttcagctgcttgagtctggcggaggactggttcaacctggcggaagcctgagactgtcttgtgccgccagcggcttcacctttagcagctacgccatgagctgggtccgacaggctcctggcaaaggactggaatgggtgtccgccatctctggctctggcggcagcacatattacgccgactctgtgaagggcagattcaccatcagccgggacaacagcaagaacaccctgtacctccagatgaacagcctgagagccgaggacaccgccgtgtactactgtgccaaagagcagtgggagggcgactacttcagcgccttcgatatttggggccagggcacaatggtcaccgtgtctagc

SEQ ID NO: 32134 - DNA, 738 bp, synthetic construct
  source 1..738: mol_type = other DNA
caatctgtgctgacccagcctccaagcgtgtccgtttctcctggacagaccgccagcatcacctgtagcggagataagctgggcgacaagtacgcctgctggtatcagcagaagcccggccagtctcctgtgctggtcatctaccaggataccaagaggcccagcggcatccccgagagattttccggcagcaacagcggcaataccgccacactgacaatcagcggcacccaggctatggacgaggccgactactattgccaggcttgggattccgatggcaaggccacagtggtgtttggcaccggcaccaaggtggaaatcaagggcggaggcggaagtggaggcggaggatctggcggcggaggctctgaggttcagctgcttgagtctggcggaggactggttcaacctggcggaagcctgagactgtcttgtgccgccagcggcttcacctttagcagctacgccatgagctgggtccgacaggctcctggcaaaggactggaatgggtgtccgccatctctggctctggcggcagcacatattacgccgactctgtgaagggcagattcaccatcagccgggacaacagcaagaacaccctgtacctccagatgaacagcctgagagccgaggacaccgccgtgtactactgtgccaaagagcagtgggagggcgactacttcagcgccttcgatatttggggccagggcacaatggtcaccgtgtctagc

SEQ ID NO: 32135 - DNA, 744 bp, synthetic construct
  source 1..744: mol_type = other DNA
caatctgtgctgacccagcctccaagcgtgtccgtttctcctggacagaccgccagcatcacctgtagcggagataagctgggcaataagtacgcctgctggtatcagcagaagcccggccagtctcctgtgctggtcatctaccaggatagcaagaggcccagcggcatccccgagagattttccggcagcaacagcggcaataccgccacactgacaatcagcggcacccaggctatggacgaggccgactactattgccaggcttgggattccgatggcaaggccacagtggtgtttggcaccggcaccaaggtggaaatcaagggcggaggcggaagtggaggcggaggatctggcggcggaggctctgaggttcagctgcttgagtctggcggaggactggttcaacctggcggaagcctgagactgtcttgtgccgccagcggcttcacctttagcagctacgccatgagctgggtccgacaggctcctggcaaaggactggaatgggtgtccgccatctctggctctggcggcagcacatattacgccgactctgtgaagggcagattcaccatcagccgggacaacagcaagaacaccctgtacctccagatgaacagcctgagagccgaggacaccgccgtgtactactgtgccaaagagcagtgggagggcgactacttcagcgccttcgatatttggggccagggcacaatggtcaccgtgtctagcacgcgt

SEQ ID NO: 32136 - DNA, 759 bp, synthetic construct
  source 1..759: mol_type = other DNA
aacttcatgctgacccagcctcacagcgtgtccgagtctccaggcaagaccgtgaccatcagctgcacaagaagcagcggctctatcgccagcaactacgtgcagtggtatcagcagaggccaggcagcgcacctaccaccgtgatctacgaggataaccagaggccaagcggcgtgcccgatagattttctggcagcatcgacagcagcagcaacagcgccagcctgacaatcagcggcctgaaaacagaggacgaggccgactactactgccagagctatgatctggctgccgacgtgcgcgtggtgtttggcactggaacaaaagtgaccgtgagctccggcggaggcggaagtggaggcggaggatctggcggcggaggctctgaagttcagctgcttgaatcaggcggcggactggttcaacctggcggatctctgagactgagctgtgccgccagcggcttcacctttagcagctacgccatgtcctgggtccgacaggctcctggcaaaggactggaatgggtgtccgccatctctggctcaggcggcagcacatattacgccgactctgtgaagggcagattcaccatcagccgggacaacagcaagaacaccctgtacctccagatgaacagcctgagagccgaggacaccgccgtgtactattgtgccaaaggcggcgagaacaccttcgagtctcaccctgtggccttcgacatctggggccagggaacaatggtcaccgtgtctagt

SEQ ID NO: 32137 - DNA, 759 bp, synthetic construct
  source 1..759: mol_type = other DNA
aacttcatgctgacccagcctcacagcgtgtccgagtctccaggcaagaccgtgaccatcagctgcacaagaagaagcggctctatcgccagcaactacgtgcagtggtatcagcagaggccaggcagcgcacctaccaccgtgatctacgaggataaccagaggccaagcggcgtgcccgatagattttctggcagcatcgacagcagcagcaacagcgccagcctgacaatcagcggcctgaaaacagaggacgaggccgactactactgccagagctatgatctggctgccgacgtgcgcgtggtgtttggcactggaacaaaagtgaccgtgagctccggcggaggcggaagtggaggcggaggatctggcggcggaggctctgaagttcagctgcttgaatcaggcggcggactggttcaacctggcggatctctgagactgagctgtgccgccagcggcttcacctttagcagctacgccatgtcctgggtccgacaggctcctggcaaaggactggaatgggtgtccgccatctctggctcaggcggcagcacatattacgccgactctgtgaagggcagattcaccatcagccgggacaacagcaagaacaccctgtacctccagatgaacagcctgagagccgaggacaccgccgtgtactattgtgccaaaggcggcgagaacaccttcgagtctcaccctgtggccttcgacatctggggccagggaacaatggtcaccgtgtctagt

SEQ ID NO: 32138 - DNA, 759 bp, synthetic construct
  source 1..759: mol_type = other DNA
aacttcatgctgacccagcctcacagcgtgtccgagtctccaggcaagaccgtgaccatcagctgcacaagaaacagcggctctatcgccagcaactacgtgcagtggtatcagcagaggccaggcagcgcacctaccaccgtgatctacgaggataaccagaggccaagcggcgtgcccgatagattttctggcagcatcgacagcagcagcaacagcgccagcctgacaatcagcggcctgaaaacagaggacgaggccgactactactgccagagctatgatctggctgccgacgtgcgcgtggtgtttggcactggaacaaaagtgaccgtgagctccggcggaggcggaagtggaggcggaggatctggcggcggaggctctgaagttcagctgcttgaatcaggcggcggactggttcaacctggcggatctctgagactgagctgtgccgccagcggcttcacctttagcagctacgccatgtcctgggtccgacaggctcctggcaaaggactggaatgggtgtccgccatctctggctcaggcggcagcacatattacgccgactctgtgaagggcagattcaccatcagccgggacaacagcaagaacaccctgtacctccagatgaacagcctgagagccgaggacaccgccgtgtactattgtgccaaaggcggcgagaacaccttcgagtctcaccctgtggccttcgacatctggggccagggaacaatggtcaccgtgtctagt

SEQ ID NO: 32139 - DNA, 759 bp, synthetic construct
  source 1..759: mol_type = other DNA
aacttcatgctgacccagcctcacagcgtgtccgagtctccaggcaagaccgtgaccatcagctgcacaagaagcagcggctctatcgccaacaactacgtgcagtggtatcagcagaggccaggcagcgcacctaccaccgtgatctacgaggataaccagaggccaagcggcgtgcccgatagattttctggcagcatcgacagcagcagcaacagcgccagcctgacaatcagcggcctgaaaacagaggacgaggccgactactactgccagagctatgatctggctgccgacgtgcgcgtggtgtttggcactggaacaaaagtgaccgtgagctccggcggaggcggaagtggaggcggaggatctggcggcggaggctctgaagttcagctgcttgaatcaggcggcggactggttcaacctggcggatctctgagactgagctgtgccgccagcggcttcacctttagcagctacgccatgtcctgggtccgacaggctcctggcaaaggactggaatgggtgtccgccatctctggctcaggcggcagcacatattacgccgactctgtgaagggcagattcaccatcagccgggacaacagcaagaacaccctgtacctccagatgaacagcctgagagccgaggacaccgccgtgtactattgtgccaaaggcggcgagaacaccttcgagtctcaccctgtggccttcgacatctggggccagggaacaatggtcaccgtgtctagt

SEQ ID NO: 32140 - DNA, 717 bp, synthetic construct
  source 1..717: mol_type = other DNA
gacatcgtgatgacacagacccctgccacactgtctgtgtctgccggcgagagagtgaccattacctgcaaagccagccagagcgtgtccaacgacgtgacctggtatcagcagaagcctggacaggcccctcggctgctgatctacagcgccagcaatagatacagcggcgtgcccgccagattttccggctctggatacggcaccgagttcaccttcaccatcagcagcgtgcagagcgaggacttcgccgtgtacttctgccagcaagactacagctctttcggccagggcaccaagctggaaatcaagagaggcggaggcggaagtggaggcggaggatctggcggcggaggctctcaggtgcagctggtggaatctggacctggcgtggtgcagcctggcagaagcctgagaatcagctgtgccgtgtccggcttcagcgtgaccaactacggcgtgcactgggtgcgccagccacctggaaaaggactggaatggctgggcgtgatctgggctggcggcatcaccaactacaacagcgccttcatgtcccggctgaccatctccaaggacaacagcaagaacaccgtgtacctccagatgaacagcctgcgggccgaggacaccgccatgtactactgtgcttccagaggcggccactacggctacgccctggattattggggccagggaaccctcgtgaccgtgtcctct

SEQ ID NO: 32141 - DNA, 717 bp, synthetic construct
  source 1..717: mol_type = other DNA
gacatccagatgacacagagccctagcagcctgtctgccagcgtgggagacagagtgaccatcacatgcaaggccagccagagcgtgtccaacgacgtgacctggtatcagcagaagcctggacaggcccctaagctgctgatctacagcgccagcaacagatacagcggagtgcccgccagattttccggctctggctacggcaccgagttcacctttaccatcagcagcgtgcagagcgaggacttcgccgtgtacttctgccagcaagactacagcagcttcggccagggcaccaagctggaaatcaagagaggcggaggcggaagtggaggcggaggatctggcggcggaggctctcaggtgcagctggtggaatctggacctggcgtggtgcagcctggcagaagcctgagaatcagctgtgccgtgtccggcttcagcgtgaccaactacggcgtgcactgggtgcgccagccacctggaaaaggactggaatggctgggcgtgatctgggctggcggcatcaccaactacaacagcgccttcatgtcccggctgaccatctccaaggacaacagcaagaacaccgtgtacctccagatgaacagcctgcgggccgaggacaccgccatgtactactgtgcttccagaggcggccactacggctacgccctggattattggggccagggaaccctcgtgaccgtgtcctct

SEQ ID NO: 32142 - DNA, 726 bp, synthetic construct
  source 1..726: mol_type = other DNA
gacatccagatgacacagagccctagcagcctgtctgccagcgtgggagacagagtgaccatcacctgtagagccagcagcagcgtgtccagcagctacctgcattggtatcagcagaagcccggcaaggcccctaaagtgtggatctacagcaccagcaatctggcctctggcgtgcccagcagattttctggctctggcagcggcaccgacttcaccctgacaatatctagcctccagcctgaggacttcgccacctactactgccagcagtacagcggctaccccatcacctttggacagggcaccaaggtggaaatcaagagaggcggaggcggaagtggaggcggaggatctggcggcggaggctctcaagttcagctgcaagagtctggccctggcctggtcaagcctagccagacactgagcatcacatgcaccgtgtccggctttagcctggcctcctacaacatccactgggtccgacagcctccaggcaaaggactggaatggctgggagtgatttgggctggcggcagcaccaactacaacagcgcactgatgagccggctgaccatcagcaaggacaacagcaagaaccaggtgttcctgaagatgagcagcctgacagccgccgataccgccgtgtactactgtgccaagagaagcgacgactacagttggttcgcctactggggccagggcacactggttacagtcagctct

SEQ ID NO: 32143 - DNA, 729 bp, synthetic construct
  source 1..729: mol_type = other DNA
gagaacgtgctgacacagagccctgccatcatgagtgcctctccaggcgagaaagtgaccatgacctgtagagccagcagcagcgtgtccagcagctacctgcactggtatcagcagaagtccggcgcaagccccaaagtgtggatctacagcaccagcaatctggcctctggcgtgccaggcagattttctggctctggcagcggcacaagctacagcctgacaatcagctccgtggaagccgaagatgccgccacctactactgccagcagtacagcggctaccccatcacatttggagccggcaccaaggtggaagtgaagagaggcggaggcggaagtggaggcggaggatctggcggcggaggctctcaggttcagctcaaagaatctggccccgtgctggtggccccaagccagacactgtctatcacctgtaccgtgtccggcttcagcctggcctcctacaacatccactgggtccgacagcctccaggcaaaggactggaatggctgggagtgatttgggctggcggcagcaccaactacaacagcgcactgatgagccggctgagcatcagcaaggacaacagcaagagccaggtgttcctccagatgaactccctccagaccgacgacaccgccatgtactactgcgccaagagaagcgacgactacagttggttcgcctactggggccagggcacactggttactgtgtctgcttct

SEQ ID NO: 32144 - DNA, 738 bp, synthetic construct
  source 1..738: mol_type = other DNA
gacatcgtgatgacacagagccctgatagcctggccgtgtctctgggagagagagccaccatcaactgcaagagcagccagagcctgctgaacagcggcaaccagaagaactacctggcctggtatcagcagaagcccggccagcctcctaagctgctgatctactggggcagcaccagatccacaggcgtgcccgatagattttctggctctggcagcggcaccgacttcaccctgacaatttctagcctgcaagccgaggacgtggccgtgtactactgccagaacgactacacataccccttcaccttcggccagggcaccaagctggaaatcaaaggcggaggcggaagtggaggcggaggatctggcggcggaggctctcaagttcagctggttcagagcggagccgaagtgaagaaacctggggcctctgtgaaggtgtcctgcaaggcttccggctataccttcaccagcttttggctgaactgggtccgacaggcccctggacaaggactggaatggatgggcaacatctaccccagcaccagctacaccgtgtacaaccagaaattcaaggaccgcgtgaccatgaccagggacaccagcacaagcacagtgtacatggaactgagcagcctgcggagcgaggataccgccgtgtattattgcgccagaacctggcggggcaacagcttcgattattggggccagggaaccaccgtgaccgtgtcatct

SEQ ID NO: 32145 - DNA, 738 bp, synthetic construct
  source 1..738: mol_type = other DNA
gacatcgtgatgacacagagccctgatagcctggccgtgtctctgggagagagagccaccatcaactgcaagagcagccagagcctgctgaacagcggcaacaacaagaactacgtgacatggtatcagcagaagcccggccagcctcctaagctgctgatctactggggcagcaccagatccacaggcgtgcccgatagattttctggctctggcagcggcaccgacttcaccctgacaatttctagcctgcaagccgaggacgtggccgtgtactactgccagaacgactacacataccccttcaccttcggccagggcaccaagctggaaatcaaaggcggaggcggaagtggaggcggaggatctggcggcggaggctctcaagttcagctggttcagagcggagccgaagtgaagaaacctggggcctctgtgaaggtgtcctgcaaggcttccggctataccttcaccagcttttggctgaactgggtccgacaggcccctggacaaggactggaatggatgggcaacatctaccccagcgacagctacaccgtgtacaaccagaaattcaaggaccgcgtgaccatgaccagggacaccagcacaagcacagtgtacatggaactgagcagcctgcggagcgaggataccgccgtgtattattgcgccagaacctggcggggcaacagcttcgattattggggccagggaaccaccgtgaccgtgtcatct

SEQ ID NO: 32146 - DNA, 717 bp, synthetic construct
  source 1..717: mol_type = other DNA
cagatcgtgctgacacagagccccgccatcatgtctgttagccctggcgagaaagtgaccatgacctgtagcgccagcagcagcgtgaactacatgcactggttccagcagaagcccggcacaagccctaagctgtgggtgtacagcaccagcaatctggcctctggcgtgccagccagattttctggctctggcagcggcaccagctacagcctgacaatcagcagcatggaagccgaggatgccgccacctactattgtcagcagcggagcatctacccaccttggacatttggcggaggcaccaagctggaaatcaaaggcggaggcggaagtggaggcggaggatctggcggcggaggctctgaagttcagctccagcagagcggccctgagcttgtgaaacctggcgcttccgtgaagatcagctgcaaggccagcggctacagcttcaccggctacaccatgaactgggtcaagcagtcccacggcaagaacctggaatggatcggcctgattaacccctacaacggcggcacctcctacaaccagaagttcaaggccaaggccacactgaccgtggacaagagcagcagcacagcctacatgcagctgaagtccctgaccagcgaggacagcgccgtgtactactgcgccagagattacggctacgtgctggactattggggccagggcacaagcgtgacagtgtctagt

SEQ ID NO: 32147 - DNA, 717 bp, synthetic construct
  source 1..717: mol_type = other DNA
cagatcgtgctgacacagagccctgccatcatgtccgcttctcccggcgagaaagtgaccatcacatgtagcgccagcagcagcgtgtcctacctgcactggtttcagcagaagcccggcacaagccctaagctgtgggtgtacagcaccagcaatctgcctagcggagtgcctgccagatttggcggatctggcagcggcacatcttacagcctgaccatcagccggatggaagccgaagatgccgccacctactattgccagcagcggagcatctacccaccttggacatttggaggcggcaccaagctggaaatcaaaggcggaggcggaagtggaggcggaggatctggcggcggaggctctgaagttcagctccagcagtctggccccgagcttgtgaaacctggcgcttccatgaagatcagctgcaaggccagcggctacagcttcaccggctacaccatgaactgggtcaagcagagccacggcaagaacctggaatggatcggcctgattaacccctacaacggcggcacctcctacaaccagaagttcaagggcaaagccacactgaccatcgacaagagcagcagcaccgcctacatggaactgctgagcctgacctctgaggacagcgccgtgtactactgcgccagagattacggctacgtgctggactattggggccagggcacaaccctgacagtgtctagt

SEQ ID NO: 32148 - DNA, 717 bp, synthetic construct
  source 1..717: mol_type = other DNA
cagatcgtgctgacacagagccctgccatcatgtccgcttctcccggcgagaaagtgaccatcacatgtagcgccagcagcagcgtgaattacctgcactggtttcagcagaagcccggcacaagccctaagctgtgggtgtacagcaccagcaatctgcctagcggagtgcctgccagatttggcggatctggcagcggcacatcttacagcctgaccatcagccggatggaagccgaagatgccgccacctactattgccagcagcggagcatctacccaccttggacatttggaggcggcaccaagctggaaatcaaaggcggaggcggaagtggaggcggaggatctggcggcggaggctctgaagttcagctccagcagtctggccccgagcttgtgaaacctggcgcttccatgaagatcagctgcaaggccagcggctacagcttcaccggctacaccatgaactgggtcaagcagagccacggcaagaacctggaatggatcggcctgattaacccctacaacggcggcacctcctacaaccagaagttcaagggcaaagccacactgaccatcgacaagagcagcagcaccgcctacatggaactgctgagcctgacctctgaggacagcgccgtgtactactgcgccagagattacggctacgtgctggactattggggccagggcacaaccctgacagtgtctagt

SEQ ID NO: 32149 - DNA, 750 bp, synthetic construct
  source 1..750: mol_type = other DNA
gagatcgtgctgacacagtctcccgccacactgtcactgtctccaggcgaaagagccacactgagctgtagcgtgtccagcagcatcagcagcagcaacctgcactggtatcagcagaagcctggacaggcccctcggctgctgatctacgccacatctaatctggcctctggcatccccgccagattttctggctctggaagcggcaccgacttcaccctgaccataagcagcctggaacctgaggacttcgccgtgtactactgccagcagtggtccagctatccccacacatttggcggaggcaccaaggtggaaatcaagagaggcggaggcggaagtggaggcggaggatctggcggcggaggctctcaggttcagctggttcagagcggagccgaagtgaagaaacctggggcctctgtgaaggtgtcctgcaaggcttccggctacacctttaccaactacctgatcgagtgggtccgacaggctccaggacaaggactggaatggatgggcctgattaaccctggcagcggcggcaccaactacaacgagaagttcaagggcagagtgaccatgaccaccgacaccagcacaagcaccgcctacatggaactgcggagcctgagaagcgacgacaccgccgtgtattattgcgccagaagaagccctctcggctcttggatctactacgcctatgacggcgtggcctattggggccagggaacactggttacagtgtcctct

SEQ ID NO: 32150 - DNA, 732 bp, synthetic construct
  source 1..732: mol_type = other DNA
gacatccagatgacacagagccctagcagcctgtctgccagcgtgggagacagagtgaccatcacatgcaaggccagcgaccacatcaacaactggctggcctggtatcagcagaagcctggacaggcccctaagctgctgatctacggcgctaccacactggaaacaggcgtgcccagcagattttctggcagcggctctggcaccgactacaccctgacaatatccagcctccagcctgaggacttcgccacctactactgtcagcagagctggaacaccccttggacattcggccagggcaccaagctggaaatcaagagaggcggaggcggaagtggaggcggaggatctggcggcggaggctctcaagttcagcttcaacagcctggcgctgagctggtcaaacctggcgcttctgtgaagatgagctgcaaagccagcggctacaccttcagcagctactggatcaactggatgaagcagaaacccggccagggactcgaatggatcggccaaatctatcccggcgacggcgacaccaactacaacggcaagttcaagggcagagccacactgaccgccgatacctctagcagcacagcctacatgcagctgagcagcctgaccagcgaagatagcgccgtgtacttctgtgcccggtccatcacaacagtcgtgggctgcgctatggactattggggccagggaacaagcgtgaccgtgtctagt

SEQ ID NO: 32151 - DNA, 732 bp, synthetic construct
  source 1..732: mol_type = other DNA
gacatccagatgacacagagccctagcagcctgtctgccagcgtgggagacagagtgaccatcacatgcaaggccagcgaccacatcaacaactggctggcctggtatcagcagaagcctggacaggcccctaagctgctgatctacggcgctaccacactggaaacaggcgtgcccagcagattttctggcagcggctctggcaccgactacaccctgacaatatccagcctccagcctgaggacttcgccacctactactgtcagcagagctggaacaccccttggacattcggccagggcaccaagctggaaatcaagagaggcggaggcggaagtggaggcggaggatctggcggcggaggctctcaagttcagcttcaacagcctggcgctgagctggtcaaacctggcgcttctgtgaagatgagctgcaaagccagcggctacgccttcagcagctcttggatcaactggatgaagcagaaacccggccagggactcgaatggatcggccaaatctatcccggcgacggcgacaccaactacaacggcaagttcaagggcagagccacactgaccgccgatacctctagcagcacagcctacatgcagctgagcagcctgaccagcgaagatagcgccgtgtacttctgtgcccggtccatcacaacagtcgtgggctgcgctatggactattggggccagggaacaagcgtgaccgtgtctagt

SEQ ID NO: 32152 - DNA, 732 bp, synthetic construct
  source 1..732: mol_type = other DNA
gacatccagatgacacagagccctagcagcctgtctgccagcgtgggagacagagtgaccatcacatgcaaggccagcgaccacatcaacaactggctggcctggtatcagcagaagcctggcaaggcccctaagctgctgatctacggcgctaccacactggaaacaggcgtgcccagcagattttctggcagcggctctggcaccgacttcaccctgacaatatccagcctccagcctgaggacttcgccacctactactgtcagcagagctggaacaccccttggacattcggccagggcaccaaggtggaaatcaagagaggtggcggaggatctggcggaggtggaagcggcggaggcggatctgaagttcagctggttgaatctggcggcggactggttcaacctggcggatctctgagactgagctgtgccgcctctggctacacctttagcagctactgggtcaactgggttcgacaggcccctggcaaaggactggaatgggtcgcccaaatctatcccggcgacggcgacaccaactacaacggcaagttcaagggcagattcaccatcagccgggacaacagcaagaacaccctgtacctccagatgaactccctgagagccgaggacaccgccgtgtactattgtgccagatccatcaccaccgtcgtgggctgcgctatggattattggggccagggaaccctggtcaccgtgtcctct

SEQ ID NO: 32153 - DNA, 732 bp, synthetic construct; identical to SEQ ID NO: 32152
  source 1..732: mol_type = other DNA

SEQ ID NO: 32154 - DNA, 732 bp, synthetic construct
  source 1..732: mol_type = other DNA
gacatccagttgacccagtcccccagctcactcagcgccagtgtgggggaccgggtgaccattacctgtaaagccagtcagagtgtggactatgacggggatagcttcctgaattggtatcagcagaagcctggcaaagccccaaagctgctgatctacgctgcatctaatctggagtcaggcgtgccttccaggttctccggtagtgggtctgggaccgatttcacattgaccatttcatccctccaacccgaggatttcgctacatattactgtcagcagtccaatgaggaccctctcacctttggccagggcaccaaagttgaaattaagagaggcggaggcggaagtggaggcggaggatctggcggcggaggctctgaagtccaacttgtggagtctggagggggcctggtgcagcccggcggctctctcagactgtcttgtgcggcaagcggctacaccttcagctcttactggatagaatgggtgaggcaggcacctggaaagggactggagtggattggagagattctgccaggagggggagatacaaattacaatgaaatcttcaaggggcgggccaccttttcagcggataccagcaagaatacagcttacctgcagatgaatagcctccgggcagaagataccgctgtttattattgcacgagacgggtgccaataagactggactattgggggcaagggactcttgtcaccgtcagttca

SEQ ID NO: 32155 - DNA, 732 bp, synthetic construct
  source 1..732: mol_type = other DNA
gacatccagttgacccagtcccccagctcactcagcgccagtgtgggggaccgggtgaccattacctgtaaagccagtcagagtgtggactatgacggggatagcttcctgaattggtatcagcagaagcctggcaaagccccaaagctgctgatctacgctgcatctaatctggagtcaggcgtgccttccaggttctccggtagtgggtctgggaccgatttcacattgaccatttcatccctccaacccgaggatttcgctacatattactgtcagcagtccaatgaggaccctctcacctttggccagggcaccaaagttgaaattaagagaggcggaggcggaagtggaggcggaggatctggcggcggaggctctgaagtccaacttgtggagtctggagggggcctggtgcagcccggcggctctctcagactgtcttgtgcggcaagcggctacaccttcacctcttactggatagaatgggtgaggcaggcacctggaaagggactggagtggattggagagattctgccaggagggggagatacaaattacaatgaaatcttcaaggggcgggccaccttttcagcggataccagcaagaatacagcttacctgcagatgaatagcctccgggcagaagataccgctgtttattattgcacgagacgggtgccaataagactggactattgggggcaagggactcttgtcaccgtcagttca

SEQ ID NO: 32156 - DNA, 732 bp, synthetic construct
  source 1..732: mol_type = other DNA
gacatccagttgacccagtcccccagctcactcagcgccagtgtgggggaccgggtgaccattacctgtaaagccagtcagagtgtggactatgagggggatagcttcctgaattggtatcagcagaagcctggcaaagccccaaagctgctgatctacgctgcatctaatctggagtcaggcgtgccttctaggttctccggtagtgggtctgggaccgatttcacattgaccatttcatccctccaacccgaggatttcgctacatattactgtcagcagtccaatgaggaccctctcacctttggccagggcaccaaagttgaaattaagagaggcggaggcggaagtggaggcggaggatctggcggcggaggctctgaagtccaacttgtggagtctggagggggcctggtgcagcccggcggctctctcagactgtcttgtgcggcaagcggctacaccttcacctcttactggatagaatgggtgaggcaggcacctggaaagggactggagtggattggagagattctgccaggagggggagatacaaattacaatgaaatcttcaaggggcgggccaccttttcagcggataccagcaagaatacagcttacctgcagatgaatagcctccgggcagaagataccgctgtttattattgcacgagacgggtgccaataagactggactattgggggcaagggactcttgtcaccgtcagttca

SEQ ID NO: 32157 - DNA, 732 bp, synthetic construct
  source 1..732: mol_type = other DNA
gacatccagttgacccagtcccccagctcactcagcgccagtgtgggggaccgggtgaccattacctgtaaagccagtcagagtgtggactatgagggggatagcttcctgaattggtatcagcagaagcctggcaaagccccaaagctgctgatctacgctgcatctaatctggagtcaggcgtgccttctaggttctccggtagtgggtctgggaccgatttcacattgaccatttcatccctccaacccgaggatttcgctacatattactgtcagcagtccaatgaggaccctctcacctttggccagggcaccaaagttgaaattaagagaggcggaggcggaagtggaggcggaggatctggcggcggaggctctcaggttcagctgcaacagcctggcgctgagcttgtgaaacctggcgcttccgtgaagatgagctgcaaggccagcggctacaccttcaccagctactggatcaactggatgaagcagaaaccaggccagggcctcgaatggatcggacagattcttcctggcggcggagacaccaactacaacggcaagttcaagggcagagccacactgaccgccgatacctctagcagcacagcctacatgcagctgagcagcctgaccagcgaagatagcgccgtgtacttctgcaccagacgggtgcccatcagactggattattggggccagggaaccagcgtgaccgtgtcatct

SEQ ID NO: 32158 - DNA, 729 bp, synthetic construct
  source 1..729: mol_type = other DNA
gacatcgtgatgacacagagccctgatagcctggccgtgtctctgggagagagagccaccattaactgcaaggccagccagagcgtggactacgagggcgacagcttcctgaactggtatcagcagaagcccggccagcctcctaagctgctgatctacgccgccagcaatctggaaagcggcgtgccaagcagattttccggctctggcagcggcaccgatttcaccctgacaatatccagcctccagcctgaggacgtggccgtgtactactgccagcagagcaatgaggaccctctgacctttggccagggcaccaaggtggaaatcaagggcggaggcggaagtggaggcggaggatctggcggcggaggctctgaagtccaacttgtggagtctggagggggcctggtgcagcccggcggctctctcagactgtcttgtgcggcaagcggctacaccttcacctcttactggatagaatgggtgaggcaggcacctggaaagggactggagtggattggagagattctgccaggagggggagatacaaattacaatgaaatcttcaaggggcgggccaccttttcagcggataccagcaagaatacagcttacctgcagatgaatagcctccgggcagaagataccgctgtttattattgcacgagacgggtgccaataagactggactattgggggcaagggactcttgtcaccgtcagttca

SEQ ID NO: 32159 - DNA, 729 bp, synthetic construct
  source 1..729: mol_type = other DNA
gacatcgtgatgacacagagccctgatagcctggccgtgtctctgggagagagagccaccattaactgcaaggccagccagagcgtggactacgagggcgacagcttcctgaactggtatcagcagaagcccggccagcctcctaagctgctgatctatgccgccagaaagctcggcagaggcgtgccaagcagattttctggcagcggctctggcaccgacttcaccctgacaatatccagcctccagcctgaggacgtggccgtgtactactgccagcagagcaatgaggaccctctgacattcggccagggcaccaaggtggaaatcaagggcggaggcggaagtggaggcggaggatctggcggcggaggctctgaagtccaacttgtggagtctggagggggcctggtgcagcccggcggctctctcagactgtcttgtgcggcaagcggctacaccttcacctcttactggatagaatgggtgaggcaggcacctggaaagggactggagtggattggagagattctgccaggagggggagatacaaattacaatgaaatcttcaaggggcgggccaccttttcagcggataccagcaagaatacagcttacctgcagatgaatagcctccgggcagaagataccgctgtttattattgcacgagacgggtgccaataagactggactattgggggcaagggactcttgtcaccgtcagttca

SEQ ID NO: 32160 - DNA, 741 bp, synthetic construct
  source 1..741: mol_type = other DNA
gacatcgtgatgacacagagccctgatagcctggccgtgtctctgggagagagagccaccattaactgcaaggccagccagagcgtggactacgacggcgacagcttcctgaactggtatcagcagaagcccggccagcctcctaagctgctgatctacgccgccagcaatctggaaagcggcgtgccaagcagattttccggctctggcagcggcaccgatttcaccctgacaatatccagcctccagcctgaggacgtggccgtgtactactgccagcagagcaacgacgaccctctgacctttggacagggcaccaaggtggaaatcaaactcgagggcggaggcggaagtggaggcggaggatctggcggcggaggctctttcgaacaagttcagctggttcagagcggagccgaagtgaagaaacctggggcctctgtgaaggtgtcctgcaaagccagcggctacacctttaccagctactggatcaactgggtccgacaggcccctggacaaggactggaatggatgggacagatccttccaggcggaggggacaccaactacaacggcaagttcaagggcagagtgaccatcaccgccgacaccagcacaagcaccgcctacatggaactgagcagcctgagaagcgaggacaccgccgtgtattattgcaccagacgggtgcccatccggctggattattggggacagggaaccctggtcaccgtgtctagt

SEQ ID NO: 32161 - DNA, 720 bp, synthetic construct
  source 1..720: mol_type = other DNA
gacatccagatgacacagagccctagcagcctgtctgccagcgtgggagacagagtgaccatcacatgcaagagcagccagagcctgctggactccgatggcaagacctacctgaactggtatcagcagaagcccggcaaggcccctaagctgctgatctacctggtgtccaagctggatagcggcgtgcccagcagattttctggcagcggcagcggaaccgacttcaccctgacaatatccagcctccagcctgaggacttcgccacctactactgcttccaaggcacccactttccattcaccttcggccagggcaccaaggtggaaatcaaaagaggcggcggaggaagcggaggcggatctggtggcggaggatctgaagtgcagctggttgaatcaggcggaggactggttcagcctggcggatctctgagactgtcttgtgccgccagcggctacaccttcaccagctactggatgaactgggtccgacaggcccctggcaaaggactggaatgggtcggaatgatcgaccccagcgacagcgagacacactacaaccacatcttcaaggaccgcttcaccatcagcgccgacaccagcaagaataccgcctacctccagatgaactccctgagagccgaggacaccgccgtgtactactgcgccagaaacctgtatctgttcggccagggaaccctggtcacagtgtcatct

SEQ ID NO: 32162 - DNA, 744 bp, synthetic construct
  source 1..744: mol_type = other DNA
gacatccagatgacacagagccctagcagcctgtctgccagcgtgggagacagagtgaccatcacatgcaagagcagccagagcctgctggactccgatggcaagacctacctgaactggtatcagcagaagcccggcaaggcccctaagctgctgatctacctggtgtccaagctggatagcggcgtgcccagcagattttctggcagcggcagcggaaccgacttcaccctgacaatatccagcctccagcctgaggacttcgccacctactactgcttccaaggcacccactttccattcaccttcggccagggcaccaaggtggaaatcaaaagaggcggcggaggaagcggaggcggatctggtggcggaggatctgaagtgcagctggttgaatcaggcggaggactggttcagcctggcggatctctgagactgtcttgtgccgccagcggctacaccttcagcagctactggatgaactgggtccgacaggcccctggcaaaggactggaatgggtcggaatgatcgaccccagcgacagcgagacacactacaaccacatcttcaaggaccgcttcaccatcagcgccgacaccagcaagaataccgcctacctccagatgaactccctgagagccgaggacaccgccgtgtactactgcgccagaaacctgtatctgtggggccagggaaccctggtcacagtgtcatctacgcgtcctcgactgtgccttcta

SEQ ID NO: 32163 - DNA, 720 bp, synthetic construct
  source 1..720: mol_type = other DNA
gacatccagatgacacagagccctagcagcctgtctgccagcgtgggagacagagtgaccatcacatgcaagagcagccagagcctgctggactccgatggcaagacctacctgaactggtatcagcagaagcccggcaaggcccctaagctgctgatctacctggtgtccaagctggatagcggcgtgcccagcagattttctggcagcggcagcggaaccgacttcaccctgacaatatccagcctccagcctgaggacttcgccacctactactgctggcaaggcacccactttccattcaccttcggccagggcaccaaggtggaaatcaaaagaggcggcggaggaagcggaggcggatctggtggcggaggatctgaagtgcagctggttgaatcaggcggaggactggttcagcctggcggatctctgagactgtcttgtgccgccagcggctacaccttcaccagctactggatgaactgggtccgacaggcccctggcaaaggactggaatgggtcggaatgatcgaccccagcgacagcgagacacactacaaccacatcttcaaggaccgcttcaccatcagcgccgacaccagcaagaataccgcctacctccagatgaactccctgagagccgaggacaccgccgtgtactactgcgccagaaacctgtatctgttcggccagggaaccctggtcacagtgtcatct

SEQ ID NO: 32164 - DNA, 720 bp, synthetic construct
  source 1..720: mol_type = other DNA
gacatccagatgacacagagccctagcagcctgtctgccagcgtgggagacagagtgaccatcacatgcaagagcagccagagcctgctggactccgatggcaagacctacctgaactggtatcagcagaagcccggcaaggcccctaagctgctgatctacctggtgtccaagctggatagcggcgtgcccagcagattttctggcagcggcagcggaaccgacttcaccctgacaatatccagcctccagcctgaggacttcgccacctactactgctggcaaggcacccactttccattcaccttcggccagggcaccaaggtggaaatcaaaagaggcggcggaggaagcggaggcggatctggtggcggaggatctgaagtgcagctggttgaatcaggcggaggactggttcagcctggcggatctctgagactgtcttgtgccgccagcggctacaccttcagcagctactggatgaactgggtccgacaggcccctggcaaaggactggaatgggtcggaatgatcgaccccagcgacagcgagacacactacaaccacatcttcaaggaccgcttcaccatcagcgccgacaccagcaagaataccgcctacctccagatgaactccctgagagccgaggacaccgccgtgtactactgcgccagaaacctgtatctgtggggccagggaaccctggtcacagtgtcatct

SEQ ID NO: 32165 - DNA, 720 bp, synthetic construct
  source 1..720: mol_type = other DNA
gacatccagatgacacagagccctagcagcctgtctgccagcgtgggagacagagtgaccatcacatgcaagagcagccagagcctgctggactccgatggcaagacctacctgaactggtatcagcagaagcccggcaaggcccctaagctgctgatctacctggtgtccaagctggatagcggcgtgcccagcagattttctggcagcggcagcggaaccgacttcaccctgacaatatccagcctccagcctgaggacttcgccacctactactgcttccaaggcacccactttccatacaccttcggccagggcaccaaggtggaaatcaaaagaggcggcggaggaagcggaggcggatctggtggcggaggatctgaagtgcagctggttgaatcaggcggaggactggttcagcctggcggatctctgagactgtcttgtgccgccagcggctacaccttcaccagctactggatgaactgggtccgacaggcccctggcaaaggactggaatgggtcggaatgatcgaccccagcgacagcgagacacactacaaccacatcttcaaggaccgcttcaccatcagcgccgacaccagcaagaataccgcctacctccagatgaactccctgagagccgaggacaccgccgtgtactactgcgccagaaacctgtatctgttcggccagggaaccctggtcacagtgtcatct

SEQ ID NO: 32166 - DNA, 744 bp, synthetic construct
  source 1..744: mol_type = other DNA
gacatccagatgacacagagccctagcagcctgtctgccagcgtgggagacagagtgaccatcacatgcaagagcagccagagcctgctggactccgatggcaagacctacctgaactggtatcagcagaagcccggcaaggcccctaagctgctgatctacctggtgtccaagctggatagcggcgtgcccagcagattttctggcagcggcagcggaaccgacttcaccctgacaatatccagcctccagcctgaggacttcgccacctactactgcttccaaggcacccactttccatacaccttcggccagggcaccaaggtggaaatcaaaagaggcggcggaggaagcggaggcggatctggtggcggaggatctgaagtgcagctggttgaatcaggcggaggactggttcagcctggcggatctctgagactgtcttgtgccgccagcggctacaccttcaccaactactggatgaactgggtccgacaggcccctggcaaaggactggaatgggtcggaatgatcgaccccagcgacagcgagacacactacaaccacatcttcaaggaccgcttcaccatcagcgccgacaccagcaagaataccgcctacctccagatgaactccctgagagccgaggacaccgccgtgtactactgcgccagaaacctgtatctgtggggccagggaaccctggtcacagtgtcatctacgcgtcctcgactgtgccttcta

SEQ ID NO: 32167 - DNA, 720 bp, synthetic construct
  source 1..720: mol_type = other DNA
gacatccagatgacacagagccctagcagcctgtctgccagcgtgggagacagagtgaccatcacatgcaagagcagccagagcctgctggactccgatggcaagacctacctgaactggtatcagcagaagcccggcaaggcccctaagctgctgatctacctggtgtccaagctggatagcggcgtgcccagcagattttctggcagcggcagcggaaccgacttcaccctgacaatatccagcctccagcctgaggacttcgccacctactactgcttccaaggcacccactttccattcaccttcggccagggcaccaaggtggaaatcaaaagaggcggcggaggaagcggaggcggatctggtggcggaggatctgaagtgcagctggttgaatcaggcggaggactggttcagcctggcggatctctgagactgtcttgtgccgccagcggctacaccttcaccaactactggatgaactgggtccgacaggcccctggcaaaggactggaatgggtcggaatgatcgaccccagcgacagcgagacacactacaaccacatcttcaaggaccgcttcaccatcagcgccgacaccagcaagaataccgcctacctccagatgaactccctgagagccgaggacaccgccgtgtactactgcgccagaaacctgtatctgtggggccagggaaccctggtcacagtgtcatct

SEQ ID NO: 32168 - DNA, 750 bp, synthetic construct
  source 1..750: mol_type = other DNA
gacatcgtgctgacacagagccctgcttctctggccgtgtctctgggacagagagccaccatcagctgcaaggcttctcagagcgtggactacgacggcgacagcttcctgaactggtatcagaagccaggccagcctcctaagctgttcatctacgccgccagcaacctggaaagcggcatccctgccagattttctggcagcggctctggcaccgacttcaccctgaatatccatcctgtggaagaagaggacgccgccacctactactgccagcagtctaatgaggaccctctgacctttggagccggcaccgagctggaactgaaaagaggcggcggaggaagcggaggcggatctggtggcggaggatctgaagttcagcttcagcagagcggagccgagctgatgaagcctggcgcttctgtgaagatttcctgcaaggccaccggctacaccttcagcagctactggatcgagtgggtcaagcagaggcccggacatggcctggaatggatcggagaaattctgcctggcggcggagacaccaactacaacgagattttcaagggcaaagccaccttcaccgccgacaccagcagcaacacagcctacatgcagctgagcagcctgaccagcgaagatagcgccgtgtactactgcaccagacgggtgcccgtgtacttcgattattggggccagggcaccagcgtgaccgtttcttctacgcgtcctcgactgtgccttcta

SEQ ID NO: 32169 - DNA, 714 bp, synthetic construct
  source 1..714: mol_type = other DNA
cagatcgtgctgacacagagccctgccatcatgtccgcttctcccggcgagaaagtgaccatgacatgtagcgccagcagcagcgtgtccttcatgcactggtatcagcagaagtccggcacaagccccaagcggtggatctacgataccagcacactggcctctggcgtgccagccagatttggcggatctggcagcggcacatcttacagcctgaccatcagcagcatggaagccgaagatgccgccacctactactgccagcagtggtccagcaatcccctgacatttggagccggcaccaagctggaactgaagagaggcggaggcggaagtggaggcggaggatctggcggcggaggctctcaagttcagctgcaacagagcggccctgagctggttaagcctggcgcttctgtgcggatctcttgcaaggccagcggctacaccttcaccagctactacatccactgggtcaagcagcggcctggacagggactcgaatggatcggctggatctaccccggcaacctgaacaccaagtacaacgagaagttcaagggcaaagccacactgaccgccgacaagagcagcagcacagcctacatgcagctgagcagcctgacaagcgaggacagcgccgtgtacttctgcgccagatacgactggtacttcgacgtgtggggagccggaaccaccgtgacagtttcttct

SEQ ID NO: 32170 - DNA, 729 bp, synthetic construct
  source 1..729: mol_type = other DNA
gacatcgtgatgacacagagccctctgagcctgcctgtgacacctggcgaacctgccagcatcagctgtagaagcagcaagagcctgctgcacagcaacggcatcacctacctgtactggtatctccagaagcctggacagagcccacagctgctgatctaccggatgagcaatagagccagcggcgtgcccgatagattttctggctctggcagcggcaccgacttcaccctgaagattagcagagtggaagccgaggacgtgggcgtgtaccattgtggacagctgctcgaaaacccctacaccttcggccagggcaccaagctggaaatcaaaggcggaggcggaagtggaggcggaggatctggcggcggaggctctcaagttcagctggttgaatccggtggcggagtggtgcaacctggcagaagtctgagactgagctgtgccgccagcggcttcagcttcagcaattatggcatggcctgggtccgacaggcccctggaaaaggacttgagtgggtcgccagcatctctaccggcggaggcaatacctactacgccgacagcgtgaaggacagattcaccatcagccgggacaacagcaagaacaccctgtacctccagatgaacagcctgagagccgaggataccgccgtgtactactgcaccagacacgatagaggcggcctgtattggggccagggaacaatggtcaccgtgtcctct

SEQ ID NO: 32171 - DNA, 729 bp, synthetic construct
  source 1..729: mol_type = other DNA
gagatcgtgctgacacagagccctggcacactgtcactgtctccaggcgaaagagccacactgagctgcaaagccagccagagcgtgtccatcagcggcatcaacctgatgaactggtatcagcagaagcccggccagcagccaagactgctgatctaccacgccagcatcctggcctctggcatccccgatagattttctggcagcggctccggcaccgacttcaccctgacaatcagcagactggaacccgaggacttcgccgtgtactactgccagcagaccagagagagccctctgacattcggccagggcacaagactggaaatcaaaggcggaggcggaagtggaggcggaggatctggcggcggaggctctgaactgcaactgcttgaatcaggtggcggcctggttcagcctggcggatctctgagactgagctgtgccgccagcggcttcaccttctctaagtacgctatggcctgggtccgacaggcccctggaaaaggacttgagtgggtcgcctctatcagcacaggcggcgtgaacacctactacgccgacagcgtgaaggacagattcaccatcagccgggacaacgccaagaacaccctgtacctccagatgaacagcctgagagccgaggacacagccgtgtattattgcgccacacacaccggcgactacttcgactattggggccagggaacaatggtcaccgtgtcctct

SEQ ID NO: 32172 - DNA, 732 bp, synthetic construct
  source 1..732: mol_type = other DNA
gacatcgtgatgacacagagccctctgagcctgcctgtgacacctggcgaacctgccagcatcagctgtagaagcagcaagagcctgctgcacagcaacggcatcacctacctgtactggtatctccagaagcctggacagagcccacagctgctgatctaccggatgagcaatagagccagcggcgtgcccgatagattttctggctctggcagcggcaccgacttcaccctgaagattagcagagtggaagccgaggacgtgggcgtgtaccattgtggacagctgctcgaaaacccctacaccttcggccagggcaccaagctggaaatcaaaggcggaggcggaagtggaggcggaggatctggcggcggaggctctgaactgcaactgcttgaatcaggtggcggcctggttcagcctggcggatctctgagactgagctgtgccgccagcggcttcaccttctctaagtacgctatggcctgggtccgacaggcccctggaaaaggacttgagtgggtcgcctctatcagcacaggcggcgtgaacacctactacgccgacagcgtgaaggacagattcaccatcagccgggacaacgccaagaacaccctgtacctccagatgaacagcctgagagccgaggacacagccgtgtattattgcgccacacacaccggcgactacttcgactattggggccagggaacaatggtcaccgtgtcctct

SEQ ID NO: 32173 - DNA, 348 bp, synthetic construct; identical to SEQ ID NO: 32107
  source 1..348: mol_type = other DNA

SEQ ID NO: 32174 - DNA, 741 bp, synthetic construct
  source 1..741: mol_type = other DNA
gagatcgtgctgacacagtctcccgccacactgtcactgtctccaggcgaaagagccacactgagctgtagagccagccagagcgtgtcctcttacctggcctggtatcagcagaagcctggacaggctccccggctgctgatctacgatgccagcaatagagccacaggcatccccgccagattttctggctctggcagcggcaccgatttcaccctgaccataagcagcctggaacctgaggacttcgccgtgtactactgccagcagagaagcaactggcctcctacattcggccagggcaccaaggtggaaatcaaaggcggaggcggaagtggaggcggaggatctggcggcggaggctctcaactccagctgcaagagtctggccccggactggtcaagcctagcgaaacactgagcctgacctgtaccgtgtctggcggcagcatcagcagcagctcttattggtggggctggaccagacagcctcctggcagaggactggaatggatcggcaccatgtactacagcggcaacatctactacaaccccagcctccagagccgggccaccatctctgtggacaccagcaagaaccagttcagcctgaagctgagcagcgtgacagccgccgataccgccgtgtattattgcgccagacatgtgggctacagctacggcagacggttctggtacttcgacctgtggggcagaggcaccctggtcacagtttcttct

SEQ ID NO: 32175 - DNA, 729 bp, synthetic construct
  source 1..729: mol_type = other DNA
gacatccagatgacacagagccctagcagcctgtctgccagcgtgggagacagagtgaccatcacctgtagagccagccaggacgtgcggaacatcgtcgtgtggttccagcagaagcctggcaaggcccctaagctgctgatctacagcggcagctacagatacagcggcgtgcccagcagattttccggctctggctctggcaccgacttcaccctgacaatatccagcctccagcctgaggacttcgccacctactactgccagcagcactacagccctccatacacattcggccagggcaccaaggtggaaatcaagagaggcggaggcggaagtggaggcggaggatctggcggcggaggctctgaagttcagctggtggaatctggccctggcctggtcaagcctagcgagacactgagcctgacctgtaccgtgtccggcttcagcctgaccagatttggcgtgcactgggtccgacagccacctggcaaaggactggaatggctgggagtgatttggagaggcggcagcaccgattacaacgccgccttcatgagccggctgaccatcagcaaggacaacagcaagaaccaggtgtccctgaagctgagcagcgtgacagccgctgataccgccgtgtactactgctccaaccactactacggcagctccgactacgccctggataattggggccagggaaccctggtcaccgtgtcatct

SEQ ID NO: 32176 - DNA, 735 bp, synthetic construct
  source 1..735: mol_type = other DNA
gacatcgtgctgacccagagccctctgagcctggccgtgtctctgggacagcctgccatcatcagctgtagggccagccagagcgtgtcctttgccggcacctctctgatgcactggtatcaccagaagcccggccagcagcccagactgctgatctacagagccagcaacctggaagccggcgtgcccgatagattttccggcagcggcagcaagaccgacttcaccctgaccatcagccccgtggaagccgaagatgccgccacctactactgccagcagagcagagagtacccctacaccttcggcggaggcaccaagctggaaatcaagaggggcggaggcggaagtggaggcggaggatctggcggcggaggctctcaggtccaactggtgcagagcggagccgaggtcgtgaagcctggcgcttccgtgaagattagctgcaaagccagcggctacacctttaccggctactttatgcactgggtcaagcagagccctggccagagcctggaatggatcggcagaatccacccctacgacggcgacaccttctacaaccagaagttccagggcaaggccaccctgacagtggacaagagcagcaacaccgcccacatggaactgctgagcctgaccagcgaggacttcgccgtgtactactgcaccagatacgacggcagccgggctatggactattggggccagggcaccaccgtgaccgtgtctagt

SEQ ID NO: 32177 - DNA, 735 bp, synthetic construct
  source 1..735: mol_type = other DNA
gacatccagatgacacagagccctagcagcctgtctgccagcgtgggagacagagtgaccatcacctgtagagccagccaggacgtgaacacagccgtggcttggtatcagcagaagcctggcaaggcccctaagctgctgatctacagcgcctacttcctgtacagcggcgtgcccagcagattcagcggaagcagaagcggcaccgacttcaccctgacaatatccagcctccagcctgaggacttcgccacctactactgccagcagtacagcagatacagccccgtgacctttggacagggcaccaaggtggaaatcaagagatctggcggaggcggctctggaggaggcggaagtggcggcggaggcgaagttcagctggttgaaagtggtggcggcctggttcaacctggcggatctctgagactgagctgtgccgccagcggcttcaatgtgtacgcctctggaatgcactgggtccgacaggcccctggcaaaggacttgagtgggtcgccaaaatctaccccgacagcgactacacctattacgccgacagcgtgaagggcagattcaccatcagcgccgacaccagcaagaacaccgcctacctccagatgaactccctgagagccgaggacaccgccgtgtactactgtagcagagacagcagcttctactacgtgtacgctatggactactggggccagggcacactggtcacagtctcttct

SEQ ID NO: 32178 - DNA, 735 bp, synthetic construct
  source 1..735: mol_type = other DNA
gacatccagatgacacagagccctagcagcctgtctgccagcgtgggagacagagtgaccatcacctgtagagccagccaggacatcaacacagccgtggcttggtatcagcagaagcctggcaaggcccctaagctgctgatctacagcgcctacttcctgtacagcggcgtgcccagcagattcagcggaagcagaagcggcaccgacttcaccctgacaatatccagcctccagcctgaggacttcgccacctactactgccagcagtacagcagatacagccccgtgacctttggacagggcaccaaggtggaaatcaagagatctggcggaggcggctctggaggaggcggaagtggcggcggaggcgaagttcagctggttgaaagtggtggcggcctggttcaacctggcggatctctgagactgagctgtgccgccagcggcttcaatgtgtacgcctctggaatgcactgggtccgacaggcccctggcaaaggacttgagtgggtcgccaaaatctaccccgacagcgactacacctattacgccgacagcgtgaagggcagattcaccatcagcgccgacaccagcaagaacaccgcctacctccagatgaactccctgagagccgaggacaccgccgtgtactactgtagcagagacagcagcttctactacgtgtacgctatggactactggggccagggcacactggtcacagtctcttct

SEQ ID NO: 32179 - DNA, 720 bp, synthetic construct; identical to SEQ ID NO: 397
  source 1..720: mol_type = other DNA

SEQ ID NO: 32180 - DNA, 717 bp, synthetic construct
  source 1..717: mol_type = other DNA
gacatccagatgacacagagccctagcagcctgtctgccagcgtgggagacagagtgaccatcacatgcaaggccagcgacctgatccacaactggctggcctggtatcagcagaagcctggcaaggcccctaagctgctgatctacggcgctacctctctggaaacaggcgtgcccagcagattttctggcagcggctctggcaccgacttcaccctgacaatatccagcctccagcctgaggacttcgccacctactactgccagcagtactggaccacacctttcaccttcggccagggcaccaaggtggaaatcaaaagaggcggaggcggaagtggaggcggaggatctggcggcggaggctctgaagtgcagctggttgaatcaggtggcggcctggttcaacctggcggatctctgagactgagctgtgccgccagcggctacagcatcaccaatgactacgcctggaactgggtccgacaggcccctggaaaaggactggaatgggtcggatatatcagctactccggctacaccacctacaatcccagcatcaagagccggttcaccatcagcagagacaccagcaagaacaccctgtacctccagatgaactccctgagagccgaggacaccgccgtgtactattgtgccagatggaccagcggcctggactattggggacagggaacactggtcaccgtgtcctct

SEQ ID NO: 32181 - DNA, 726 bp, synthetic construct
  source 1..726: mol_type = other DNA
gagatcgtgctgacacagtctcccgccacactgtcactgtctccaggcgaaagagccacactgagctgtagagccagccagagcgtgtcctcttacctggcctggtatcagcagaagcctggacaggctccccggctgctgatctacgatgccagcaatagagccacaggcatccccgccagattttctggctctggcagcggcaccgatttcaccctgaccataagcagcctggaacctgaggacttcgccgtgtactactgccagcagagaagcaactggcccctgacctttggacagggcaccaaggtggaaatcaaaggcggaggcggatctggcggcggaggtagcggtggcggaggatctcaagttcagctggttcagagcggagccgaagtgaagaaacctggcagcagcgtgaaggtgtcctgcaaagcaagcggcggcacctttagcacctacgccatccactgggttcgacaggcaccaggacaaggactggaatggatgggcagaatcatccccatcgagggcagagcctactacgcccagaaattccagggcagagtgaccatcaccgccgacgagtctacaagcaccgcctacatggaactgagcagcctgagaagcgaggataccgctgtgtactattgcgccagaggccggtacagctacagatattggttcgactactggggccagggcaccctggttacagtctcttct

SEQ ID NO: 32182 - DNA, 726 bp, synthetic construct
  source 1..726: mol_type = other DNA
gagatcgtgctgacacagtctcccgccacactgtcactgtctccaggcgaaagagccacactgagctgtagagccagccagagcgtgtcctcttacctggcctggtatcagcagaagcctggacaggctccccggctgctgatctacgatgccagcaatagagccacaggcatccccgccagattttctggctctggcagcggcaccgatttcaccctgaccataagcagcctggaacctgaggacttcgccgtgtactactgccagcagagaagcgactggcccctgacatttggcggcggaacaaaggtggaaatcaaaggcggaggcggatctggcggcggaggtagcggtggcggaggatctcaagttcagctggttcagagcggagccgaagtgaagaaacctggcagcagcgtgaaggtgtcctgcaaagcaagcggcggcacctttagctcctacgccatccactgggttcgacaggcaccaggacaaggactggaatggatgggcagaatcatccccatcgagggcagagcctactacgcccagaaattccagggcagagtgaccatcaccgccgacgagtctacaagcaccgcctacatggaactgagcagcctgagaagcgaggataccgctgtgtactattgcgccagaggccggtacagctacagatattggttcgactactggggccagggcaccctggttacagtctcttct

SEQ ID NO: 32183 - DNA, 723 bp, synthetic construct; identical to SEQ ID NO: 396
  source 1..723: mol_type = other DNA

SEQ ID NO: 32184 - DNA, 732 bp, synthetic construct
  source 1..732: mol_type = other DNA
gacatccagatgacacagagccctagcagcctgtctgccagcgtgggagacagagtgaccatcacctgtagagccagccagagcatcagcagctacctgaactggtatcagcagaagcccggcaaggcccctaaactgctgatctatgccgccagctctctccagagcggagtgcctagcagattttctggcagcggctccggcaccgatttcaccctgacaatatccagcctccagcctgaggacttcgccacctactactgccagcagagctacagcacccctctgacctttggacagggcaccaaggtggaaatcaagggaggcggaggaagtggcggcggaggatctggcggtggtggttctgaggtgcagctggttgaatctggcggaggactggttcagcctggcggatctctgagactgtcttgtgctgccagcggcttcaccttcagctcctacgccatgagctgggtccgacaggctcctggcaaaggactggaatgggtgtccgccatctctggctcaggcggcagcacatattacgccgactctgtgaagggcagattcaccatcagccgggacaacagcaagaacaccctgtacctccagatgaactccctgagagccgaggacaccgccgtgtactattgtgccagactgggctaccccaccaccacactgctgccctttgattattggggccagggcaccctggtcaccgtttcttct

SEQ ID NO: 32185 - DNA, 747 bp, synthetic construct
  source 1..747: mol_type = other DNA
gacatccagatgacacagagccctagcagcctgtctgccagcgtgggagacagagtgaccattacctgtcaggccagcgagaatatctacagcttcctggcctggtatcagcagaagcctggcaaggcccctaagctgctgatctacagcgcctctaaactggccgctggcgtgccaagcagattttctggctctggcagcggcaccgacttcaccctgacaatatctagcctccagcctgaggacttcgccacctactactgccagcagaccaacagatacagcaaccccgacatctacaacgtgttcggccagggcaccaagctgacagttcttggcggaggcggaggatctggtggcggaggaagcggtggcggcggttctgaagttcagctggttgaatctggcggcggactggttcaacctggcggatctctgagactgagctgtgccgcctctggcatcgacttcaacagcaactactacatgtgctgggtccgacaggccccaggcaaaggactggaatggatcggctgtatctacgtgggcagccacgtgaacacctattacgccaactgggccaagggcagattcaccatcagccgggacaacagcaagaacaccgtgtacctccagatgaactccctgagagccgaggacaccgccgtgtactactgtgccacatctggcagcagcgtgctgtacttcaagttctggggccagggaaccctggtcaccgtttcttct

SEQ ID NO: 32186 - DNA, 741 bp, synthetic construct
  source 1..741: mol_type = other DNA
caagttcagctggttcagtctggccccgaagtgaagaaacctggggcctctgtgaaggtgtcctgcaaggcttccggctacacctttaccagctaccacatccagtgggtccgacaggctcctggacaaggactggaatggatcggctggatctatcctggcgacggcagcacccagtacaacgagaagttcaagggcagagtgaccatcaccgccgacaagagcacaagcaccgcctacatggaactgagcagcctgaccagcgaggacacagccgtgtattattgcgccagagagggcacctactacgctatggattattggggccagggcaccagcgtgaccgtttcttctggcggaggcggaggatctggtggcggaggaagcggtggcggcggttctgacatcgtgatgacacagagccccgccacactgagtgtgtctccaggcgagagagccaccatcagctgtagaagcagccagagcatcgtgcacagcaacggcaacacctacctggaatggtatcagcagaagcccggacaggcccctagactgctgatctacaaggtgtccaacagattcagcggcatccccgacagattttccggctctggcagcggcaccgatttcaccctgaccatcagcagactggaacccgaggacttcgccgtgtactactgcttccaaggcagccacgtgccaagaacctttggcggaggcaccaagctggaaatcaagaga

SEQ ID NO: 32187 - DNA, 762 bp, synthetic construct
  source 1..762: mol_type = other DNA
cagtctgctctgacacagcctgcctctgtgtctggctctcctggacagagcatcaccatcagctgtaccggcaccagctctgatgtcggcggctacaattacgtgtcctggtatcagcagcaccccggcaaggcccctaagctgatgatctacgacgtgtccaacagacccagcggcgtgtccaatagattctccggcagcaagagcggcaacaccgccagcctgacaatttctggactgcaagccgaggacgaggccgactacttctgtagcagctacaccagctccagcacacccgtggtttttggcggcggaacaaagctgacagtgctcggcggaggcggaggatctggtggcggaggaagcggtggcggcggttctcaggttcagctgcaacaaagcggagccggcctgctgaagcctagcgaaacactgtctctgacctgtgccgtgtccggcggcagctttagcggctattactggacctggatcagacagaggccaggcaaaggactggaatggatcggcgagatcaaccacagaggctccaccgactacaaccccagcctgaagtccagagtgaccatgagcatcgacaccagcaagtcccagttcagcctgaatctgaagtccgtgacagccgccgataccgccgtgtactattgtgccagagccgcctggggcagctgctacgatggaacatgttaccccgccgagtatttccagtattggggccagggcaccctggtcacagtctcttct

SEQ ID NO: 32188 - DNA, 741 bp, synthetic construct
  source 1..741: mol_type = other DNA
gagatcgtgatgacacagagccccggcacactgtcactgtctccaggcgaaagagccacactgagctgtagagccagccagagcgtgtccagctcttacctggcttggtatcagcagaagcccggacaggctcccagactgctgatctacggtgcctctagcagagccacaggcatccccgatagattttctggcagcggctccggcaccgacttcaccctgacaatcagcagactggaacccgaggacttcgccgtgtactactgtcagcagtacggcagcagccctctgacatttggcggcggaacaaaggtggaaatcaaaggcggaggcggaggatctggtggcggaggaagcggtggcggcggttctcaagttcagctggttcagagcggagccgaagtgaagaaacctggggcctctgtgaaggtgtcctgcaaggccagcggctacagctttaccagctacggcatcaactgggtccgacaggcacctggacaaggactggaatggatgggctggatcagcgcctacaacggcaacaccaactacgcccagaaactccagggcagagtgaccatgaccagagacaccagcaccagaaccgcctacatggaactgcggagcctgagatccgatgacaccgccgtgtattattgcgccagagagtacgacatcctgaccggctactccgacgcctttgacatctggggccagggcacactggttaccgttagctct

SEQ ID NO: 32189 - DNA, 729 bp, synthetic construct
  source 1..729: mol_type = other DNA
gagatcgtgctgacacagtctcccgccacactgtcactgtctccaggcgaaagagccacactgagctgtagagccagccagagcgtgtcctcttacctggcctggtatcagcagaagcctggacaggctccccggctgttgatctacggtgcttctagcagagccacaggcatccccgccagattttctggctctggcagcggcaccgatttcaccctgaccataagcagcctggaacctgaggacttcgccgtgtactactgccagcagagaagcaactggcctccttacacattcggccagggcaccaagctggaaatcaaaggcggaggcggaggatctggtggcggaggaagcggtggcggcggttctcaagtgcagctggttgagtcaggcggtggccttgtgaaacctggcggtagcctgagactgtcttgtgccgccagcggcttcaccttcagcagctactctatgcactgggtccgacaggcccctggcaaaggacttgaatgggtgtccgacatcagcaccaacagcagaacccggaactacgccgacagcgtgaagggcagattcaccatctccagagacaacgccaagaacagcgtgtacctccagatgcacagcctgagagatgaggacacagccgtgtattattgcgccagagactacggcggcatctactacttcgactactggggccagggaaccctggtcacagtctcttct

SEQ ID NO: 32190 - DNA, 750 bp, synthetic construct
  source 1..750: mol_type = other DNA
gagatcgtgctgacacagtctcccgccacactgtcactgtctccaggcgaaagagccacactgagctgtagagccagccagagcgtgtcctcttacctggcctggtatcagcagaagcctggacaggctccccggctgttgatctacggtgcttctagcagagccacaggcatccccgccagattttctggctctggcagcggcaccgatttcaccctgaccataagcagcctggaacctgaggacttcgccgtgtactactgccagcagagaagcaactggcctccttacacattcggccagggcaccaagctggaaatcaaaggaggcggtggatctggcggcggaggtagtggtggtggcggatctcaggttcagctgcaacaaagcggagccggcctgctgaagcctagcgaaacactgtctctgacctgtgccgtgtccggcggcagctttagcggctattactggacctggatcagacagaggccaggcaaaggactggaatggatcggcgagatcaaccacagaggctccaccgactacaaccccagcctgaagtccagagtgaccatgagcatcgacaccagcaagtcccagttcagcctgaatctgaagtccgtgacagccgccgataccgccgtgtactattgtgccagagccgcctggggcagctgctacgatggaacatgttaccccgccgagtatttccagtattggggccagggcaccctggtcacagtctcttct

SEQ ID NO: 32191 - DNA, 738 bp, synthetic construct
  source 1..738: mol_type = other DNA
gagatcgtgatgacacagagccccggcacactgtcactgtctccaggcgaaagagccacactgagctgtagagccagccagagcgtgtccagctcttacctggcttggtatcagcagaagcccggacaggctcccagactgctgatctacggtgcctctagcagagccacaggcatccccgatagattttctggcagcggctccggcaccgacttcaccctgacaatcagcagactggaacccgaggacttcgccgtgtactactgtcagcagtacggcagcagccctctgacatttggcggcggaacaaaggtggaaatcaaaggaggcggtggatctggcggcggaggtagtggtggtggcggatctcaagttcagctggttcagagcggagccgaagtgaagaaacctggggcctctgtgaaggtgtcctgcaaggccagcggctacagctttaccagctacggcatcaactgggtccgacaggcacctggacaaggactggaatggatgggctggatcagcgcctacaacggctacaccaactacgcccagaaactccagggcagagtgaccatgaccagagacaccagcaccagaaccgcctacatggaactgcggagcctgagatccgatgacaccgccgtgtattattgcgccagagagtacgacatcctgaccggctactccgacgcctttgacatctggggccagggcacactggttaccgttagctct

SEQ ID NO: 32192 - DNA, 714 bp, synthetic construct
  source 1..714: mol_type = other DNA
gacatccagatgactcagagccccagcagcctgtctgcctctgtgggagacagagtgaccatcacctgtagagccagccagagcatcagctcctacctgaactggtatcagcagaagcccggcaaggcccctaagctgctgatctacgatgccagcacactccagagcggcgtgccaagcagattttctggcagcggctctggcaccgacttcaccctgacaatatccagcctccagcctgaggacttcgccacctactactgtcagcagagcgacggcaaccctaccacctttggacagggcaccaaggtggaaatcaagggaggcggtggatctggcggcggaggtagtggtggtggcggatctgaggttcagctgcttgagtctggcggaggactggttcaacctggcggaagcctgagactgtcttgtgccgccagcggcttcacctttagcagctacgccatgagctgggtccgacaggctcctggcaaaggactggaatgggtgtccagcatcagcaccagcggcagctatacagcctacgccgatagcgtgaagggcagattcaccatcagccgggacaacagcaagaacaccctgtacctccagatgaacagcctgagagccgaggacaccgccgtgtactattgtgccaaaggcggctacaccttcgactactggggccagggaacactggtcacagtttctagc

SEQ ID NO: 32193 - DNA, 717 bp, synthetic construct; identical to SEQ ID NO: 19811
  source 1..717: mol_type = other DNA

SEQ ID NO: 32194 - DNA, 717 bp, synthetic construct; identical to SEQ ID NO: 19812
  source 1..717: mol_type = other DNA

SEQ ID NO: 32195 - DNA, 354 bp, synthetic construct
  source 1..354: mol_type = other DNA
gaggttcagctgcttgagtctggcggaggactggttcaacctggcggaagcctgagactgtcttgtgccgcctctggcagaaccttcagcatgggctggtatagacaggcccctggcaagggcctcgaatttgtgtctgccatcacatacagcggcggcagcccttactacgccgattctgtgaagggcagattcaccatcagccgggacaacagcaagaacaccgtgtacctccagatgaacagcctgagagccgaggacaccgccgtgtactactgtgccgccaatccaacctacggcagcgactggaatgccgagaattggggccagggcacactggtcacagtgtctagt

SEQ ID NO: 32196 - DNA, 354 bp, synthetic construct
  source 1..354: mol_type = other DNA
caggttcagctgcttgagtctggcggaggactggttcaacctggcggaagcctgagactgtcttgtgccgcctctggcagaaccttcagcatgggctggtatagacaggcccctggcaaggagagagaatttgtggccgccatcacatacagcggcggcagcccttactacgccgattctgtgaagggcagattcaccatcagccgggacaacagcaagaacaccgtgtacctccagatgaacagcctgagagccgaggacaccgccgtgtactactgtgccgccaatccaacctacggcagcgactggaatgccgagaattggggccagggcacactggtcacagtgtctagt

SEQ ID NO: 32197 - DNA, 354 bp, synthetic construct
  source 1..354: mol_type = other DNA
caagtgcaactggttgaatccggtggcggcctggtgcaacccggcggatctctcagacttagctgtgccgcctccggcagaaccttcacaatgggatggtacaggcaggctccagggaaagggctcgagttcgtcagcgccatctctctgtctcccacactggcctactacgccgactctgtgaaaggccggttcaccatctccagagataatagcaagaacaccgtggtgctgcaaatgaactctctgagagccgaggatacagccctgtactattgtgccgctgaccggaagtccgtgatgagcatcagacccgattactggggacagggcacactggtcacagtgtctagt

SEQ ID NO: 32198 - DNA, 354 bp, synthetic construct
  source 1..354: mol_type = other DNA
gaagtgcaactggttgaatccggtggcggcctggtgcaacccggcggatctctcagacttagctgtgccgcctccggcagaaccttcacaatgggatggtacaggcaggctccagggaaagagagagagttcgtcgccgccatctctctgtctcccacactggcctactacgccgactctgtgaaaggccggttcaccatctccagagataatagcaagaacaccgtggtgctgcaaatgaactctctgagagccgaggatacagccctgtactattgtgccgctgaccggaagtccgtgatgagcatcagacccgattactggggacagggcacactggtcacagtgtctagt

SEQ ID NO: 32199 - DNA, 375 bp, synthetic construct
  source 1..375: mol_type = other DNA
caggtgcagctggttgaatctggcggaggactggttcagcctggcggatctctgagactgtcttgtgccgccagcggcaacatcaacagcagaaactgcatgggctggttcagacaggcccctggcaagggaagagaaggcgtggcagctatcggccaagtgaccggcagaacctactacgtggacagcgtgaagggcagattcaccatcagcctggacaacagcaagaacaccctgtacctccagatgaacagcctgagagccgaggacaccgccgtgtactattgtgctgctgcccctggctgtctgctgtctgcacttagaagcgccgactacagaaactggggccagggcacactggtcaccgtttcttct

SEQ ID NO: 32200 - DNA, 375 bp, synthetic construct
  source 1..375: mol_type = other DNA
caggtgcagctggttgaatctggcggaggatctgttcaggctggcggctctctgagactgtcttgtggcgcttccggcaacatcaacagccggaattgcatgggctggttcagacaggcccctggcaaagagagagaaggcgttgccggcatcggccaagtgacaggcagaacctactacgccgacagcgtgaagggcagattcaccatcagcctggacaacgccaagaacatgctgtacctccagatgaacaccctgaagcctgaggacaccgccatgtactactgtgccgctgctcctggctgtctgctgtctgcacttagaagcgccgactacagaaactggggccagggcacacaagtgaccgtgtcatct

SEQ ID NO: 32201 - DNA, 375 bp, synthetic construct
  source 1..375: mol_type = other DNA
caggtgcagctggttgaatctggcggaggatctgttcaggctggcggctctctgagactgtcttgtggcgcttccggcaacatcaacagcagaaactgcatgggctggttcagacaggcccctggcaaagagagagaaggcgttgccgccatcggacaagtgaccggcagatcctactacgtggacagcgtgaagggcagattcaccatcagcctggacaacgccaagaacaccctgtacctccagatgaacacactgaagcccgaggacaccgccatgtactactgtgctgctgcccctggctgtctgctgtctgcacttagaagcgccgactacagaaactggggccagggaacccaagtgacagtgtctagt

SEQ ID NO: 32202 - DNA, 375 bp, synthetic construct
  source 1..375: mol_type = other DNA
caggtgcagctggttgaatctggcggaggatctgttcaggctggcggctctctgagactgtcttgtggcgcttccggcaacatcagcagcagaaactgcatgggctggttcagacaggcccctggcaaagagagagaaggcgttgccgccatcggacaagtgaccggcagatcctactacgtggacagcgtgaagggcagattcaccatcagcctggacaacgccaagaacaccctgtacctccagatgaacacactgaagcccgaggacaccgccatgtactactgtgctgctgcccctggctgtctgctgtctgcacttagaagcgccgactacagaaactggggccagggaacccaagtgacagtgtctagt

SEQ ID NO: 32203 - DNA, 375 bp, synthetic construct; identical to SEQ ID NO: 32201
  source 1..375: mol_type = other DNA

SEQ ID NO: 32204 - DNA, 354 bp, synthetic construct
  source 1..354: mol_type = other DNA
gaagtgcaactggttgaatccggtggcggcctggtgcaacccggcggatctctcagacttagctgtgccgcctccggcagaaccttcacaatgggatggttcaggcaggctccagggaaagggagagagttcgtcgccgccatctctctgtctcccacactggcctactacgccgactctgtgaaaggccggttcaccatctccagagataatagcaagaacaccgtggtgctgcaaatgaactctctgagagccgaggatacagccgtgtactattgtgccgctgaccggaagtccgtgatgagcatcagacccgattactggggacagggcacacaggtcacagtgtctagt

SEQ ID NO: 32205 - DNA, 384 bp, synthetic construct
  source 1..384: mol_type = other DNA
caggttcagctggtggaaagcggtggtggcgttgtgcaacctggcagaagtctgaggctgagctgtgtggcctccggctacacatactctattaactgcatgggatggtttcggcaggctcccggaaaaggcagagagggaattgccgccatctctacaggcggcggaacaacaggcgtggcagatagcgtgaaaggccggttcaccatctctcaggacaatgccaagaatacggtctatctccagatgaactctctgcgggccgaagatacagccatgtattactgcgccgccaggtccacctacagcggctatgcctgtgtgtacagcgaagtgaacggctacaactacagaggccagggaacacaagtcacagtcagcagc

SEQ ID NO: 32206 - DNA, 381 bp, synthetic construct
  source 1..381: mol_type = other DNA
gaggtgcagctggttgaatctggcggaggatctgttcaggctggcggctctctgagactgtcttgtgccgcctctggctacacctacggcatcaactgcatgggctggttcagacaggcccctggcaaagaacgagaaggcgtggccgtgattagcaccggcggaggcagaaccgactaccgggattctgtgaagggcagattcaccatcagccaggacaacgccaagaacaccgtgtacctccagatgaacagcctgaagcctgaggacaccgccatgtactactgtgccggcaagaccacctatcctggctacggatgtggcctgggcagaagcgcctacaattattggggccagggcacccaagtgaccgtgtctagc

SEQ ID NO: 32207 - DNA, 381 bp, synthetic construct
  source 1..381: mol_type = other DNA
gaggtgcagctggttgaatctggcggaggatctgttcaggctggcggctctctgagactgtcttgtgccgccagcggctacacctacagcatcaactgcatgggctggttcagacaggcccctggcaaagagagagaaggcgttgccgccatctctaccggcggaggcagaaccgattaccgggattctgtgaagggcagattcaccatcagccaggacaacgccaagaacaccgtgtacctccagatgaacagcctgaagcctgaggacaccgccatgtactactgtgccggcaagaccacctatcctggctacggatgtggcctgggcagaagcgcctacaattattggggccagggcacccaagtgaccgtgtcatct

SEQ ID NO: 32208 - DNA, 375 bp, synthetic construct
  source 1..375: mol_type = other DNA
caagttcagctggtggaaagcggtggtggcgttgtgcaacctggtggaagtctgaggctgagctgtgccgcttctggcctgagctttagcacctacactgtggcctggttcaggcaggctcccggaaagggtcttgaaggcgtggccgccattccttacaccagccagcacatggtgtacacagacagcgtcagaggccggttcaccatcagcagagacaactccaagaatacgctctatctccagatgaactctctgcgcgccgaagatacagccgtgtattactgcgccaccgacagacggcctggcacctctatgctggctatcaacggctacaacagatggggacagggaaccaccgtgaccgtgtcatct

SEQ ID NO: 32209 - DNA, 363 bp, synthetic construct
  source 1..363: mol_type = other DNA
gaggtgcagctggttgaatctggcggaggactggttcagcctggcggatctctgagactgtcttgtgccgccagcggcagaaccttcagcaactacaacatgggctggttcagacaggcccctggcaaaggactggaatgggttgcagctgtggattggagcggcggcagcccttactatgccgattctgtgaagggcagattcaccatcagccgggacaacagcaagaacaccgtgtacctccagatgaacagcctgagagccgaggacaccgccgtgtactattgtgccggcagagtgcagtacggcagctcttggagcggagattattggggccagggcaccctggtcacagtttctagc

SEQ ID NO: 32210 - DNA, 726 bp, synthetic construct
  source 1..726: mol_type = other DNA
caagtgaagctggaagagtctggcggaggactggtgcaggctggaagaagcctgagactgtcttgtgccgccagcgagcacacctttagctctcacgtgatgggctggttcagacaggcccctggcaaagaaagggaaagcgtggccgttatcggctggcgggatattagcacctactacgccgatagcgtgaagggcagattcaccatcagccgggacaacgccaagaaaaccctgtacctccagatgaacagcctgaagccagaggacaccgccgtgtactactgcgccgccagaagaattgacgccgccgactttgattcttggggccagggaacccaagtgaccgtttctagcggaggaggaggatctgaagtgcaactggttgaatccggtggcggcctggtgcaagcaggcggatctctcagacttagctgtgccgcctccggcagaaccttcacaatgggatggtttaggcaggctccagggaaagagagagagttcgtcgccgccatctctctgtctcccacactggcctactacgccgactctgtgaaaggccggttcaccatctccagagataatgccaagaacaccgtggtgctgcaaatgaactctctgaaacccgaggatacagccctgtactattgtgccgctgaccggaagtccgtgatgagcatcagacccgattactggggacagggcacacaagtcacagtgtcctct

SEQ ID NO: 32211 - DNA, 726 bp, synthetic construct
  source 1..726: mol_type = other DNA
gaagtgcaactggttgaatccggtggcggcctggtgcaagcaggcggatctctcagacttagctgtgccgcctccggcagaaccttcacaatgggatggtttaggcaggctccagggaaagagagagagttcgtcgccgccatctctctgtctcccacactggcctactacgccgactctgtgaaaggccggttcaccatctccagagataatgccaagaacaccgtggtgctgcaaatgaactctctgaaacccgaggatacagccctgtactattgtgccgctgaccggaagtccgtgatgagcatcagacccgattactggggacagggcacacaagtcacagtgtcctctggaggaggaggatctcaagtgaagctggaagagtctggcggaggactggtgcaggctggaagaagcctgagactgtcttgtgccgccagcgagcacacctttagctctcacgtgatgggctggttcagacaggcccctggcaaagaaagggaaagcgtggccgttatcggctggcgggatattagcacctactacgccgatagcgtgaagggcagattcaccatcagccgggacaacgccaagaaaaccctgtacctccagatgaacagcctgaagccagaggacaccgccgtgtactactgcgccgccagaagaattgacgccgccgactttgattcttggggccagggaacccaagtgaccgtttctagc

SEQ ID NO: 32212 - DNA, 357 bp, synthetic construct
  source 1..357: mol_type = other DNA
caagtgaagctggaagagtctggcggaggactggtgcaggctggaagaagcctgagactgtcttgtgccgccagcgagcacacctttagctctcacgtgatgggctggttcagacaggcccctggcaaagaaagggaaagcgtggccgttatcggctggcgggatattagcacctactacgccgatagcgtgaagggcagattcaccatcagccgggacaacgccaagaaaaccctgtacctccagatgaacagcctgaagccagaggacaccgccgtgtactactgcgccgccagaagaattgacgccgccgactttgattcttggggccagggaacccaagtgaccgtttctagc

SEQ ID NO: 32213 - DNA, 354 bp, synthetic construct
  source 1..354: mol_type = other DNA
gaagtgcaactggttgaatccggtggcggcctggtgcaagcaggcggatctctcagacttagctgtgccgcctccggcagaaccttcacaatgggatggtttaggcaggctccagggaaagagagagagttcgtcgccgccatctctctgtctcccacactggcctactacgccgactctgtgaaaggccggttcaccatctccagagataatgccaagaacaccgtggtgctgcaaatgaactctctgaaacccgaggatacagccctgtactattgtgccgctgaccggaagtccgtgatgagcatcagacccgattactggggacagggcacacaagtcacagtgtcctct

SEQ ID NO: 32214 - DNA, 333 bp, synthetic construct
  source 1..333: mol_type = other DNA
gaggatcaagtgacacagagccccgaggcactgagactgcaagagggcgaaagcagcagcctgaactgctcctacacagtgtccggcctgaggggcctgttctggtatagacaggaccctggcaagggacccgagttcctgttcacactgtactctgccggcgaggaaaaagagaaagagcgcctgaaggccacactgaccaagaaagagagcttcctgcacatcacagcccctaagcctgaggacagcgccacatatctgtgtgccgtgcactctacagcccaggctggaacagccctgatcttcggcaagggcacaacactgagcgtgtcc

SEQ ID NO: 32215 - DNA, 333 bp, synthetic construct
  source 1..333: mol_type = other DNA
gaggatcaagtgacacagagccccgaggcactgagactgcaagagggcgaaagcagcagcctgaactgctcctacacagtgtccggcctgaggggcctgttctggtatagacaggaccctggcaagggacccgagttcctgttcacactgtactctgccggcgaggaaaaagagaaagagcgcctgaaggccacactgaccaagaaagagagcttcctgcacatcacagcccctaagcctgaggacagcgccacatatctgtgtgccgtgcactctacagcccaggctggaacagccctgacattcggcaagggcacaacactgagcgtgtcc

SEQ ID NO: 32216 - DNA, 339 bp, synthetic construct
  source 1..339: mol_type = other DNA
ggcgttacccagacacctaagcacctgattacagccaccggccagcgcgtgaccctgagatgttctcctagaagcggcgacagaagcgtgtactggtatcagcagagcctggaccagggcctccagttcctgatccagtattacaacggcgaggaaagagccaagggcaacatcctggaacggttcagcgcccagcagttccctgatctgcacagcgagctgaacctgagcagcctggaactgggagatagcgccctgtacttctgtgccagcagcacacacagaggccagaccaactacggctacacctttggcagcggcaccagactgaccgtgctc

SEQ ID NO: 32217 - DNA, 339 bp, synthetic construct
  source 1..339: mol_type = other DNA
ggcgttacccagacacctaagcacctgattacagccaccggccagcgcgtgaccctgagatgttctcctagaagcggcgagctgagcgtgtactggtatcagcagagcctggaccagggcctccagttcctgatccagtattacaacggcgaggaaagagccaagggcaacatcctggaacggttcagcgcccagcagttccctgatctgcacagcgagctgaacctgagcagcctggaactgggagatagcgccctgtacttctgtgccagcagcacacacagaggccagaccaactacggctacacctttggcagcggcaccagactgaccgtgctc

SEQ ID NO: 32218 - DNA, 420 bp, synthetic construct
  source 1..420: mol_type = other DNA
atccagaaccctgatcctgccgtgtaccagctgcgggatagcaagagcagcgacaagagcgtgtgtctgttcaccgacttcgacagccagaccaacgtgtcccagagcaaggactccgacgtgtacatcaccgataagaccgtgctggacatgcggagcatggacttcaagagcaactccgccgtggcctggtccagcaagtccgatttcgcctgcgccaacgccttcaacaacagcattatccccgaggacacattcttcccaagccccgagatggcctgcgacgtgaagctggtggaaaagagcttcgagacagacaccaacctgaacttccagaacctgctcgtgatctggctgagaatcctgctgctgaaagtggccggctttaacctgctgatgaccctgcggctgtggtccagc

SEQ ID NO: 32219 - DNA, 420 bp, synthetic construct
  source 1..420: mol_type = other DNA
atccagaaccctgatcctgccgtgtaccagctgcgggatagcaagagcagcgacaagagcgtgtgtctgttcaccgacttcgacagccagaccaacgtgtcccagagcaaggactccgacgtgtacatcaccgataagaccgtgctggacatgcggagcatggacttcaagagcaactccgccgtggcctggtccaccaagtccgatttcgcctgcgccaacgccttcaacaacagcattatccccgaggacacattcttcccaagccccgaggtggtgtgcgacgtgaagctggtggaaaagagcttcgagacagacaccaacctgaacttccagaacctggtggtgatcggcgccagaatcctgctgctgaaagtggccggctttaacctgctgatgaccctgcggctgtggtccagc

SEQ ID NO: 32220 - DNA, 537 bp, synthetic construct
  source 1..537: mol_type = other DNA
gaggacctgaagcacgtgttcccacctgaggtggccgtgttcgagcctagcgacgccgagatctggcacacccagaaagccaccctcgtgtgcctggctaccggcttctaccccgaccatgtggaactgtcttggtgggtcaacggcaaagaggtgcacagcggcgtgtctaccgacccccagccactgaaagaacagcccgccctgaacgacagccggtactgcctgagcagcagactgagagtgtccgccaccttctggcagaacccccggaaccacttcagatgccaggtgcagttctacggcctgagcgagaacgacgagtggacccaggacagagccaagcccgtgacccagatcgtgtctgccgaagcctggggcagagccgattgcggctttaccagcgagagctaccagcagggcgtgctgagcgccaccatcctgtacgagatcctgctgggcaaggccaccctgtacgccgtgctggtgtctgccctggtgctgatggctatggtcaagcggaaggacagccgggga

SEQ ID NO: 32221 - DNA, 456 bp, synthetic construct
  source 1..456: mol_type = other DNA
tctcagcctcctgccaagcctagcgtgttcattatgaagaacggcaccaacgtggcctgcctggtcaaggacttctaccccaaagaagtgaccatcagcctgcggagcagcaagaagatcgtcgagttcgaccccgccatcgtgattagccctagcggcaagtatagcgccgtgaagctgggccagtacggcgacagcaatagcgtgacatgtagcgtgcagcacaacagcgagacagtgcacagcaccgacttcgagccctacgccaacagcttcaacaacgagaagctgcccgagcctgagaacgacacccagatcagcgagccttgctacggccctagagtgaccgtgcacaccgagaaagtgaacatgatgagcctgaccgtgctgggcctgagactgctgttcgccaagacaatcgccatcaactttctgctgaccgtcaagctgttcttc

SEQ ID NO: 32222 - DNA, 516 bp, synthetic construct
  source 1..516: mol_type = other DNA
gacaagagactggacgccgacatcagccccaagcctacaatcttcctgcctagcgtggccgagacaaacctgcacaagaccggcacctacctgtgtctgctggaaaagttcttccccgacgtgatccgggtgtactggaaagagaaggacggcaacaccatcctggactcccaagagggcgacaccctgaaaacaaacgacacctacatgaagttcagctggctgaccgtgcctgagagagctatgggcaaagaacacagatgcatcgtgaagcacgagaacaacaaaggcggagccgaccaagagatattcttcccgagcatcaagaaagtggccgtgtccaccaagccaaccacctgttggcaggacaagaacgacgtgctccagctccagttcaccatcaccagcgcctactacacatacctgctgctgctcctcaagagcgtgatctacctggccatcatcagcttcagcctgctgcggagaacaagcgtgtgcggcaacgagaagaagtcc

SEQ ID NO: 32223 - DNA, 543 bp, synthetic construct
  source 1..543: mol_type = other DNA
ctcgaggacctgaagcacgtgttcccacctgaggtggccgtgttcgagcctagcgacgccgagatctggcacacccagaaagccaccctcgtgtgcctggctaccggcttctaccccgaccatgtggaactgtcttggtgggtcaacggcaaagaggtgcacagcggcgtgtctaccgacccccagccactgaaagaacagcccgccctgaacgacagccggtactgcctgagcagcagactgagagtgtccgccaccttctggcagaacccccggaaccacttcagatgccaggtgcagttctacggcctgagcgagaacgacgagtggacccaggacagagccaagcccgtgacccagatcgtgtctgccgaagcctggggcagagccgattgcggctttaccagcgagagctaccagcagggcgtgctgagcgcctactacatgtacttgttgctgctgctgaagtccgtggtgtacttcgccatcatcacatgctgcctgctgcggagaaccgccttctgctgcaacggcgagaagtct

SEQ ID NO: 32224 - DNA, 543 bp, synthetic construct
  source 1..543: mol_type = other DNA
ctcgaggacctgaagcacgtgttcccacctgaggtggccgtgttcgagcctagcgacgccgagatctggcacacccagaaagccaccctcgtgtgcctggctaccggcttctaccccgaccatgtggaactgtcttggtgggtcaacggcaaagaggtgcacagcggcgtgtctaccgacccccagccactgaaagaacagcccgccctgaacgacagccggtactgcctgagcagcagactgagagtgtccgccaccttctggcagaacccccggaaccacttcagatgccaggtgcagttctacggcctgagcgagaacgacgagtggacccaggacagagccaagcccgtgacccagatcgtgtctgccgaagcctggggcagagccgattgcggctttaccagcgagagctaccagcagggcgtgctgagcgccaccatcctgtacttgttgctgctgctgaagtccgtggtgtacttcgccatcatcacatgctgcctgctgcggagaaccgccttctgctgcaacggcgagaagtct

SEQ ID NO: 32225 - DNA, 546 bp, synthetic construct; identical to SEQ ID NO: 21538
  source 1..546: mol_type = other DNA

SEQ ID NO: 32226 - DNA, 522 bp, synthetic construct; identical to SEQ ID NO: 21530
  source 1..522: mol_type = other DNA

SEQ ID NO: 32227 - DNA, 561 bp, synthetic construct; identical to SEQ ID NO: 21554
  source 1..561: mol_type = other DNA

SEQ ID NO: 32228 - DNA, 456 bp, synthetic construct; identical to SEQ ID NO: 21584
  source 1..456: mol_type = other DNA

SEQ ID NO: 32229 - DNA, 414 bp, synthetic construct; identical to SEQ ID NO: 21609
  source 1..414: mol_type = other DNA

SEQ ID NO: 32230 - DNA, 480 bp, synthetic construct
  source 1..480: mol_type = other DNA
ggacagcctaaggccaatcctaccgtgacactgttccctccaagcagcgaagaactccaggccaacaaggccacacttgtgtgcctgatctccgacttctaccctggggctgtgacagtggcttggaaggccgatggatctcctgtgaaagccggcgtggaaaccaccaagccatccaagcagagcaacaacaaatacgccgccagctcctacctgagcctgacacctgagcagtggaagtcccacagatcctacagctgccaagtgacccacgaaggcagcaccgtggaaaagacagtggcccctacagagtgcagcggcagagccgattgcggctttaccagcgagagctaccagcagggcgtgctgagcgccaccatcctgtacttgttgctgctgctgaagtccgtggtgtacttcgccatcatcacatgctgcctgctgcggagaaccgccttctgctgcaacggcgagaagtct

SEQ ID NO: 32231 - DNA, 480 bp, synthetic construct
  source 1..480: mol_type = other DNA
ggacagcctaaggccaatcctaccgtgacactgttccctccaagcagcgaagaactccaggccaacaaggccacacttgtgtgcctgatctccgacttctaccctggggctgtgacagtggcttggaaggccgatggatctcctgtgaaagccggcgtggaaaccaccaagccatccaagcagagcaacaacaaatacgccgccagctcctacctgagcctgacacctgagcagtggaagtcccacagatcctacagctgccaagtgacccacgaaggcagcaccgtggaaaagacagtggcccctacagagtgcagcggcagagccgattgcggctttaccagcgagagctaccagcagggcgtgctgagcgcctactacatgtacttgttgctgctgctgaagtccgtggtgtacttcgccatcatcacatgctgcctgctgcggagaaccgccttctgctgcaacggcgagaagtct

SEQ ID NO: 32232 - DNA, 480 bp, synthetic construct
  source 1..480: mol_type = other DNA
ggacagcctaaggccaatcctaccgtgacactgttccctccaagcagcgaagaactccaggccaacaaggccacacttgtgtgcctgatctccgacttctaccctggggctgtgacagtggcttggaaggccgatggatctcctgtgaaagccggcgtggaaaccaccaagccatccaagcagagcaacaacaaatacgccgccagctcctacctgagcctgacacctgagcagtggaagtcccacagatcctacagctgccaagtgacccacgaaggcagcaccgtggaaaagacagtggcccctacagagtgcagcggcagagccgattgcggctttaccagcgagagctaccagcagggcgtgctgagcgcctactacacatacctgctgctgctcctcaagagcgtgatctacctggccatcatcagcttcagcctgctgcggagaacaagcgtgtgcggcaacgagaagaagtcc

SEQ ID NO: 32233 - DNA, 477 bp, synthetic construct
  source 1..477: mol_type = other DNA
ggacagcctaaggccaatcctaccgtgacactgttccctccaagcagcgaagaactccaggccaacaaggccacacttgtgtgcctgatctccgacttctaccctggggctgtgacagtggcttggaaggccgatggatctcctgtgaaagccggcgtggaaaccaccaagccatccaagcagagcaacaacaaatacgccgccagctcctacctgagcctgacacctgagcagtggaagtcccacagatcctacagctgccaagtgacccacgaaggcagcaccgtggaaaagacagtggcccctacagagtgcagcggcagagccgattgcggctttaccagcgagagctaccagcagggcgtgctgagcgcctactacatgtacttgttgctgctgctgaagtccgtggtgtacttcgccatcatcacatgctgcctgctgatggctatggtcaagcggaaggacagccgggga

SEQ ID NO: 32234 - DNA, 480 bp, synthetic construct
  source 1..480: mol_type = other DNA
ggacagcctaaggccaatcctaccgtgacactgttccctccaagcagcgaagaactccaggccaacaaggccacacttgtgtgcctgatctccgacttctaccctggggctgtgacagtggcttggaaggccgatggatctcctgtgaaagccggcgtggaaaccaccaagccatccaagcagagcaacaacaaatacgccgccagctcctacctgagcctgacacctgagcagtggaagtcccacagatcctacagctgccaagtgacccacgaaggcagcaccgtggaaaagacagtggcccctacagagtgcagcggcagagccgattgcggctttaccagcgagagctaccagcagggcgtgctgagcgccaccatcctgtacttgttgctgctgctgaagtccgtggtgtacctggccatcatcagcttcagcctgctgcggagaaccgccttctgctgcaacggcgagaagtct

SEQ ID NO: 32235 - DNA, 162 bp, synthetic construct
  source 1..162: mol_type = other DNA
ggcagagccgattgcggctttaccagcgagagctaccagcagggcgtgctgagcgccaccatcctgtacttgttgctgctgctgaagtccgtggtgtacttcgccatcatcacatgctgcctgctgcggagaaccgccttctgctgcaacggcgagaagtct

SEQ ID NO: 32236 - DNA, 162 bp, synthetic construct
  source 1..162: mol_type = other DNA
ggcagagccgattgcggctttaccagcgagagctaccagcagggcgtgctgagcgcctactacatgtacttgttgctgctgctgaagtccgtggtgtacttcgccatcatcacatgctgcctgctgcggagaaccgccttctgctgcaacggcgagaagtct

SEQ ID NO: 32237 - DNA, 162 bp, synthetic construct
  source 1..162: mol_type = other DNA
ggcagagccgattgcggctttaccagcgagagctaccagcagggcgtgctgagcgcctactacacatacctgctgctgctcctcaagagcgtgatctacctggccatcatcagcttcagcctgctgcggagaacaagcgtgtgcggcaacgagaagaagtcc

SEQ ID NO: 32238 - DNA, 159 bp, synthetic construct
  source 1..159: mol_type = other DNA
ggcagagccgattgcggctttaccagcgagagctaccagcagggcgtgctgagcgcctactacatgtacttgttgctgctgctgaagtccgtggtgtacttcgccatcatcacatgctgcctgctgatggctatggtcaagcggaaggacagccgggga

SEQ ID NO: 32239 - DNA, 162 bp, synthetic construct
  source 1..162: mol_type = other DNA
ggcagagccgattgcggctttaccagcgagagctaccagcagggcgtgctgagcgccaccatcctgtacttgttgctgctgctgaagtccgtggtgtacctggccatcatcagcttcagcctgctgcggagaaccgccttctgctgcaacggcgagaagtct

SEQ ID NO: 32240 - DNA, 489 bp, synthetic construct
  source 1..489: mol_type = other DNA
gcctctacaaagggaccctccgtgtttcctctggctcccagcagcaagtctacaagcggaggaacagccgctctgggctgcctggtcaaggattactttcccgagcctgtgaccgtgtcctggaatagcggagcactgacaagcggcgtgcacacctttccagccgtgctgcaaagcagcggcctgtactctctgagcagcgtggtcacagtgcctagctctagcctgggcacccagacctacatctgcaatgtgaaccacaagcctagcaacaccaaggtggacaagagagtggaacccaagagctgtatccccgaggacacattcttcccaagccccgagagcagctgcgacgtgaagctggtggaaaagagcttcgagacagacaccaacctgaacttccagaacctgagcgtgatcggcctgcggatgctgttcgccaaaaccgtggccgtgaacttcctgctgaccgccaagctgttcttcctc

SEQ ID NO: 32241 - DNA, 489 bp, synthetic construct
  source 1..489: mol_type = other DNA
gcctctacaaagggaccctccgtgtttcctctggctcccagcagcaagtctacaagcggaggaacagccgctctgggctgcctggtcaaggattactttcccgagcctgtgaccgtgtcctggaatagcggagcactgacaagcggcgtgcacacctttccagccgtgctgcaaagcagcggcctgtactctctgagcagcgtggtcacagtgcctagctctagcctgggcacccagacctacatctgcaatgtgaaccacaagcctagcaacaccaaggtggacaagagagtggaacccaagagctgtatccccgaggacacattcttcccaagccccgagagcagctgcgacgtgaagctggtggaaaagagcttcgagacagacaccaacctgaacttccagaacctgagcgtgctgggcctgcggatgctgttcgccaaaaccgtggccgtgaacttcctgctgaccgccaagctgttcttcctc

SEQ ID NO: 32242 - DNA, 489 bp, synthetic construct
  source 1..489: mol_type = other DNA
gcctctacaaagggaccctccgtgtttcctctggctcccagcagcaagtctacaagcggaggaacagccgctctgggctgcctggtcaaggattactttcccgagcctgtgaccgtgtcctggaatagcggagcactgacaagcggcgtgcacacctttccagccgtgctgcaaagcagcggcctgtactctctgagcagcgtggtcacagtgcctagctctagcctgggcacccagacctacatctgcaatgtgaaccacaagcctagcaacaccaaggtggacaagagagtggaacccaagagctgtatccccgaggacacattcttcccaagccccgagagcagctgcgacgtgaagctggtggaaaagagcttcgagacagacaccaacctgaacttccagaacctgaccgtgctgggcctgcggatgctgttcgccaaaaccgtggccgtgaacttcctgctgaccgccaagctgttcttcctc

SEQ ID NO: 32243 - DNA, 489 bp, synthetic construct; identical to SEQ ID NO: 32242
  source 1..489: mol_type = other DNA

SEQ ID NO: 32244 - DNA, 495 bp, synthetic construct
  source 1..495: mol_type = other DNA
gcctctacaaagggaccctccgtgtttcctctggctcccagcagcaagtctacaagcggaggaacagccgctctgggctgcctggtcaaggattactttcccgagcctgtgaccgtgtcctggaatagcggagcactgacaagcggcgtgcacacctttccagccgtgctgcaaagcagcggcctgtactctctgagcagcgtggtcacagtgcctagctctagcctgggcacccagacctacatctgcaatgtgaaccacaagcctagcaacaccaaggtggacaagagagtggaacccaagagctgtatcttcaaagagacaaacgccacctacccctccagcgacgtgccctgtgacgccaccctgaccgagaagtccttcgagacagacatgaacctcaacttccagaacctgaccgtgctgggcctgcggatgctgttcgccaaaaccgtggccgtgaacttcctgctgaccgccaagctgttcttcctc

SEQ ID NO: 32245 - DNA, 180 bp, synthetic construct
  source 1..180: mol_type = other DNA
atccccgaggacacattcttcccaagccccgagagcagctgcgacgtgaagctggtggaaaagagcttcgagacagacaccaacctgaacttccagaacctgagcgtgatcggcctgcggatgctgttcgccaaaaccgtggccgtgaacttcctgctgaccgccaagctgttcttcctc

SEQ ID NO: 32246 - DNA, 180 bp, synthetic construct
  source 1..180: mol_type = other DNA
atccccgaggacacattcttcccaagccccgagagcagctgcgacgtgaagctggtggaaaagagcttcgagacagacaccaacctgaacttccagaacctgagcgtgctgggcctgcggatgctgttcgccaaaaccgtggccgtgaacttcctgctgaccgccaagctgttcttcctc

SEQ ID NO: 32247 - DNA, 180 bp, synthetic construct
  source 1..180: mol_type = other DNA
atccccgaggacacattcttcccaagccccgagagcagctgcgacgtgaagctggtggaaaagagcttcgagacagacaccaacctgaacttccagaacctgaccgtgctgggcctgcggatgctgttcgccaaaaccgtggccgtgaacttcctgctgaccgccaagctgttcttcctc

SEQ ID NO: 32248 - DNA, 180 bp, synthetic construct; identical to SEQ ID NO: 32247
  source 1..180: mol_type = other DNA

SEQ ID NO: 32249 - DNA, 186 bp, synthetic construct
  source 1..186: mol_type = other DNA
atcttcaaagagacaaacgccacctacccctccagcgacgtgccctgtgacgccaccctgaccgagaagtccttcgagacagacatgaacctcaacttccagaacctgaccgtgctgggcctgcggatgctgttcgccaaaaccgtggccgtgaacttcctgctgaccgccaagctgttcttcctc

SEQ ID NO: 32250 - DNA, 516 bp, synthetic construct
  source 1..516: mol_type = other DNA
ggacagcctaaggccaatcctaccgtgacactgttccctccaagcagcgaagaactccaggccaacaaggccacacttgtgtgcctgatctccgacttctaccctggggctgtgacagtggcttggaaggccgatggatctcctgtgaaagccggcgtggaaaccaccaagccatccaagcagagcaacaacaaatacgccgccagctcctacctgagcctgacacctgagcagtggaagtcccacagatcctacagctgccaagtgacccacgaaggcagcaccgtggaaaagacagtggcccctacagagtgcagccccatcaagaccgatgtgattacaatggaccccaaggacaactgctccaaggacgccaacgataccctgctgctccagctgaccaacaccagcgcctactacatgtacgagatcctgctgggcaaggccaccctgtacgccgtgctggtgtctgccctggtgctgatggctatggtcaagcggaaggacagccgggga

SEQ ID NO: 32251 - DNA, 516 bp, synthetic construct
  source 1..516: mol_type = other DNA
ggacagcctaaggccaatcctaccgtgacactgttccctccaagcagcgaagaactccaggccaacaaggccacacttgtgtgcctgatctccgacttctaccctggggctgtgacagtggcttggaaggccgatggatctcctgtgaaagccggcgtggaaaccaccaagccatccaagcagagcaacaacaaatacgccgccagctcctacctgagcctgacacctgagcagtggaagtcccacagatcctacagctgccaagtgacccacgaaggcagcaccgtggaaaagacagtggcccctacagagtgcagccccatcaagaccgatgtgattacaatggaccccaaggacaactgctccaaggacgccaacgataccctgctgctccagctgaccaacaccagcgccaccatcctgtacgagatcctgctgggcaaggccaccctgtacgccgtgctggtgtctgccctggtgctgatggctatggtcaagcggaaggacagccgggga

SEQ ID NO: 32252 - DNA, 519 bp, synthetic construct
  source 1..519: mol_type = other DNA
ggacagcctaaggccaatcctaccgtgacactgttccctccaagcagcgaagaactccaggccaacaaggccacacttgtgtgcctgatctccgacttctaccctggggctgtgacagtggcttggaaggccgatggatctcctgtgaaagccggcgtggaaaccaccaagccatccaagcagagcaacaacaaatacgccgccagctcctacctgagcctgacacctgagcagtggaagtcccacagatcctacagctgccaagtgacccacgaaggcagcaccgtggaaaagacagtggcccctacagagtgcagccccatcaagaccgatgtgattacaatggaccccaaggacaactgctccaaggacgccaacgataccctgctgctccagctgaccaacaccagcgcctactacacatacctgctgctgctcctcaagagcgtgatctacctggccatcatcagcttcagcctgctgcggagaacaagcgtgtgcggcaacgagaagaagtcc

SEQ ID NO: 32253 - DNA, 516 bp, synthetic construct
  source 1..516: mol_type = other DNA
ggacagcctaaggccaatcctaccgtgacactgttccctccaagcagcgaagaactccaggccaacaaggccacacttgtgtgcctgatctccgacttctaccctggggctgtgacagtggcttggaaggccgatggatctcctgtgaaagccggcgtggaaaccaccaagccatccaagcagagcaacaacaaatacgccgccagctcctacctgagcctgacacctgagcagtggaagtcccacagatcctacagctgccaagtgacccacgaaggcagcaccgtggaaaagacagtggcccctacagagtgcagcagcatcaagaaagtggccgtgtccaccaagccaaccacctgttggcaggacaagaacgacgtgctccagctccagttcaccatcaccagcgcctactacacatacctgctgctgctcctcaagagcgtgatctacctggccatcatcagcttcagcctgctgcggagaacaagcgtgtgcggcaacgagaagaagtcc

SEQ ID NO: 32254 - DNA, 1881 bp, synthetic construct
  source 1..1881: mol_type = other DNA
atggccttaccagtgaccgccttgctcctgccgctggccttgctgctccacgccgccaggccggacatccagatgacacagagccctagcagcctgtctgccagcgtgggagacagagtgaccatcacatgcaaggccagcgaccacatcaacaactggctggcctggtatcagcagaagcctggacaggcccctaagctgctgatctacggcgctaccacactggaaacaggcgtgcccagcagattttctggcagcggctctggcaccgactacaccctgacaatatccagcctccagcctgaggacttcgccacctactactgtcagcagagctggaacaccccttggacattcggccagggcaccaagctggaaatcaagagactcgagggacagcctaaggccaatcctaccgtgacactgttccctccaagcagcgaagaactccaggccaacaaggccacacttgtgtgcctgatctccgacttctaccctggggctgtgacagtggcttggaaggccgatggatctcctgtgaaagccggcgtggaaaccaccaagccatccaagcagagcaacaacaaatacgccgccagctcctacctgagcctgacacctgagcagtggaagtcccacagatcctacagctgccaagtgacccacgaaggcagcaccgtggaaaagacagtggcccctacagagtgcagcggcagagccgattgcggctttaccagcgagagctaccagcagggcgtgctgagcgccaccatcctgtacttgttgctgctgctgaagtccgtggtgtacttcgccatcatcacatgctgcctgctgcggagaaccgccttctgctgcaacggcgagaagtctagggccaagcgatctggatctggagcaacaaacttctcactactcaaacaagcaggtgacgtggaggagaatcccgggcctactagtatggactggatttggcgcatccttttccttgtcggcgctgctaccggcgcgcattccttcgaacaagttcagcttcaacagcctggcgctgagctggtcaaacctggcgcttctgtgaagatgagctgcaaagccagcggctacgccttcagcagctactggatcaactggatgaagcagaaacccggccagggactcgaatggatcggccaaatctatcccggcgacggcgacaccaactacaacggcaagttcaagggcagagccacactgaccgccgatacctctagcagcacagcctacatgcagctgagcagcctgaccagcgaagatagcgccgtgtacttctgtgcccggtccatcacaacagtcgtgggctgcgctatggactattggggccagggaacaagcgtgaccgtgtctagtacgcgtgcctctacaaagggaccctccgtgtttcctctggctcccagcagcaagtctacaagcggaggaacagccgctctgggctgcctggtcaaggattactttcccgagcctgtgaccgtgtcctggaatagcggagcactgacaagcggcgtgcacacctttccagccgtgctgcaaagcagcggcctgtactctctgagcagcgtggtcacagtgcctagctctagcctgggcacccagacctacatctgcaatgtgaaccacaagcctagcaacaccaaggtggacaagagagtggaacccaagagctgtatccccgaggacacattcttcccaagccccgagagcagctgcgacgtgaagctggtggaaaagagcttcgagacagacaccaacctgaacttccagaacctgagcgtgatcggcttcagaatcctgctgctgaaagtggccggctttaacctgctgatgaccctgcggctgtggtccagc

SEQ ID NO: 32255 - DNA, 1881 bp, synthetic construct
  source 1..1881: mol_type = other DNA
atggccttaccagtgaccgccttgctcctgccgctggccttgctgctccacgccgccaggccggacatccagatgacacagagccctagcagcctgtctgccagcgtgggagacagagtgaccatcacatgcaaggccagcgaccacatcaacaactggctggcctggtatcagcagaagcctggacaggcccctaagctgctgatctacggcgctaccacactggaaacaggcgtgcccagcagattttctggcagcggctctggcaccgactacaccctgacaatatccagcctccagcctgaggacttcgccacctactactgtcagcagagctggaacaccccttggacattcggccagggcaccaagctggaaatcaagagactcgagggacagcctaaggccaatcctaccgtgacactgttccctccaagcagcgaagaactccaggccaacaaggccacacttgtgtgcctgatctccgacttctaccctggggctgtgacagtggcttggaaggccgatggatctcctgtgaaagccggcgtggaaaccaccaagccatccaagcagagcaacaacaaatacgccgccagctcctacctgagcctgacacctgagcagtggaagtcccacagatcctacagctgccaagtgacccacgaaggcagcaccgtggaaaagacagtggcccctacagagtgcagcggcagagccgattgcggctttaccagcgagagctaccagcagggcgtgctgagcgcctactacatgtacttgttgctgctgctgaagtccgtggtgtacttcgccatcatcacatgctgcctgctgcggagaaccgccttctgctgcaacggcgagaagtctagggccaagcgatctggatctggagcaacaaacttctcactactcaaacaagcaggtgacgtggaggagaatcccgggcctactagtatggactggatttggcgcatccttttccttgtcggcgctgctaccggcgcgcattccttcgaacaagttcagcttcaacagcctggcgctgagctggtcaaacctggcgcttctgtgaagatgagctgcaaagccagcggctacgccttcagcagctactggatcaactggatgaagcagaaacccggccagggactcgaatggatcggccaaatctatcccggcgacggcgacaccaactacaacggcaagttcaagggcagagccacactgaccgccgatacctctagcagcacagcctacatgcagctgagcagcctgaccagcgaagatagcgccgtgtacttctgtgcccggtccatcacaacagtcgtgggctgcgctatggactattggggccagggaacaagcgtgaccgtgtctagtacgcgtgcctctacaaagggaccctccgtgtttcctctggctcccagcagcaagtctacaagcggaggaacagccgctctgggctgcctggtcaaggattactttcccgagcctgtgaccgtgtcctggaatagcggagcactgacaagcggcgtgcacacctttccagccgtgctgcaaagcagcggcctgtactctctgagcagcgtggtcacagtgcctagctctagcctgggcacccagacctacatctgcaatgtgaaccacaagcctagcaacaccaaggtggacaagagagtggaacccaagagctgtatccccgaggacacattcttcccaagccccgagagcagctgcgacgtgaagctggtggaaaagagcttcgagacagacaccaacctgaacttccagaacctgagcgtgatcggcttcagaatcctgctgctgaaagtggccggctttaacctgctgatgaccctgcggctgtggtccagc

SEQ ID NO: 32256 - DNA, 1881 bp, synthetic construct
  source 1..1881: mol_type = other DNA
atggccttaccagtgaccgccttgctcctgccgctggccttgctgctccacgccgccaggccggacatccagatgacacagagccctagcagcctgtctgccagcgtgggagacagagtgaccatcacatgcaaggccagcgaccacatcaacaactggctggcctggtatcagcagaagcctggacaggcccctaagctgctgatctacggcgctaccacactggaaacaggcgtgcccagcagattttctggcagcggctctggcaccgactacaccctgacaatatccagcctccagcctgaggacttcgccacctactactgtcagcagagctggaacaccccttggacattcggccagggcaccaagctggaaatcaagagactcgagggacagcctaaggccaatcctaccgtgacactgttccctccaagcagcgaagaactccaggccaacaaggccacacttgtgtgcctgatctccgacttctaccctggggctgtgacagtggcttggaaggccgatggatctcctgtgaaagccggcgtggaaaccaccaagccatccaagcagagcaacaacaaatacgccgccagctcctacctgagcctgacacctgagcagtggaagtcccacagatcctacagctgccaagtgacccacgaaggcagcaccgtggaaaagacagtggcccctacagagtgcagcggcagagccgattgcggctttaccagcgagagctaccagcagggcgtgctgagcgcctactacacatacctgctgctgctcctcaagagcgtgatctacctggccatcatcagcttcagcctgctgcggagaacaagcgtgtgcggcaacgagaagaagtccagggccaagcgatctggatctggagcaacaaacttctcactactcaaacaagcaggtgacgtggaggagaatcccgggcctactagtatggactggatttggcgcatccttttccttgtcggcgctgctaccggcgcgcattccttcgaacaagttcagcttcaacagcctggcgctgagctggtcaaacctggcgcttctgtgaagatgagctgcaaagccagcggctacgccttcagcagctactggatcaactggatgaagcagaaacccggccagggactcgaatggatcggccaaatctatcccggcgacggcgacaccaactacaacggcaagttcaagggcagagccacactgaccgccgatacctctagcagcacagcctacatgcagctgagcagcctgaccagcgaagatagcgccgtgtacttctgtgcccggtccatcacaacagtcgtgggctgcgctatggactattggggccagggaacaagcgtgaccgtgtctagtacgcgtgcctctacaaagggaccctccgtgtttcctctggctcccagcagcaagtctacaagcggaggaacagccgctctgggctgcctggtcaaggattactttcccgagcctgtgaccgtgtcctggaatagcggagcactgacaagcggcgtgcacacctttccagccgtgctgcaaagcagcggcctgtactctctgagcagcgtggtcacagtgcctagctctagcctgggcacccagacctacatctgcaatgtgaaccacaagcctagcaacaccaaggtggacaagagagtggaacccaagagctgtatccccgaggacacattcttcccaagccccgagagcagctgcgacgtgaagctggtggaaaagagcttcgagacagacaccaacctgaacttccagaacctgagcgtgatcggcttcagaatcctgctgctgaaagtggccggctttaacctgctgatgaccctgcggctgtggtccagc

SEQ ID NO: 32257 - DNA, 1878 bp, synthetic construct
  source 1..1878: mol_type = other DNA
atggccttaccagtgaccgccttgctcctgccgctggccttgctgctccacgccgccaggccggacatccagatgacacagagccctagcagcctgtctgccagcgtgggagacagagtgaccatcacatgcaaggccagcgaccacatcaacaactggctggcctggtatcagcagaagcctggacaggcccctaagctgctgatctacggcgctaccacactggaaacaggcgtgcccagcagattttctggcagcggctctggcaccgactacaccctgacaatatccagcctccagcctgaggacttcgccacctactactgtcagcagagctggaacaccccttggacattcggccagggcaccaagctggaaatcaagagactcgagggacagcctaaggccaatcctaccgtgacactgttccctccaagcagcgaagaactccaggccaacaaggccacacttgtgtgcctgatctccgacttctaccctggggctgtgacagtggcttggaaggccgatggatctcctgtgaaagccggcgtggaaaccaccaagccatccaagcagagcaacaacaaatacgccgccagctcctacctgagcctgacacctgagcagtggaagtcccacagatcctacagctgccaagtgacccacgaaggcagcaccgtggaaaagacagtggcccctacagagtgcagcggcagagccgattgcggctttaccagcgagagctaccagcagggcgtgctgagcgcctactacatgtacttgttgctgctgctgaagtccgtggtgtacttcgccatcatcacatgctgcctgctgatggctatggtcaagcggaaggacagccggggaagggccaagcgatctggatctggagcaacaaacttctcactactcaaacaagcaggtgacgtggaggagaatcccgggcctactagtatggactggatttggcgcatccttttccttgtcggcgctgctaccggcgcgcattccttcgaacaagttcagcttcaacagcctggcgctgagctggtcaaacctggcgcttctgtgaagatgagctgcaaagccagcggctacgccttcagcagctactggatcaactggatgaagcagaaacccggccagggactcgaatggatcggccaaatctatcccggcgacggcgacaccaactacaacggcaagttcaagggcagagccacactgaccgccgatacctctagcagcacagcctacatgcagctgagcagcctgaccagcgaagatagcgccgtgtacttctgtgcccggtccatcacaacagtcgtgggctgcgctatggactattggggccagggaacaagcgtgaccgtgtctagtacgcgtgcctctacaaagggaccctccgtgtttcctctggctcccagcagcaagtctacaagcggaggaacagccgctctgggctgcctggtcaaggattactttcccgagcctgtgaccgtgtcctggaatagcggagcactgacaagcggcgtgcacacctttccagccgtgctgcaaagcagcggcctgtactctctgagcagcgtggtcacagtgcctagctctagcctgggcacccagacctacatctgcaatgtgaaccacaagcctagcaacaccaaggtggacaagagagtggaacccaagagctgtatccccgaggacacattcttcccaagccccgagagcagctgcgacgtgaagctggtggaaaagagcttcgagacagacaccaacctgaacttccagaacctgagcgtgatcggcttcagaatcctgctgctgaaagtggccggctttaacctgctgatgaccctgcggctgtggtccagc

SEQ ID NO: 32258 - DNA, 1881 bp, synthetic construct
  source 1..1881: mol_type = other DNA
atggccttaccagtgaccgccttgctcctgccgctggccttgctgctccacgccgccaggccggacatccagatgacacagagccctagcagcctgtctgccagcgtgggagacagagtgaccatcacatgcaaggccagcgaccacatcaacaactggctggcctggtatcagcagaagcctggacaggcccctaagctgctgatctacggcgctaccacactggaaacaggcgtgcccagcagattttctggcagcggctctggcaccgactacaccctgacaatatccagcctccagcctgaggacttcgccacctactactgtcagcagagctggaacaccccttggacattcggccagggcaccaagctggaaatcaagagactcgagggacagcctaaggccaatcctaccgtgacactgttccctccaagcagcgaagaactccaggccaacaaggccacacttgtgtgcctgatctccgacttctaccctggggctgtgacagtggcttggaaggccgatggatctcctgtgaaagccggcgtggaaaccaccaagccatccaagcagagcaacaacaaatacgccgccagctcctacctgagcctgacacctgagcagtggaagtcccacagatcctacagctgccaagtgacccacgaaggcagcaccgtggaaaagacagtggcccctacagagtgcagcggcagagccgattgcggctttaccagcgagagctaccagcagggcgtgctgagcgccaccatcctgtacttgttgctgctgctgaagtccgtggtgtacctggccatcatcagcttcagcctgctgcggagaaccgccttctgctgcaacggcgagaagtctagggccaagcgatctggatctggagcaacaaacttctcactactcaaacaagcaggtgacgtggaggagaatcccgggcctactagtatggactggatttggcgcatccttttccttgtcggcgctgctaccggcgcgcattccttcgaacaagttcagcttcaacagcctggcgctgagctggtcaaacctggcgcttctgtgaagatgagctgcaaagccagcggctacgccttcagcagctactggatcaactggatgaagcagaaacccggccagggactcgaatggatcggccaaatctatcccggcgacggcgacaccaactacaacggcaagttcaagggcagagccacactgaccgccgatacctctagcagcacagcctacatgcagctgagcagcctgaccagcgaagatagcgccgtgtacttctgtgcccggtccatcacaacagtcgtgggctgcgctatggactattggggccagggaacaagcgtgaccgtgtctagtacgcgtgcctctacaaagggaccctccgtgtttcctctggctcccagcagcaagtctacaagcggaggaacagccgctctgggctgcctggtcaaggattactttcccgagcctgtgaccgtgtcctggaatagcggagcactgacaagcggcgtgcacacctttccagccgtgctgcaaagcagcggcctgtactctctgagcagcgtggtcacagtgcctagctctagcctgggcacccagacctacatctgcaatgtgaaccacaagcctagcaacaccaaggtggacaagagagtggaacccaagagctgtatccccgaggacacattcttcccaagccccgagagcagctgcgacgtgaagctggtggaaaagagcttcgagacagacaccaacctgaacttccagaacctgagcgtgatcggcttcagaatcctgctgctgaaagtggccggctttaacctgctgatgaccctgcggctgtggtccagc

SEQ ID NO: 32259 - DNA, 1878 bp, synthetic construct
  source 1..1878: mol_type = other DNA
atggccttaccagtgaccgccttgctcctgccgctggccttgctgctccacgccgccaggccggacatccagatgacacagagccctagcagcctgtctgccagcgtgggagacagagtgaccatcacatgcaaggccagcgaccacatcaacaactggctggcctggtatcagcagaagcctggacaggcccctaagctgctgatctacggcgctaccacactggaaacaggcgtgcccagcagattttctggcagcggctctggcaccgactacaccctgacaatatccagcctccagcctgaggacttcgccacctactactgtcagcagagctggaacaccccttggacattcggccagggcaccaagctggaaatcaagagactcgagggacagcctaaggccaatcctaccgtgacactgttccctccaagcagcgaagaactccaggccaacaaggccacacttgtgtgcctgatctccgacttctaccctggggctgtgacagtggcttggaaggccgatggatctcctgtgaaagccggcgtggaaaccaccaagccatccaagcagagcaacaacaaatacgccgccagctcctacctgagcctgacacctgagcagtggaagtcccacagatcctacagctgccaagtgacccacgaaggcagcaccgtggaaaagacagtggcccctacagagtgcagcggcagagccgattgcggctttaccagcgagagctaccagcagggcgtgctgagcgccaccatcctgtacgagatcctgctgggcaaggccaccctgtacgccgtgctggtgtctgccctggtgctgatggctatggtcaagcggaaggacagccggggaagggccaagcgatctggatctggagcaacaaacttctcactactcaaacaagcaggtgacgtggaggagaatcccgggcctactagtatggactggatttggcgcatccttttccttgtcggcgctgctaccggcgcgcattccttcgaacaagttcagcttcaacagcctggcgctgagctggtcaaacctggcgcttctgtgaagatgagctgcaaagccagcggctacgccttcagcagctactggatcaactggatgaagcagaaacccggccagggactcgaatggatcggccaaatctatcccggcgacggcgacaccaactacaacggcaagttcaagggcagagccacactgaccgccgatacctctagcagcacagcctacatgcagctgagcagcctgaccagcgaagatagcgccgtgtacttctgtgcccggtccatcacaacagtcgtgggctgcgctatggactattggggccagggaacaagcgtgaccgtgtctagtacgcgtgcctctacaaagggaccctccgtgtttcctctggctcccagcagcaagtctacaagcggaggaacagccgctctgggctgcctggtcaaggattactttcccgagcctgtgaccgtgtcctggaatagcggagcactgacaagcggcgtgcacacctttccagccgtgctgcaaagcagcggcctgtactctctgagcagcgtggtcacagtgcctagctctagcctgggcacccagacctacatctgcaatgtgaaccacaagcctagcaacaccaaggtggacaagagagtggaacccaagagctgtatccccgaggacacattcttcccaagccccgagagcagctgcgacgtgaagctggtggaaaagagcttcgagacagacaccaacctgaacttccagaacctgagcgtgatcggcctgcggatgctgttcgccaaaaccgtggccgtgaacttcctgctgaccgccaagctgttcttcctc

SEQ ID NO: 32260 - DNA, 1878 bp, synthetic construct
  source 1..1878: mol_type = other DNA
atggccttaccagtgaccgccttgctcctgccgctggccttgctgctccacgccgccaggccggacatccagatgacacagagccctagcagcctgtctgccagcgtgggagacagagtgaccatcacatgcaaggccagcgaccacatcaacaactggctggcctggtatcagcagaagcctggacaggcccctaagctgctgatctacggcgctaccacactggaaacaggcgtgcccagcagattttctggcagcggctctggcaccgactacaccctgacaatatccagcctccagcctgaggacttcgccacctactactgtcagcagagctggaacaccccttggacattcggccagggcaccaagctggaaatcaagagactcgagggacagcctaaggccaatcctaccgtgacactgttccctccaagcagcgaagaactccaggccaacaaggccacacttgtgtgcctgatctccgacttctaccctggggctgtgacagtggcttggaaggccgatggatctcctgtgaaagccggcgtggaaaccaccaagccatccaagcagagcaacaacaaatacgccgccagctcctacctgagcctgacacctgagcagtggaagtcccacagatcctacagctgccaagtgacccacgaaggcagcaccgtggaaaagacagtggcccctacagagtgcagcggcagagccgattgcggctttaccagcgagagctaccagcagggcgtgctgagcgccaccatcctgtacgagatcctgctgggcaaggccaccctgtacgccgtgctggtgtctgccctggtgctgatggctatggtcaagcggaaggacagccggggaagggccaagcgatctggatctggagcaacaaacttctcactactcaaacaagcaggtgacgtggaggagaatcccgggcctactagtatggactggatttggcgcatccttttccttgtcggcgctgctaccggcgcgcattccttcgaacaagttcagcttcaacagcctggcgctgagctggtcaaacctggcgcttctgtgaagatgagctgcaaagccagcggctacgccttcagcagctactggatcaactggatgaagcagaaacccggccagggactcgaatggatcggccaaatctatcccggcgacggcgacaccaactacaacggcaagttcaagggcagagccacactgaccgccgatacctctagcagcacagcctacatgcagctgagcagcctgaccagcgaagatagcgccgtgtacttctgtgcccggtccatcacaacagtcgtgggctgcgctatggactattggggccagggaacaagcgtgaccgtgtctagtacgcgtgcctctacaaagggaccctccgtgtttcctctggctcccagcagcaagtctacaagcggaggaacagccgctctgggctgcctggtcaaggattactttcccgagcctgtgaccgtgtcctggaatagcggagcactgacaagcggcgtgcacacctttccagccgtgctgcaaagcagcggcctgtactctctgagcagcgtggtcacagtgcctagctctagcctgggcacccagacctacatctgcaatgtgaaccacaagcctagcaacaccaaggtggacaagagagtggaacccaagagctgtatccccgaggacacattcttcccaagccccgagagcagctgcgacgtgaagctggtggaaaagagcttcgagacagacaccaacctgaacttccagaacctgagcgtgctgggcctgcggatgctgttcgccaaaaccgtggccgtgaacttcctgctgaccgccaagctgttcttcctc

SEQ ID NO: 32261 - DNA, 1878 bp, synthetic construct
  source 1..1878: mol_type = other DNA
atggccttaccagtgaccgccttgctcctgccgctggccttgctgctccacgccgccaggccggacatccagatgacacagagccctagcagcctgtctgccagcgtgggagacagagtgaccatcacatgcaaggccagcgaccacatcaacaactggctggcctggtatcagcagaagcctggacaggcccctaagctgctgatctacggcgctaccacactggaaacaggcgtgcccagcagattttctggcagcggctctggcaccgactacaccctgacaatatccagcctccagcctgaggacttcgccacctactactgtcagcagagctggaacaccccttggacattcggccagggcaccaagctggaaatcaagagactcgagggacagcctaaggccaatcctaccgtgacactgttccctccaagcagcgaagaactccaggccaacaaggccacacttgtgtgcctgatctccgacttctaccctggggctgtgacagtggcttggaaggccgatggatctcctgtgaaagccggcgtggaaaccaccaagccatccaagcagagcaacaacaaatacgccgccagctcctacctgagcctgacacctgagcagtggaagtcccacagatcctacagctgccaagtgacccacgaaggcagcaccgtggaaaagacagtggcccctacagagtgcagcggcagagccgattgcggctttaccagcgagagctaccagcagggcgtgctgagcgccaccatcctgtacgagatcctgctgggcaaggccaccctgtacgccgtgctggtgtctgccctggtgctgatggctatggtcaagcggaaggacagccggggaagggccaagcgatctggatctggagcaacaaacttctcactactcaaacaagcaggtgacgtggaggagaatcccgggcctactagtatggactggatttggcgcatccttttccttgtcggcgctgctaccggcgcgcattccttcgaacaagttcagcttcaacagcctggcgctgagctggtcaaacctggcgcttctgtgaagatgagctgcaaagccagcggctacgccttcagcagctactggatcaactggatgaagcagaaacccggccagggactcgaatggatcggccaaatctatcccggcgacggcgacaccaactacaacggcaagttcaagggcagagccacactgaccgccgatacctctagcagcacagcctacatgcagctgagcagcctgaccagcgaagatagcgccgtgtacttctgtgcccggtccatcacaacagtcgtgggctgcgctatggactattggggccagggaacaagcgtgaccgtgtctagtacgcgtgcctctacaaagggaccctccgtgtttcctctggctcccagcagcaagtctacaagcggaggaacagccgctctgggctgcctggtcaaggattactttcccgagcctgtgaccgtgtcctggaatagcggagcactgacaagcggcgtgcacacctttccagccgtgctgcaaagcagcggcctgtactctctgagcagcgtggtcacagtgcctagctctagcctgggcacccagacctacatctgcaatgtgaaccacaagcctagcaacaccaaggtggacaagagagtggaacccaagagctgtatccccgaggacacattcttcccaagccccgagagcagctgcgacgtgaagctggtggaaaagagcttcgagacagacaccaacctgaacttccagaacctgaccgtgctgggcctgcggatgctgttcgccaaaaccgtggccgtgaacttcctgctgaccgccaagctgttcttcctc

SEQ ID NO: 32262 - DNA, 1878 bp, synthetic construct; identical to SEQ ID NO: 32261
  source 1..1878: mol_type = other DNA

SEQ ID NO: 32263 - DNA, 1884 bp, synthetic construct
  source 1..1884: mol_type = other DNA
atggccttaccagtgaccgccttgctcctgccgctggccttgctgctccacgccgccaggccggacatccagatgacacagagccctagcagcctgtctgccagcgtgggagacagagtgaccatcacatgcaaggccagcgaccacatcaacaactggctggcctggtatcagcagaagcctggacaggcccctaagctgctgatctacggcgctaccacactggaaacaggcgtgcccagcagattttctggcagcggctctggcaccgactacaccctgacaatatccagcctccagcctgaggacttcgccacctactactgtcagcagagctggaacaccccttggacattcggccagggcaccaagctggaaatcaagagactcgagggacagcctaaggccaatcctaccgtgacactgttccctccaagcagcgaagaactccaggccaacaaggccacacttgtgtgcctgatctccgacttctaccctggggctgtgacagtggcttggaaggccgatggatctcctgtgaaagccggcgtggaaaccaccaagccatccaagcagagcaacaacaaatacgccgccagctcctacctgagcctgacacctgagcagtggaagtcccacagatcctacagctgccaagtgacccacgaaggcagcaccgtggaaaagacagtggcccctacagagtgcagcggcagagccgattgcggctttaccagcgagagctaccagcagggcgtgctgagcgccaccatcctgtacgagatcctgctgggcaaggccaccctgtacgccgtgctggtgtctgccctggtgctgatggctatggtcaagcggaaggacagccggggaagggccaagcgatctggatctggagcaacaaacttctcactactcaaacaagcaggtgacgtggaggagaatcccgggcctactagtatggactggatttggcgcatccttttccttgtcggcgctgctaccggcgcgcattccttcgaacaagttcagcttcaacagcctggcgctgagctggtcaaacctggcgcttctgtgaagatgagctgcaaagccagcggctacgccttcagcagctactggatcaactggatgaagcagaaacccggccagggactcgaatggatcggccaaatctatcccggcgacggcgacaccaactacaacggcaagttcaagggcagagccacactgaccgccgatacctctagcagcacagcctacatgcagctgagcagcctgaccagcgaagatagcgccgtgtacttctgtgcccggtccatcacaacagtcgtgggctgcgctatggactattggggccagggaacaagcgtgaccgtgtctagtacgcgtgcctctacaaagggaccctccgtgtttcctctggctcccagcagcaagtctacaagcggaggaacagccgctctgggctgcctggtcaaggattactttcccgagcctgtgaccgtgtcctggaatagcggagcactgacaagcggcgtgcacacctttccagccgtgctgcaaagcagcggcctgtactctctgagcagcgtggtcacagtgcctagctctagcctgggcacccagacctacatctgcaatgtgaaccacaagcctagcaacaccaaggtggacaagagagtggaacccaagagctgtatcttcaaagagacaaacgccacctacccctccagcgacgtgccctgtgacgccaccctgaccgagaagtccttcgagacagacatgaacctcaacttccagaacctgaccgtgctgggcctgcggatgctgttcgccaaaaccgtggccgtgaacttcctgctgaccgccaagctgttcttcctc

SEQ ID NO: 32264 - DNA, 1941 bp, synthetic construct
  source 1..1941: mol_type = other DNA
atggccttaccagtgaccgccttgctcctgccgctggccttgctgctccacgccgccaggccggacatccagatgacacagagccctagcagcctgtctgccagcgtgggagacagagtgaccatcacatgcaaggccagcgaccacatcaacaactggctggcctggtatcagcagaagcctggacaggcccctaagctgctgatctacggcgctaccacactggaaacaggcgtgcccagcagattttctggcagcggctctggcaccgactacaccctgacaatatccagcctccagcctgaggacttcgccacctactactgtcagcagagctggaacaccccttggacattcggccagggcaccaagctggaaatcaagagactcgagggacagcctaaggccaatcctaccgtgacactgttccctccaagcagcgaagaactccaggccaacaaggccacacttgtgtgcctgatctccgacttctaccctggggctgtgacagtggcttggaaggccgatggatctcctgtgaaagccggcgtggaaaccaccaagccatccaagcagagcaacaacaaatacgccgccagctcctacctgagcctgacacctgagcagtggaagtcccacagatcctacagctgccaagtgacccacgaaggcagcaccgtggaaaagacagtggcccctacagagtgcagccccatcaagaccgatgtgattacaatggaccccaaggacaactgctccaaggacgccaacgataccctgctgctccagctgaccaacaccagcgcctactacatgtacgagatcctgctgggcaaggccaccctgtacgccgtgctggtgtctgccctggtgctgatggctatggtcaagcggaaggacagccggggaagggccaagcgatctggatctggagcaacaaacttctcactactcaaacaagcaggtgacgtggaggagaatcccgggcctactagtatggactggatttggcgcatccttttccttgtcggcgctgctaccggcgcgcattccttcgaacaagttcagcttcaacagcctggcgctgagctggtcaaacctggcgcttctgtgaagatgagctgcaaagccagcggctacgccttcagcagctactggatcaactggatgaagcagaaacccggccagggactcgaatggatcggccaaatctatcccggcgacggcgacaccaactacaacggcaagttcaagggcagagccacactgaccgccgatacctctagcagcacagcctacatgcagctgagcagcctgaccagcgaagatagcgccgtgtacttctgtgcccggtccatcacaacagtcgtgggctgcgctatggactattggggccagggaacaagcgtgaccgtgtctagtacgcgtgcctctacaaagggaccctccgtgtttcctctggctcccagcagcaagtctacaagcggaggaacagccgctctgggctgcctggtcaaggattactttcccgagcctgtgaccgtgtcctggaatagcggagcactgacaagcggcgtgcacacctttccagccgtgctgcaaagcagcggcctgtactctctgagcagcgtggtcacagtgcctagctctagcctgggcacccagacctacatctgcaatgtgaaccacaagcctagcaacaccaaggtggacaagagagtggaacccaagagctgtgaagtgaaaaccgactccaccgaccacgtgaagcccaaagagacagagaacaccaagcagcccagcaagagctgccacaagcccaaggccatcgtgcacaccgagaaagtgaacatgatgagcctgaccgtgctgggcctgcggatgctgttcgccaaaaccgtggccgtgaacttcctgctgaccgccaagctgttcttcctc

SEQ ID NO: 32265 - DNA, 1941 bp, synthetic construct
  source 1..1941: mol_type = other DNA
atggccttaccagtgaccgccttgctcctgccgctggccttgctgctccacgccgccaggccggacatccagatgacacagagccctagcagcctgtctgccagcgtgggagacagagtgaccatcacatgcaaggccagcgaccacatcaacaactggctggcctggtatcagcagaagcctggacaggcccctaagctgctgatctacggcgctaccacactggaaacaggcgtgcccagcagattttctggcagcggctctggcaccgactacaccctgacaatatccagcctccagcctgaggacttcgccacctactactgtcagcagagctggaacaccccttggacattcggccagggcaccaagctggaaatcaagagactcgagggacagcctaaggccaatcctaccgtgacactgttccctccaagcagcgaagaactccaggccaacaaggccacacttgtgtgcctgatctccgacttctaccctggggctgtgacagtggcttggaaggccgatggatctcctgtgaaagccggcgtggaaaccaccaagccatccaagcagagcaacaacaaatacgccgccagctcctacctgagcctgacacctgagcagtggaagtcccacagatcctacagctgccaagtgacccacgaaggcagcaccgtggaaaagacagtggcccctacagagtgcagccccatcaagaccgatgtgattacaatggaccccaaggacaactgctccaaggacgccaacgataccctgctgctccagctgaccaacaccagcgccaccatcctgtacgagatcctgctgggcaaggccaccctgtacgccgtgctggtgtctgccctggtgctgatggctatggtcaagcggaaggacagccggggaagggccaagcgatctggatctggagcaacaaacttctcactactcaaacaagcaggtgacgtggaggagaatcccgggcctactagtatggactggatttggcgcatccttttccttgtcggcgctgctaccggcgcgcattccttcgaacaagttcagcttcaacagcctggcgctgagctggtcaaacctggcgcttctgtgaagatgagctgcaaagccagcggctacgccttcagcagctactggatcaactggatgaagcagaaacccggccagggactcgaatggatcggccaaatctatcccggcgacggcgacaccaactacaacggcaagttcaagggcagagccacactgaccgccgatacctctagcagcacagcctacatgcagctgagcagcctgaccagcgaagatagcgccgtgtacttctgtgcccggtccatcacaacagtcgtgggctgcgctatggactattggggccagggaacaagcgtgaccgtgtctagtacgcgtgcctctacaaagggaccctccgtgtttcctctggctcccagcagcaagtctacaagcggaggaacagccgctctgggctgcctggtcaaggattactttcccgagcctgtgaccgtgtcctggaatagcggagcactgacaagcggcgtgcacacctttccagccgtgctgcaaagcagcggcctgtactctctgagcagcgtggtcacagtgcctagctctagcctgggcacccagacctacatctgcaatgtgaaccacaagcctagcaacaccaaggtggacaagagagtggaacccaagagctgtgaagtgaaaaccgactccaccgaccacgtgaagcccaaagagacagagaacaccaagcagcccagcaagagctgccacaagcccaaggccatcgtgcacaccgagaaagtgaacatgatgagcctgaccgtgctgggcctgcggatgctgttcgccaaaaccgtggccgtgaacttcctgctgaccgccaagctgttcttcctc

SEQ ID NO: 32266 - DNA, 1944 bp, synthetic construct
  source 1..1944: mol_type = other DNA
atggccttaccagtgaccgccttgctcctgccgctggccttgctgctccacgccgccaggccggacatccagatgacacagagccctagcagcctgtctgccagcgtgggagacagagtgaccatcacatgcaaggccagcgaccacatcaacaactggctggcctggtatcagcagaagcctggacaggcccctaagctgctgatctacggcgctaccacactggaaacaggcgtgcccagcagattttctggcagcggctctggcaccgactacaccctgacaatatccagcctccagcctgaggacttcgccacctactactgtcagcagagctggaacaccccttggacattcggccagggcaccaagctggaaatcaagagactcgagggacagcctaaggccaatcctaccgtgacactgttccctccaagcagcgaagaactccaggccaacaaggccacacttgtgtgcctgatctccgacttctaccctggggctgtgacagtggcttggaaggccgatggatctcctgtgaaagccggcgtggaaaccaccaagccatccaagcagagcaacaacaaatacgccgccagctcctacctgagcctgacacctgagcagtggaagtcccacagatcctacagctgccaagtgacccacgaaggcagcaccgtggaaaagacagtggcccctacagagtgcagccccatcaagaccgatgtgattacaatggaccccaaggacaactgctccaaggacgccaacgataccctgctgctccagctgaccaacaccagcgcctactacacatacctgctgctgctcctcaagagcgtgatctacctggccatcatcagcttcagcctgctgcggagaacaagcgtgtgcggcaacgagaagaagtccagggccaagcgatctggatctggagcaacaaacttctcactactcaaacaagcaggtgacgtggaggagaatcccgggcctactagtatggactggatttggcgcatccttttccttgtcggcgctgctaccggcgcgcattccttcgaacaagttcagcttcaacagcctggcgctgagctggtcaaacctggcgcttctgtgaagatgagctgcaaagccagcggctacgccttcagcagctactggatcaactggatgaagcagaaacccggccagggactcgaatggatcggccaaatctatcccggcgacggcgacaccaactacaacggcaagttcaagggcagagccacactgaccgccgatacctctagcagcacagcctacatgcagctgagcagcctgaccagcgaagatagcgccgtgtacttctgtgcccggtccatcacaacagtcgtgggctgcgctatggactattggggccagggaacaagcgtgaccgtgtctagtacgcgtgcctctacaaagggaccctccgtgtttcctctggctcccagcagcaagtctacaagcggaggaacagccgctctgggctgcctggtcaaggattactttcccgagcctgtgaccgtgtcctggaatagcggagcactgacaagcggcgtgcacacctttccagccgtgctgcaaagcagcggcctgtactctctgagcagcgtggtcacagtgcctagctctagcctgggcacccagacctacatctgcaatgtgaaccacaagcctagcaacaccaaggtggacaagagagtggaacccaagagctgtgaagtgaaaaccgactccaccgaccacgtgaagcccaaagagacagagaacaccaagcagcccagcaagagctgccacaagcccaaggccatcgtgcacaccgagaaagtgaacatgatgagcctgaccgtgctgggcctgcggatgctgttcgccaaaaccgtggccgtgaacttcctgctgaccgccaagctgttcttcctc

SEQ ID NO: 32267 - DNA, 1941 bp, synthetic construct
  source 1..1941: mol_type = other DNA
atggccttaccagtgaccgccttgctcctgccgctggccttgctgctccacgccgccaggccggacatccagatgacacagagccctagcagcctgtctgccagcgtgggagacagagtgaccatcacatgcaaggccagcgaccacatcaacaactggctggcctggtatcagcagaagcctggacaggcccctaagctgctgatctacggcgctaccacactggaaacaggcgtgcccagcagattttctggcagcggctctggcaccgactacaccctgacaatatccagcctccagcctgaggacttcgccacctactactgtcagcagagctggaacaccccttggacattcggccagggcaccaagctggaaatcaagagactcgagggacagcctaaggccaatcctaccgtgacactgttccctccaagcagcgaagaactccaggccaacaaggccacacttgtgtgcctgatctccgacttctaccctggggctgtgacagtggcttggaaggccgatggatctcctgtgaaagccggcgtggaaaccaccaagccatccaagcagagcaacaacaaatacgccgccagctcctacctgagcctgacacctgagcagtggaagtcccacagatcctacagctgccaagtgacccacgaaggcagcaccgtggaaaagacagtggcccctacagagtgcagcagcatcaagaaagtggccgtgtccaccaagccaaccacctgttggcaggacaagaacgacgtgctccagctccagttcaccatcaccagcgcctactacacatacctgctgctgctcctcaagagcgtgatctacctggccatcatcagcttcagcctgctgcggagaacaagcgtgtgcggcaacgagaagaagtccagggccaagcgatctggatctggagcaacaaacttctcactactcaaacaagcaggtgacgtggaggagaatcccgggcctactagtatggactggatttggcgcatccttttccttgtcggcgctgctaccggcgcgcattccttcgaacaagttcagcttcaacagcctggcgctgagctggtcaaacctggcgcttctgtgaagatgagctgcaaagccagcggctacgccttcagcagctactggatcaactggatgaagcagaaacccggccagggactcgaatggatcggccaaatctatcccggcgacggcgacaccaactacaacggcaagttcaagggcagagccacactgaccgccgatacctctagcagcacagcctacatgcagctgagcagcctgaccagcgaagatagcgccgtgtacttctgtgcccggtccatcacaacagtcgtgggctgcgctatggactattggggccagggaacaagcgtgaccgtgtctagtacgcgtgcctctacaaagggaccctccgtgtttcctctggctcccagcagcaagtctacaagcggaggaacagccgctctgggctgcctggtcaaggattactttcccgagcctgtgaccgtgtcctggaatagcggagcactgacaagcggcgtgcacacctttccagccgtgctgcaaagcagcggcctgtactctctgagcagcgtggtcacagtgcctagctctagcctgggcacccagacctacatctgcaatgtgaaccacaagcctagcaacaccaaggtggacaagagagtggaacccaagagctgtgaagtgaaaaccgactccaccgaccacgtgaagcccaaagagacagagaacaccaagcagcccagcaagagctgccacaagcccaaggccatcgtgcacaccgagaaagtgaacatgatgagcctgaccgtgctgggcctgcggatgctgttcgccaaaaccgtggccgtgaacttcctgctgaccgccaagctgttcttcctc

SEQ ID NO: 32268 - DNA, 1944 bp, synthetic construct
  source 1..1944: mol_type = other DNA
atggccttaccagtgaccgccttgctcctgccgctggccttgctgctccacgccgccaggccggacatccagatgacacagagccctagcagcctgtctgccagcgtgggagacagagtgaccatcacatgcaaggccagcgaccacatcaacaactggctggcctggtatcagcagaagcctggacaggcccctaagctgctgatctacggcgctaccacactggaaacaggcgtgcccagcagattttctggcagcggctctggcaccgactacaccctgacaatatccagcctccagcctgaggacttcgccacctactactgtcagcagagctggaacaccccttggacattcggccagggcaccaagctggaaatcaagagactcgagggacagcctaaggccaatcctaccgtgacactgttccctccaagcagcgaagaactccaggccaacaaggccacacttgtgtgcctgatctccgacttctaccctggggctgtgacagtggcttggaaggccgatggatctcctgtgaaagccggcgtggaaaccaccaagccatccaagcagagcaacaacaaatacgccgccagctcctacctgagcctgacacctgagcagtggaagtcccacagatcctacagctgccaagtgacccacgaaggcagcaccgtggaaaagacagtggcccctacagagtgcagccccatcaagaccgatgtgattacaatggaccccaaggacaactgctccaaggacgccaacgataccctgctgctccagctgaccaacaccagcgcctactacatgtacttgttgctgctgctgaagtccgtggtgtacttcgccatcatcacatgctgcctgctgcggagaaccgccttctgctgcaacggcgagaagtctagggccaagcgatctggatctggagcaacaaacttctcactactcaaacaagcaggtgacgtggaggagaatcccgggcctactagtatggactggatttggcgcatccttttccttgtcggcgctgctaccggcgcgcattccttcgaacaagttcagcttcaacagcctggcgctgagctggtcaaacctggcgcttctgtgaagatgagctgcaaagccagcggctacgccttcagcagctactggatcaactggatgaagcagaaacccggccagggactcgaatggatcggccaaatctatcccggcgacggcgacaccaactacaacggcaagttcaagggcagagccacactgaccgccgatacctctagcagcacagcctacatgcagctgagcagcctgaccagcgaagatagcgccgtgtacttctgtgcccggtccatcacaacagtcgtgggctgcgctatggactattggggccagggaacaagcgtgaccgtgtctagtacgcgtgcctctacaaagggaccctccgtgtttcctctggctcccagcagcaagtctacaagcggaggaacagccgctctgggctgcctggtcaaggattactttcccgagcctgtgaccgtgtcctggaatagcggagcactgacaagcggcgtgcacacctttccagccgtgctgcaaagcagcggcctgtactctctgagcagcgtggtcacagtgcctagctctagcctgggcacccagacctacatctgcaatgtgaaccacaagcctagcaacaccaaggtggacaagagagtggaacccaagagctgtgaagtgaaaaccgactccaccgaccacgtgaagcccaaagagacagagaacaccaagcagcccagcaagagctgccacaagcccaaggccatcgtgcacaccgagaaagtgaacatgatgagcctgaccgtgctgggcttcagaatcctgctgctgaaagtggccggctttaacctgctgatgaccctgcggctgtggtccagc

SEQ ID NO: 32269 - DNA, 1944 bp, synthetic construct
  source 1..1944: mol_type = other DNA
atggccttaccagtgaccgccttgctcctgccgctggccttgctgctccacgccgccaggccggacatccagatgacacagagccctagcagcctgtctgccagcgtgggagacagagtgaccatcacatgcaaggccagcgaccacatcaacaactggctggcctggtatcagcagaagcctggacaggcccctaagctgctgatctacggcgctaccacactggaaacaggcgtgcccagcagattttctggcagcggctctggcaccgactacaccctgacaatatccagcctccagcctgaggacttcgccacctactactgtcagcagagctggaacaccccttggacattcggccagggcaccaagctggaaatcaagagactcgagggacagcctaaggccaatcctaccgtgacactgttccctccaagcagcgaagaactccaggccaacaaggccacacttgtgtgcctgatctccgacttctaccctggggctgtgacagtggcttggaaggccgatggatctcctgtgaaagccggcgtggaaaccaccaagccatccaagcagagcaacaacaaatacgccgccagctcctacctgagcctgacacctgagcagtggaagtcccacagatcctacagctgccaagtgacccacgaaggcagcaccgtggaaaagacagtggcccctacagagtgcagccccatcaagaccgatgtgattacaatggaccccaaggacaactgctccaaggacgccaacgataccctgctgctccagctgaccaacaccagcgcctactacatgtacttgttgctgctgctgaagtccgtggtgtacttcgccatcatcacatgctgcctgctgcggagaaccgccttctgctgcaacggcgagaagtctagggccaagcgatctggatctggagcaacaaacttctcactactcaaacaagcaggtgacgtggaggagaatcccgggcctactagtatggactggatttggcgcatccttttccttgtcggcgctgctaccggcgcgcattccttcgaacaagttcagcttcaacagcctggcgctgagctggtcaaacctggcgcttctgtgaagatgagctgcaaagccagcggctacgccttcagcagctactggatcaactggatgaagcagaaacccggccagggactcgaatggatcggccaaatctatcccggcgacggcgacaccaactacaacggcaagttcaagggcagagccacactgaccgccgatacctctagcagcacagcctacatgcagctgagcagcctgaccagcgaagatagcgccgtgtacttctgtgcccggtccatcacaacagtcgtgggctgcgctatggactattggggccagggaacaagcgtgaccgtgtctagtacgcgtgcctctacaaagggaccctccgtgtttcctctggctcccagcagcaagtctacaagcggaggaacagccgctctgggctgcctggtcaaggattactttcccgagcctgtgaccgtgtcctggaatagcggagcactgacaagcggcgtgcacacctttccagccgtgctgcaaagcagcggcctgtactctctgagcagcgtggtcacagtgcctagctctagcctgggcacccagacctacatctgcaatgtgaaccacaagcctagcaacaccaaggtggacaagagagtggaacccaagagctgtgaagtgaaaaccgactccaccgaccacgtgaagcccaaagagacagagaacaccaagcagcccagcaagagctgccacaagcccaaggccatcgtgcacaccgagaaagtgaacatgatgagcctgaccgtgatcggcttcagaatcctgctgctgaaagtggccggctttaacctgctgatgaccctgcggctgtggtccagc

SEQ ID NO: 32270 - DNA, 1869 bp, synthetic construct
  source 1..1869: mol_type = other DNA
atggccttaccagtgaccgccttgctcctgccgctggccttgctgctccacgccgccaggccggacatccagttgacccagtcccccagctcactcagcgccagtgtgggggaccgggtgaccattacctgtaaagccagtcagagtgtggactatgacggggatagcttcctgaattggtatcagcagaagcctggcaaagccccaaagctgctgatctacgctgcatctaatctggagtcaggcgtgccttccaggttctccggtagtgggtctgggaccgatttcacattgaccatttcatccctccaacccgaggatttcgctacatattactgtcagcagtccaatgaggaccctctcacctttggccagggcaccaaagttgaaattaagagactcgaggacctgaagaacgtgttcccacctgaggtggccgtgttcgagcctagcgaggccgagatcagccacacccagaaagccaccctcgtgtgcctggctaccggcttctaccccgaccatgtggaactgtcttggtgggtcaacggcaaagaggtgcacagcggcgtgtgtaccgacccccagccactgaaagaacagcccgccctgaacgacagccggtactgcctgagcagcagactgagagtgtccgccaccttctggcagaacccccggaaccacttcagatgccaggtgcagttctacggcctgagcgagaacgacgagtggacccaggacagagccaagcccgtgacccagatcgtgtctgccgaagcctggggcagagccgattgcggctttaccagcgagagctaccagcagggcgtgctgagcgccaccatcctgtacgagatcctgctgggcaaggccaccctgtacgccgtgctggtgtctgccctggtgctgatggctatggtcaagcggaaggacagccggggaagggccaagcgatctggatctggagcaacaaacttctcactactcaaacaagcaggtgacgtggaggagaatcccgggcctactagtatggactggatttggcgcatccttttccttgtcggcgctgctaccggcgcgcattccttcgaagaagtccaacttgtggagtctggagggggcctggtgcagcccggcggctctctcagactgtcttgtgcggcaagcggctacaccttcacctcttactggatagaatgggtgaggcaggcacctggaaagggactggagtggattggagagattctgccaggagggggagatacaaattacaatgaaatcttcaaggggcgggccaccttttcagcggataccagcaagaatacagcttacctgcagatgaatagcctccgggcagaagataccgctgtttattattgcacgagacgggtgccaataagactggactattgggggcaagggactcttgtcaccgtcagttcaacgcgtatccagaaccctgatcctgccgtgtaccagctgcgggatagcaagagcagcgacaagagcgtgtgtctgttcaccgacttcgacagccagaccaacgtgtcccagagcaaggactccgacgtgtacatcaccgataagtgcgtgctggacatgcggagcatggacttcaagagcaactccgccgtggcctggtccaacaagtccgatttcgcctgcgccaacgccttcaacaacagcattatccccgaggacacattcttcccaagccccgagagcagctgcgacgtgaagctggtggaaaagagcttcgagacagacaccaacctgaacttccagaacctgagcgtgatcggcttcagaatcctgctgctgaaagtggccggctttaacctgctgatgaccctgcggctgtggtccagctaa

SEQ ID NO: 32271 - DNA, 2220 bp, synthetic construct
  source 1..2220: mol_type = other DNA
atggccttaccagtgaccgccttgctcctgccgctggccttgctgctccacgccgccaggccggacatccagttgacccagtcccccagctcactcagcgccagtgtgggggaccgggtgaccattacctgtaaagccagtcagagtgtggactatgacggggatagcttcctgaattggtatcagcagaagcctggcaaagccccaaagctgctgatctacgctgcatctaatctggagtcaggcgtgccttccaggttctccggtagtgggtctgggaccgatttcacattgaccatttcatccctccaacccgaggatttcgctacatattactgtcagcagtccaatgaggaccctctcacctttggccagggcaccaaagttgaaattaagagactcgaggacctgaagaacgtgttcccacctgaggtggccgtgttcgagcctagcgaggccgagatcagccacacccagaaagccaccctcgtgtgcctggctaccggcttctaccccgaccatgtggaactgtcttggtgggtcaacggcaaagaggtgcacagcggcgtgtctaccgacccccagccactgaaagaacagcccgccctgaacgacagccggtactgcctgagcagcagactgagagtgtccgccaccttctggcagaacccccggaaccacttcagatgccaggtgcagttctacggcctgagcgagaacgacgagtggacccaggacagagccaagcccgtgacccagatcgtgtctgccgaagcctggggcagagccgattgcggatcccagagcttcggcctgctggaccccaagctgtgctacctgctggatggcatcctgttcatctacggcgtgatcctgaccgccctgttcctgagagtgaagttcagcagaagcgccgacgcccctgcctaccagcagggacagaaccaactgtacaacgagctgaacctgggcagacgggaagagtacgacgtgctggacaagcggagaggcagggaccctgagatgggcggaaagccccggagaaagaacccccaggaaggactgtataacgaactccagaaagacaagatggccgaagcctacagcgagatcggcatgaagggcgagcggagaagaggcaagggccacgatggcctgtaccagggcctgagcaccgccaccaaggacacctatgacgccctgcacatgcaggccctgcctccaagaagggccaagcgatctggatctggagcaacaaacttctcactactcaaacaagcaggtgacgtggaggagaatcccgggcctactagtatggactggatttggcgcatccttttccttgtcggcgctgctaccggcgcgcattccttcgaagaagtccaacttgtggagtctggagggggcctggtgcagcccggcggctctctcagactgtcttgtgcggcaagcggctacaccttcacctcttactggatagaatgggtgaggcaggcacctggaaagggactggagtggattggagagattctgccaggagggggagatacaaattacaatgaaatcttcaaggggcgggccaccttttcagcggataccagcaagaatacagcttacctgcagatgaatagcctccgggcagaagataccgctgtttattattgcacgagacgggtgccaataagactggactattgggggcaagggactcttgtcaccgtcagttcaacgcgtatccagaaccctgatcctgccgtgtaccagctgcgggatagcaagagcagcgacaagagcgtgtgtctgttcaccgacttcgacagccagaccaacgtgtcccagagcaaggactccgacgtgtacatcaccgataagaccgtgctggacatgcggagcatggacttcaagagcaactccgccgtggcctggtccaacaagtccgatttcgcctgcgccaacgccttcaacaacagcattatccccgaggacacattcttcccaagccccgagagcagctgcggtaccatcactcaaggtttggcagtgtcaaccatctcatcattctttccacctggctaccaagtgtccttctgcctggtcatggtgctgctgttcgccgtggataccggcctgtacttcagcgtcaagaccaacatccggtccagcaccagagactggaaggaccacaagttcaagtggcggaaggaccctcaggacaagtaa

SEQ ID NO: 32272 - DNA, 1872 bp, synthetic construct
  source 1..1872: mol_type = other DNA
atggccttaccagtgaccgccttgctcctgccgctggccttgctgctccacgccgccaggccggacatccagttgacccagtcccccagctcactcagcgccagtgtgggggaccgggtgaccattacctgtaaagccagtcagagtgtggactatgacggggatagcttcctgaattggtatcagcagaagcctggcaaagccccaaagctgctgatctacgctgcatctaatctggagtcaggcgtgccttccaggttctccggtagtgggtctgggaccgatttcacattgaccatttcatccctccaacccgaggatttcgctacatattactgtcagcagtccaatgaggaccctctcacctttggccagggcaccaaagttgaaattaagagactcgaggacctgaagaacgtgttcccacctgaggtggccgtgttcgagcctagcgaggccgagatcagccacacccagaaagccaccctcgtgtgcctggctaccggcttctaccccgaccatgtggaactgtcttggtgggtcaacggcaaagaggtgcacagcggcgtgtgtaccgacccccagccactgaaagaacagcccgccctgaacgacagccggtactgcctgagcagcagactgagagtgtccgccaccttctggcagaacccccggaaccacttcagatgccaggtgcagttctacggcctgagcgagaacgacgagtggacccaggacagagccaagcccgtgacccagatcgtgtctgccgaagcctggggcagagccgattgcggctttaccagcgagagctaccagcagggcgtgctgagcgcctactacatgtacttgttgctgctgctgaagtccgtggtgtacttcgccatcatcacatgctgcctgctgcggagaaccgccttctgctgcaacggcgagaagtctagggccaagcgatctggatctggagcaacaaacttctcactactcaaacaagcaggtgacgtggaggagaatcccgggcctactagtatggactggatttggcgcatccttttccttgtcggcgctgctaccggcgcgcattccttcgaagaagtccaacttgtggagtctggagggggcctggtgcagcccggcggctctctcagactgtcttgtgcggcaagcggctacaccttcacctcttactggatagaatgggtgaggcaggcacctggaaagggactggagtggattggagagattctgccaggagggggagatacaaattacaatgaaatcttcaaggggcgggccaccttttcagcggataccagcaagaatacagcttacctgcagatgaatagcctccgggcagaagataccgctgtttattattgcacgagacgggtgccaataagactggactattgggggcaagggactcttgtcaccgtcagttcaacgcgtatccagaaccctgatcctgccgtgtaccagctgcgggatagcaagagcagcgacaagagcgtgtgtctgttcaccgacttcgacagccagaccaacgtgtcccagagcaaggactccgacgtgtacatcaccgataagtgcgtgctggacatgcggagcatggacttcaagagcaactccgccgtggcctggtccaacaagtccgatttcgcctgcgccaacgccttcaacaacagcattatccccgaggacacattcttcccaagccccgagagcagctgcgacgtgaagctggtggaaaagagcttcgagacagacaccaacctgaacttccagaacctgagcgtgatcggcttcagaatcctgctgctgaaagtggccggctttaacctgctgatgaccctgcggctgtggtccagctaa

SEQ ID NO: 32273 - DNA, 2223 bp, synthetic construct
  source 1..2223: mol_type = other DNA
atggccttaccagtgaccgccttgctcctgccgctggccttgctgctccacgccgccaggccggacgacatccagttgacccagtcccccagctcactcagcgccagtgtgggggaccgggtgaccattacctgtaaagccagtcagagtgtggactatgagggggatagcttcctgaattggtatcagcagaagcctggcaaagccccaaagctgctgatctacgctgcatctaatctggagtcaggcgtgccttctaggttctccggtagtgggtctgggaccgatttcacattgaccatttcatccctccaacccgaggatttcgctacatattactgtcagcagtccaatgaggaccctctcacctttggccagggcaccaaagttgaaattaagagactcgaggacctgaagaacgtgttcccacctgaggtggccgtgttcgagcctagcgaggccgagatcagccacacccagaaagccaccctcgtgtgcctggctaccggcttctaccccgaccatgtggaactgtcttggtgggtcaacggcaaagaggtgcacagcggcgtgtctaccgacccccagccactgaaagaacagcccgccctgaacgacagccggtactgcctgagcagcagactgagagtgtccgccaccttctggcagaacccccggaaccacttcagatgccaggtgcagttctacggcctgagcgagaacgacgagtggacccaggacagagccaagcccgtgacccagatcgtgtctgccgaagcctggggcagagccgattgcggatcccagagcttcggcctgctggaccccaagctgtgctacctgctggatggcatcctgttcatctacggcgtgatcctgaccgccctgttcctgagagtgaagttcagcagaagcgccgacgcccctgcctaccagcagggacagaaccaactgtacaacgagctgaacctgggcagacgggaagagtacgacgtgctggacaagcggagaggcagggaccctgagatgggcggaaagccccggagaaagaacccccaggaaggactgtataacgaactccagaaagacaagatggccgaagcctacagcgagatcggcatgaagggcgagcggagaagaggcaagggccacgatggcctgtaccagggcctgagcaccgccaccaaggacacctatgacgccctgcacatgcaggccctgcctccaagaagggccaagcgatctggatctggagcaacaaacttctcactactcaaacaagcaggtgacgtggaggagaatcccgggcctactagtatggactggatttggcgcatccttttccttgtcggcgctgctaccggcgcgcattccttcgaagaagtccaacttgtggagtctggagggggcctggtgcagcccggcggctctctcagactgtcttgtgcggcaagcggctacaccttcagctcttactggatagaatgggtgaggcaggcacctggaaagggactggagtggattggagagattctgccaggagggggagatacaaattacaatgaaatcttcaaggggcgggccaccttttcagcggataccagcaagaatacagcttacctgcagatgaatagcctccgggcagaagataccgctgtttattattgcacgagacgggtgccaataagactggactattgggggcaagggactcttgtcaccgtcagttcaacgcgtatccagaaccctgatcctgccgtgtaccagctgcgggatagcaagagcagcgacaagagcgtgtgtctgttcaccgacttcgacagccagaccaacgtgtcccagagcaaggactccgacgtgtacatcaccgataagaccgtgctggacatgcggagcatggacttcaagagcaactccgccgtggcctggtccaacaagtccgatttcgcctgcgccaacgccttcaacaacagcattatccccgaggacacattcttcccaagccccgagagcagctgcggtaccatcactcaaggtttggcagtgtcaaccatctcatcattctttccacctggctaccaagtgtccttctgcctggtcatggtgctgctgttcgccgtggataccggcctgtacttcagcgtcaagaccaacatccggtccagcaccagagactggaaggaccacaagttcaagtggcggaaggaccctcaggacaagtaa

SEQ ID NO: 32274 - DNA, 1872 bp, synthetic construct
  source 1..1872: mol_type = other DNA
atggccttaccagtgaccgccttgctcctgccgctggccttgctgctccacgccgccaggccggacgacatccagttgacccagtcccccagctcactcagcgccagtgtgggggaccgggtgaccattacctgtaaagccagtcagagtgtggactatgagggggatagcttcctgaattggtatcagcagaagcctggcaaagccccaaagctgctgatctacgctgcatctaatctggagtcaggcgtgccttctaggttctccggtagtgggtctgggaccgatttcacattgaccatttcatccctccaacccgaggatttcgctacatattactgtcagcagtccaatgaggaccctctcacctttggccagggcaccaaagttgaaattaagagactcgaggacctgaagaacgtgttcccacctgaggtggccgtgttcgagcctagcgaggccgagatcagccacacccagaaagccaccctcgtgtgcctggctaccggcttctaccccgaccatgtggaactgtcttggtgggtcaacggcaaagaggtgcacagcggcgtgtgtaccgacccccagccactgaaagaacagcccgccctgaacgacagccggtactgcctgagcagcagactgagagtgtccgccaccttctggcagaacccccggaaccacttcagatgccaggtgcagttctacggcctgagcgagaacgacgagtggacccaggacagagccaagcccgtgacccagatcgtgtctgccgaagcctggggcagagccgattgcggctttaccagcgagagctaccagcagggcgtgctgagcgccaccatcctgtacgagatcctgctgggcaaggccaccctgtacgccgtgctggtgtctgccctggtgctgatggctatggtcaagcggaaggacagccggggaagggccaagcgatctggatctggagcaacaaacttctcactactcaaacaagcaggtgacgtggaggagaatcccgggcctactagtatggactggatttggcgcatccttttccttgtcggcgctgctaccggcgcgcattccttcgaagaagtccaacttgtggagtctggagggggcctggtgcagcccggcggctctctcagactgtcttgtgcggcaagcggctacaccttcagctcttactggatagaatgggtgaggcaggcacctggaaagggactggagtggattggagagattctgccaggagggggagatacaaattacaatgaaatcttcaaggggcgggccaccttttcagcggataccagcaagaatacagcttacctgcagatgaatagcctccgggcagaagataccgctgtttattattgcacgagacgggtgccaataagactggactattgggggcaagggactcttgtcaccgtcagttcaacgcgtatccagaaccctgatcctgccgtgtaccagctgcgggatagcaagagcagcgacaagagcgtgtgtctgttcaccgacttcgacagccagaccaacgtgtcccagagcaaggactccgacgtgtacatcaccgataagtgcgtgctggacatgcggagcatggacttcaagagcaactccgccgtggcctggtccaacaagtccgatttcgcctgcgccaacgccttcaacaacagcattatccccgaggacacattcttcccaagccccgagagcagctgcgacgtgaagctggtggaaaagagcttcgagacagacaccaacctgaacttccagaacctgagcgtgatcggcttcagaatcctgctgctgaaagtggccggctttaacctgctgatgaccctgcggctgtggtccagctaa

SEQ ID NO: 32275 - DNA, 1875 bp, synthetic construct
  source 1..1875: mol_type = other DNA
atggccttaccagtgaccgccttgctcctgccgctggccttgctgctccacgccgccaggccggacgacatccagttgacccagtcccccagctcactcagcgccagtgtgggggaccgggtgaccattacctgtaaagccagtcagagtgtggactatgagggggatagcttcctgaattggtatcagcagaagcctggcaaagccccaaagctgctgatctacgctgcatctaatctggagtcaggcgtgccttctaggttctccggtagtgggtctgggaccgatttcacattgaccatttcatccctccaacccgaggatttcgctacatattactgtcagcagtccaatgaggaccctctcacctttggccagggcaccaaagttgaaattaagagactcgaggacctgaagaacgtgttcccacctgaggtggccgtgttcgagcctagcgaggccgagatcagccacacccagaaagccaccctcgtgtgcctggctaccggcttctaccccgaccatgtggaactgtcttggtgggtcaacggcaaagaggtgcacagcggcgtgtgtaccgacccccagccactgaaagaacagcccgccctgaacgacagccggtactgcctgagcagcagactgagagtgtccgccaccttctggcagaacccccggaaccacttcagatgccaggtgcagttctacggcctgagcgagaacgacgagtggacccaggacagagccaagcccgtgacccagatcgtgtctgccgaagcctggggcagagccgattgcggctttaccagcgagagctaccagcagggcgtgctgagcgcctactacatgtacttgttgctgctgctgaagtccgtggtgtacttcgccatcatcacatgctgcctgctgcggagaaccgccttctgctgcaacggcgagaagtctagggccaagcgatctggatctggagcaacaaacttctcactactcaaacaagcaggtgacgtggaggagaatcccgggcctactagtatggactggatttggcgcatccttttccttgtcggcgctgctaccggcgcgcattccttcgaagaagtccaacttgtggagtctggagggggcctggtgcagcccggcggctctctcagactgtcttgtgcggcaagcggctacaccttcagctcttactggatagaatgggtgaggcaggcacctggaaagggactggagtggattggagagattctgccaggagggggagatacaaattacaatgaaatcttcaaggggcgggccaccttttcagcggataccagcaagaatacagcttacctgcagatgaatagcctccgggcagaagataccgctgtttattattgcacgagacgggtgccaataagactggactattgggggcaagggactcttgtcaccgtcagttcaacgcgtatccagaaccctgatcctgccgtgtaccagctgcgggatagcaagagcagcgacaagagcgtgtgtctgttcaccgacttcgacagccagaccaacgtgtcccagagcaaggactccgacgtgtacatcaccgataagtgcgtgctggacatgcggagcatggacttcaagagcaactccgccgtggcctggtccaacaagtccgatttcgcctgcgccaacgccttcaacaacagcattatccccgaggacacattcttcccaagccccgagagcagctgcgacgtgaagctggtggaaaagagcttcgagacagacaccaacctgaacttccagaacctgagcgtgatcggcttcagaatcctgctgctgaaagtggccggctttaacctgctgatgaccctgcggctgtggtccagctaa

SEQ ID NO: 32276 - DNA, 1473 bp, synthetic construct
  source 1..1473: mol_type = other DNA
atggccttaccagtgaccgccttgctcctgccgctggccttgctgctccacgccgccaggccggacatccagttgacccagtcccccagctcactcagcgccagtgtgggggaccgggtgaccattacctgtaaagccagtcagagtgtggactatgacggggatagcttcctgaattggtatcagcagaagcctggcaaagccccaaagctgctgatctacgctgcatctaatctggagtcaggcgtgccttccaggttctccggtagtgggtctgggaccgatttcacattgaccatttcatccctccaacccgaggatttcgctacatattactgtcagcagtccaatgaggaccctctcacctttggccagggcaccaaagttgaaattaagagaggcggaggcggaagtggaggcggaggatctggcggcggaggctctgaagtccaacttgtggagtctggagggggcctggtgcagcccggcggctctctcagactgtcttgtgcggcaagcggctacaccttcacctcttactggatagaatgggtgaggcaggcacctggaaagggactggagtggattggagagattctgccaggagggggagatacaaattacaatgaaatcttcaaggggcgggccaccttttcagcggataccagcaagaatacagcttacctgcagatgaatagcctccgggcagaagataccgctgtttattattgcacgagacgggtgccaataagactggactattgggggcaagggactcttgtcaccgtcagttcaacgcgtaccacgacgccagcgccgcgaccaccaacaccggcgcccaccatcgcgtcgcagcccctgtccctgcgcccagaggcgtgccggccagcggcggggggcgcagtgcacacgagggggctggacttcgcctgtgacatctacatctgggcgcccttggccgggacttgtggggtccttctcctgtcactggttatcaccctttactgcaaacggggcagaaagaaactcctgtatatattcaaacaaccatttatgagaccagtacaaactactcaagaggaagatggctgtagctgccgatttccagaagaagaagaaggaggatgtgaactgagagtgaagttcagcaggagcgcagacgcccccgcgtaccagcagggccagaaccagctctataacgagctgaatctaggacgaagagaggagtacgatgttttggacaagagacgtggccgggaccctgagatggggggaaagccgagaaggaagaaccctcaggaaggcctgtacaatgaactgcagaaagataagatggcggaggcctacagtgagattgggatgaaaggcgagcgccggaggggcaaggggcacgatggcctttaccagggtctcagtacagccaccaaggacacctacgacgcccttcacatgcaggccctgccccctcgctaa

SEQ ID NO: 32277 - DNA, 1857 bp, synthetic construct
  source 1..1857: mol_type = other DNA
atggccttaccagtgaccgccttgctcctgccgctggccttgctgctccacgccgccaggccggacatcgtgatgacccagacccccctgaccctgagcgtgacaatcggacagcctgccagcatctcctgcaagagcagccagagcctgctggacagcgacggcaagacctacctgaactggctgctgcagaggccaggccagagccccgagagactgatctacctggtgtccaagctggactccggcgtgcccgatagattcacaggcagcggctccggcaccgacttcaccctgaagatcagccgggtggaagccgaggacctgggcgtgtactgttgttggcagggcacccacttcccttacaccttcggcggagggaccaaggtggaaatcaagctcgaggacctgaagaacgtgttcccacctgaggtggccgtgttcgagcctagcgaggccgagatcagccacacccagaaagccaccctcgtgtgcctggctaccggcttctaccccgaccatgtggaactgtcttggtgggtcaacggcaaagaggtgcacagcggcgtgtgtaccgacccccagccactgaaagaacagcccgccctgaacgacagccggtactgcctgagcagcagactgagagtgtccgccaccttctggcagaacccccggaaccacttcagatgccaggtgcagttctacggcctgagcgagaacgacgagtggacccaggacagagccaagcccgtgacccagatcgtgtctgccgaagcctggggcagagccgattgcggctttaccagcgagagctaccagcagggcgtgctgagcgccaccatcctgtacgagatcctgctgggcaaggccaccctgtacgccgtgctggtgtctgccctggtgctgatggctatggtcaagcggaaggacagccggggaagggccaagcgatctggatctggagcaacaaacttctcactactcaaacaagcaggtgacgtggaggagaatcccgggcctactagtatggactggatttggcgcatccttttccttgtcggcgctgctaccggcgcgcattccttcgaacaggtgcaactgcagcagcctggcgctgaacttgtgcggccaggcgcctctgtgaagctgagctgtaaagccagcggctacaccttcaccagctactggatgaactgggtcaagcagcgcccaggccagggcctggaatggatcggaatgatcgaccccagcgacagcgagacacactacaaccacatcttcaaggacaaggccaccctgaccgtggacaagtccagcagcacagcctacctgcaactgtccagcctgaccagcgaggacagcgccgtgtactactgcgcccggaacctgtatctgtggggccagggaacaagcgtgaccgtgtctagcacgcgtatccagaaccctgatcctgccgtgtaccagctgcgggatagcaagagcagcgacaagagcgtgtgtctgttcaccgacttcgacagccagaccaacgtgtcccagagcaaggactccgacgtgtacatcaccgataagtgcgtgctggacatgcggagcatggacttcaagagcaactccgccgtggcctggtccaacaagtccgatttcgcctgcgccaacgccttcaacaacagcattatccccgaggacacattcttcccaagccccgagagcagctgcgacgtgaagctggtggaaaagagcttcgagacagacaccaacctgaacttccagaacctgagcgtgatcggcttcagaatcctgctgctgaaagtggccggctttaacctgctgatgaccctgcggctgtggtccagctaa

SEQ ID NO: 32278 - DNA, 2208 bp, synthetic construct
  source 1..2208: mol_type = other DNA
atggccttaccagtgaccgccttgctcctgccgctggccttgctgctccacgccgccaggccggacatcgtgatgacccagacccccctgaccctgagcgtgacaatcggacagcctgccagcatctcctgcaagagcagccagagcctgctggacagcgacggcaagacctacctgaactggctgctgcagaggccaggccagagccccgagagactgatctacctggtgtccaagctggactccggcgtgcccgatagattcacaggcagcggctccggcaccgacttcaccctgaagatcagccgggtggaagccgaggacctgggcgtgtactgttgttggcagggcacccacttcccttacaccttcggcggagggaccaaggtggaaatcaagctcgaggacctgaagaacgtgttcccacctgaggtggccgtgttcgagcctagcgaggccgagatcagccacacccagaaagccaccctcgtgtgcctggctaccggcttctaccccgaccatgtggaactgtcttggtgggtcaacggcaaagaggtgcacagcggcgtgtctaccgacccccagccactgaaagaacagcccgccctgaacgacagccggtactgcctgagcagcagactgagagtgtccgccaccttctggcagaacccccggaaccacttcagatgccaggtgcagttctacggcctgagcgagaacgacgagtggacccaggacagagccaagcccgtgacccagatcgtgtctgccgaagcctggggcagagccgattgcggatcccagagcttcggcctgctggaccccaagctgtgctacctgctggatggcatcctgttcatctacggcgtgatcctgaccgccctgttcctgagagtgaagttcagcagaagcgccgacgcccctgcctaccagcagggacagaaccaactgtacaacgagctgaacctgggcagacgggaagagtacgacgtgctggacaagcggagaggcagggaccctgagatgggcggaaagccccggagaaagaacccccaggaaggactgtataacgaactccagaaagacaagatggccgaagcctacagcgagatcggcatgaagggcgagcggagaagaggcaagggccacgatggcctgtaccagggcctgagcaccgccaccaaggacacctatgacgccctgcacatgcaggccctgcctccaagaagggccaagcgatctggatctggagcaacaaacttctcactactcaaacaagcaggtgacgtggaggagaatcccgggcctactagtatggactggatttggcgcatccttttccttgtcggcgctgctaccggcgcgcattccttcgaacaggtgcaactgcagcagcctggcgctgaacttgtgcggccaggcgcctctgtgaagctgagctgtaaagccagcggctacaccttcaccagctactggatgaactgggtcaagcagcgcccaggccagggcctggaatggatcggaatgatcgaccccagcgacagcgagacacactacaaccacatcttcaaggacaaggccaccctgaccgtggacaagtccagcagcacagcctacctgcaactgtccagcctgaccagcgaggacagcgccgtgtactactgcgcccggaacctgtatctgtggggccagggaacaagcgtgaccgtgtctagcacgcgtatccagaaccctgatcctgccgtgtaccagctgcgggatagcaagagcagcgacaagagcgtgtgtctgttcaccgacttcgacagccagaccaacgtgtcccagagcaaggactccgacgtgtacatcaccgataagaccgtgctggacatgcggagcatggacttcaagagcaactccgccgtggcctggtccaacaagtccgatttcgcctgcgccaacgccttcaacaacagcattatccccgaggacacattcttcccaagccccgagagcagctgcggtaccatcactcaaggtttggcagtgtcaaccatctcatcattctttccacctggctaccaagtgtccttctgcctggtcatggtgctgctgttcgccgtggataccggcctgtacttcagcgtcaagaccaacatccggtccagcaccagagactggaaggaccacaagttcaagtggcggaaggacccccaggacaagtaa

SEQ ID NO: 32279 - DNA, 1464 bp, synthetic construct
  source 1..1464: mol_type = other DNA
atggccttaccagtgaccgccttgctcctgccgctggccttgctgctccacgccgccaggccggacatcgtgatgacccagacccccctgaccctgagcgtgacaatcggacagcctgccagcatctcctgcaagagcagccagagcctgctggacagcgacggcaagacctacctgaactggctgctgcagaggccaggccagagccccgagagactgatctacctggtgtccaagctggactccggcgtgcccgatagattcacaggcagcggctccggcaccgacttcaccctgaagatcagccgggtggaagccgaggacctgggcgtgtactgttgttggcagggcacccacttcccttacaccttcggcggagggaccaaggtggaaatcaagggcggcggaggcggaagtggaggcggaggatctggcggcggaggctctcaggtgcaactgcagcagcctggcgctgaacttgtgcggccaggcgcctctgtgaagctgagctgtaaagccagcggctacaccttcaccagctactggatgaactgggtcaagcagcgcccaggccagggcctggaatggatcggaatgatcgaccccagcgacagcgagacacactacaaccacatcttcaaggacaaggccaccctgaccgtggacaagtccagcagcacagcctacctgcaactgtccagcctgaccagcgaggacagcgccgtgtactactgcgcccggaacctgtatctgtggggccagggaacaagcgtgaccgtgtctagcacgcgtaccacgacgccagcgccgcgaccaccaacaccggcgcccaccatcgcgtcgcagcccctgtccctgcgcccagaggcgtgccggccagcggcggggggcgcagtgcacacgagggggctggacttcgcctgtgacatctacatctgggcgcccttggccgggacttgtggggtccttctcctgtcactggttatcaccctttactgcaaacggggcagaaagaaactcctgtatatattcaaacaaccatttatgagaccagtacaaactactcaagaggaagatggctgtagctgccgatttccagaagaagaagaaggaggatgtgaactgagagtgaagttcagcaggagcgcagacgcccccgcgtaccagcagggccagaaccagctctataacgagctgaatctaggacgaagagaggagtacgatgttttggacaagagacgtggccgggaccctgagatggggggaaagccgagaaggaagaaccctcaggaaggcctgtacaatgaactgcagaaagataagatggcggaggcctacagtgagattgggatgaaaggcgagcgccggaggggcaaggggcacgatggcctttaccagggtctcagtacagccaccaaggacacctacgacgcccttcacatgcaggccctgccccctcgctga

SEQ ID NO: 32280 - DNA, 1857 bp, synthetic construct
  source 1..1857: mol_type = other DNA
atggccttaccagtgaccgccttgctcctgccgctggccttgctgctccacgccgccaggccggacatcgtgatgacccagacccccctgaccctgagcgtgacaatcggacagcctgccagcatctcctgcaagagcagccagagcctgctggacagcgacggcaggacctacctgaactggctgctgcagaggccaggccagagccccgagagactgatctacctggtgtccaagctggactccggcgtgcccgatagattcacaggcagcggctccggcaccgacttcaccctgaagatcagccgggtggaagccgaggacctgggcgtgtactgttgtttccagggcacccacttccctttcaccttcggcggagggaccaaggtggaaatcaagctcgaggacctgaagaacgtgttcccacctgaggtggccgtgttcgagcctagcgaggccgagatcagccacacccagaaagccaccctcgtgtgcctggctaccggcttctaccccgaccatgtggaactgtcttggtgggtcaacggcaaagaggtgcacagcggcgtgtgtaccgacccccagccactgaaagaacagcccgccctgaacgacagccggtactgcctgagcagcagactgagagtgtccgccaccttctggcagaacccccggaaccacttcagatgccaggtgcagttctacggcctgagcgagaacgacgagtggacccaggacagagccaagcccgtgacccagatcgtgtctgccgaagcctggggcagagccgattgcggctttaccagcgagagctaccagcagggcgtgctgagcgccaccatcctgtacgagatcctgctgggcaaggccaccctgtacgccgtgctggtgtctgccctggtgctgatggctatggtcaagcggaaggacagccggggaagggccaagcgatctggatctggagcaacaaacttctcactactcaaacaagcaggtgacgtggaggagaatcccgggcctactagtatggactggatttggcgcatccttttccttgtcggcgctgctaccggcgcgcattccttcgaacaggtgcaactgcagcagcctggcgctgaacttgtgcggccaggcgcctctgtgaagctgagctgtaaagccagcggctacaccttcaccagctactggatgaactgggtcaagcagcgcccaggccagggcctggaatggatcggaatgatcgaccccagcgacagcgagacacactacaaccacatcttcaaggacaaggccaccctgaccgtggacaagtccagcagcacagcctacctgcaactgtccagcctgaccagcgaggacagcgccgtgtactactgcgcccggaacctgtatctgtggggccagggaacaagcgtgaccgtgtctagcacgcgtatccagaaccctgatcctgccgtgtaccagctgcgggatagcaagagcagcgacaagagcgtgtgtctgttcaccgacttcgacagccagaccaacgtgtcccagagcaaggactccgacgtgtacatcaccgataagtgcgtgctggacatgcggagcatggacttcaagagcaactccgccgtggcctggtccaacaagtccgatttcgcctgcgccaacgccttcaacaacagcattatccccgaggacacattcttcccaagccccgagagcagctgcgacgtgaagctggtggaaaagagcttcgagacagacaccaacctgaacttccagaacctgagcgtgatcggcttcagaatcctgctgctgaaagtggccggctttaacctgctgatgaccctgcggctgtggtccagctaa

SEQ ID NO: 32281 - DNA, 1857 bp, synthetic construct
  source 1..1857: mol_type = other DNA
atggccttaccagtgaccgccttgctcctgccgctggccttgctgctccacgccgccaggccggacatcgtgatgacccagacccccctgaccctgagcgtgacaatcggacagcctgccagcatctcctgcaagagcagccagagcctgctgaacagcgacggcaagacctacctgaactggctgctgcagaggccaggccagagccccgagagactgatctacctggtgtccaagctggactccggcgtgcccgatagattcacaggcagcggctccggcaccgacttcaccctgaagatcagccgggtggaagccgaggacctgggcgtgtactgttgtttccagggcacccacttcccttacaccttcggcggagggaccaaggtggaaatcaagctcgaggacctgaagaacgtgttcccacctgaggtggccgtgttcgagcctagcgaggccgagatcagccacacccagaaagccaccctcgtgtgcctggctaccggcttctaccccgaccatgtggaactgtcttggtgggtcaacggcaaagaggtgcacagcggcgtgtgtaccgacccccagccactgaaagaacagcccgccctgaacgacagccggtactgcctgagcagcagactgagagtgtccgccaccttctggcagaacccccggaaccacttcagatgccaggtgcagttctacggcctgagcgagaacgacgagtggacccaggacagagccaagcccgtgacccagatcgtgtctgccgaagcctggggcagagccgattgcggctttaccagcgagagctaccagcagggcgtgctgagcgccaccatcctgtacgagatcctgctgggcaaggccaccctgtacgccgtgctggtgtctgccctggtgctgatggctatggtcaagcggaaggacagccggggaagggccaagcgatctggatctggagcaacaaacttctcactactcaaacaagcaggtgacgtggaggagaatcccgggcctactagtatggactggatttggcgcatccttttccttgtcggcgctgctaccggcgcgcattccttcgaacaggtgcaactgcagcagcctggcgctgaacttgtgcggccaggcgcctctgtgaagctgagctgtaaagccagcggctacaccttcaccagctactggatgaactgggtcaagcagcgcccaggccagggcctggaatggatcggaatgatcgaccccagcgacagcgagacacactacaaccacatcttcaaggacaaggccaccctgaccgtggacaagtccagcagcacagcctacctgcaactgtccagcctgaccagcgaggacagcgccgtgtactactgcgcccggaacctgtatctgtggggccagggaacaagcgtgaccgtgtctagcacgcgtatccagaaccctgatcctgccgtgtaccagctgcgggatagcaagagcagcgacaagagcgtgtgtctgttcaccgacttcgacagccagaccaacgtgtcccagagcaaggactccgacgtgtacatcaccgataagtgcgtgctggacatgcggagcatggacttcaagagcaactccgccgtggcctggtccaacaagtccgatttcgcctgcgccaacgccttcaacaacagcattatccccgaggacacattcttcccaagccccgagagcagctgcgacgtgaagctggtggaaaagagcttcgagacagacaccaacctgaacttccagaacctgagcgtgatcggcttcagaatcctgctgctgaaagtggccggctttaacctgctgatgaccctgcggctgtggtccagctaa

SEQ ID NO: 32282 - DNA, 2274 bp, synthetic construct
  source 1..2274: mol_type = other DNA
atggccttaccagtgaccgccttgctcctgccgctggccttgctgctccacgccgccaggccggacatcgtgatgacccagacccccctgaccctgagcgtgacaatcggacagcctgccagcatctcctgcaagagcagccagagcctgctggacagcgacggcaagacctacctgaactggctgctgcagaggccaggccagagccccgagagactgatctacctggtgtccaagctggactccggcgtgcccgatagattcacaggcagcggctccggcaccgacttcaccctgaagatcagccgggtggaagccgaggacctgggcgtgtactgttgttggcagggcacccacttcccttacaccttcggcggagggaccaaggtggaaatcaagctcgaggacctgaagaacgtgttcccacctgaggtggccgtgttcgagcctagcgaggccgagatcagccacacccagaaagccaccctcgtgtgcctggctaccggcttctaccccgaccatgtggaactgtcttggtgggtcaacggcaaagaggtgcacagcggcgtgtgtaccgacccccagccactgaaagaacagcccgccctgaacgacagccggtactgcctgagcagcagactgagagtgtccgccaccttctggcagaacccccggaaccacttcagatgccaggtgcagttctacggcctgagcgagaacgacgagtggacccaggacagagccaagcccgtgacccagatcgtgtctgccgaagcctggggcagagccgattgcggctttaccagcgagagctaccagcagggcgtgctgagcgccaccatcctgtacgagatcctgctgggcaaggccaccctgtacgccgtgctggtgtctgccctggtgctgatggctatggtcaagcggaaggacagccggggaagggccaagcgatctggatctggagcaacaaacttctcactactcaaacaagcaggtgacgtggaggagaatcccgggcctactagtgccaccatggactggatttggcgcatccttttccttgtcggcgctgctaccggcgcccattccgggcccgaagtgcagctggttgaatctggcggaggactggttcaggctggcggatctctgagactgtcttgtgccgccagcggcagaacctttagcatgggctggtttagacaggcccctggcaaagagagagagttcgtcgccgccatcacatactctggcggcagcccttactacgccgactctgtgaagggcagattcaccatcagccgggacaacgccaagaacaccgtgtacctccagatgaacagcctgaagcctgaggacaccgccgtgtactactgcgccgccaatccaacatacggcagcgactggaacgccgagaattggggccagggaacccaagtgacagtgtctagcggatccggcggcggaggatctggcggaggcggatctgggggcggaggctctttcgaacaggtgcaactgcagcagcctggcgctgaacttgtgcggccaggcgcctctgtgaagctgagctgtaaagccagcggctacaccttcaccagctactggatgaactgggtcaagcagcgcccaggccagggcctggaatggatcggaatgatcgaccccagcgacagcgagacacactacaaccacatcttcaaggacaaggccaccctgaccgtggacaagtccagcagcacagcctacctgcaactgtccagcctgaccagcgaggacagcgccgtgtactactgcgcccggaacctgtatctgtggggccagggaacaagcgtgaccgtgtctagcacgcgtatccagaaccctgatcctgccgtgtaccagctgcgggatagcaagagcagcgacaagagcgtgtgtctgttcaccgacttcgacagccagaccaacgtgtcccagagcaaggactccgacgtgtacatcaccgataagtgcgtgctggacatgcggagcatggacttcaagagcaactccgccgtggcctggtccaacaagtccgatttcgcctgcgccaacgccttcaacaacagcattatccccgaggacacattcttcccaagccccgagagcagctgcgacgtgaagctggtggaaaagagcttcgagacagacaccaacctgaacttccagaacctgagcgtgatcggcttcagaatcctgctgctgaaagtggccggctttaacctgctgatgaccctgcggctgtggtccagctaa

SEQ ID NO: 32283 - DNA, 2274 bp, synthetic construct
  source 1..2274: mol_type = other DNA
atggccttaccagtgaccgccttgctcctgccgctggccttgctgctccacgccgccaggccggacatcgtgatgacccagacccccctgaccctgagcgtgacaatcggacagcctgccagcatctcctgcaagagcagccagagcctgctggacagcgacggcaagacctacctgaactggctgctgcagaggccaggccagagccccgagagactgatctacctggtgtccaagctggactccggcgtgcccgatagattcacaggcagcggctccggcaccgacttcaccctgaagatcagccgggtggaagccgaggacctgggcgtgtactgttgttggcagggcacccacttcccttacaccttcggcggagggaccaaggtggaaatcaagctcgaggacctgaagaacgtgttcccacctgaggtggccgtgttcgagcctagcgaggccgagatcagccacacccagaaagccaccctcgtgtgcctggctaccggcttctaccccgaccatgtggaactgtcttggtgggtcaacggcaaagaggtgcacagcggcgtgtgtaccgacccccagccactgaaagaacagcccgccctgaacgacagccggtactgcctgagcagcagactgagagtgtccgccaccttctggcagaacccccggaaccacttcagatgccaggtgcagttctacggcctgagcgagaacgacgagtggacccaggacagagccaagcccgtgacccagatcgtgtctgccgaagcctggggcagagccgattgcggctttaccagcgagagctaccagcagggcgtgctgagcgccaccatcctgtacgagatcctgctgggcaaggccaccctgtacgccgtgctggtgtctgccctggtgctgatggctatggtcaagcggaaggacagccggggaagggccaagcgatctggatctggagcaacaaacttctcactactcaaacaagcaggtgacgtggaggagaatcccgggcctactagtgccaccatggactggatttggcgcatccttttccttgtcggcgctgctaccggcgcccattccgggcccgaagtgcaactggttgaatccggtggcggcctggtgcaagcaggcggatctctcagacttagctgtgccgcctccggcagaaccttcacaatgggatggtttaggcaggctccagggaaagagagagagttcgtcgccgccatctctctgtctcccacactggcctactacgccgactctgtgaaaggccggttcaccatctccagagataatgccaagaacaccgtggtgctgcaaatgaactctctgaaacccgaggatacagccctgtactattgtgccgctgaccggaagtccgtgatgagcatcagacccgattactggggacagggcacacaagtcacagtgtcctctggatccggcggcggaggatctggcggaggcggatctgggggcggaggctctttcgaacaggtgcaactgcagcagcctggcgctgaacttgtgcggccaggcgcctctgtgaagctgagctgtaaagccagcggctacaccttcaccagctactggatgaactgggtcaagcagcgcccaggccagggcctggaatggatcggaatgatcgaccccagcgacagcgagacacactacaaccacatcttcaaggacaaggccaccctgaccgtggacaagtccagcagcacagcctacctgcaactgtccagcctgaccagcgaggacagcgccgtgtactactgcgcccggaacctgtatctgtggggccagggaacaagcgtgaccgtgtctagcacgcgtatccagaaccctgatcctgccgtgtaccagctgcgggatagcaagagcagcgacaagagcgtgtgtctgttcaccgacttcgacagccagaccaacgtgtcccagagcaaggactccgacgtgtacatcaccgataagtgcgtgctggacatgcggagcatggacttcaagagcaactccgccgtggcctggtccaacaagtccgatttcgcctgcgccaacgccttcaacaacagcattatccccgaggacacattcttcccaagccccgagagcagctgcgacgtgaagctggtggaaaagagcttcgagacagacaccaacctgaacttccagaacctgagcgtgatcggcttcagaatcctgctgctgaaagtggccggctttaacctgctgatgaccctgcggctgtggtccagctaa

SEQ ID NO: 32284 - DNA, 1857 bp, synthetic construct; identical to SEQ ID NO: 32277
  source 1..1857: mol_type = other DNA

SEQ ID NO: 32285 - DNA, 1857 bp, synthetic construct; identical to SEQ ID NO: 32280
  source 1..1857: mol_type = other DNA

SEQ ID NO: 32286 - DNA, 1857 bp, synthetic construct; identical to SEQ ID NO: 32281
  source 1..1857: mol_type = other DNA

SEQ ID NO: 32287 - DNA, 1491 bp, synthetic construct
  source 1..1491: mol_type = other DNA
atggccttaccagtgaccgccttgctcctgccgctggccttgctgctccacgccgccaggccggagatcgtgctgacacagtctcccgccacactgtcactgtctccaggcgaaagagccacactgagctgtagcgtgtccagcagcatcagcagcagcaacctgcactggtatcagcagaagcctggacaggcccctcggctgctgatctacagcacatctaatctggcctctggcatccccgccagattttctggctctggaagcggcaccgacttcaccctgaccataagcagcctggaacctgaggacttcgccgtgtactactgccagcagtggtccagctatccccacacatttggcggaggcaccaaggtggaaatcaagagaggcggaggcggaagtggaggcggaggatctggcggcggaggctctcaggttcagctggttcagagcggagccgaagtgaagaaacctggggcctctgtgaaggtgtcctgcaaggcttccggctacacctttaccaactacctgatcgagtgggtccgacaggctccaggacaaggactggaatggatgggcctgattaaccctggcagcggcggcaccaactacaacgagaagttcaagggcagagtgaccatgaccaccgacaccagcacaagcaccgcctacatggaactgcggagcctgagaagcgacgacaccgccgtgtattattgcgccagaagaagccctctcggctcttggatctactacgcctatgacggcgtggcctattggggccagggaacactggttacagtgtcctctacgcgtaccacgacgccagcgccgcgaccaccaacaccggcgcccaccatcgcgtcgcagcccctgtccctgcgcccagaggcgtgccggccagcggcggggggcgcagtgcacacgagggggctggacttcgcctgtgacatctacatctgggcgcccttggccgggacttgtggggtccttctcctgtcactggttatcaccctttactgcaaacggggcagaaagaaactcctgtatatattcaaacaaccatttatgagaccagtacaaactactcaagaggaagatggctgtagctgccgatttccagaagaagaagaaggaggatgtgaactgagagtgaagttcagcaggagcgcagacgcccccgcgtaccagcagggccagaaccagctctataacgagctgaatctaggacgaagagaggagtacgatgttttggacaagagacgtggccgggaccctgagatggggggaaagccgagaaggaagaaccctcaggaaggcctgtacaatgaactgcagaaagataagatggcggaggcctacagtgagattgggatgaaaggcgagcgccggaggggcaaggggcacgatggcctttaccagggtctcagtacagccaccaaggacacctacgacgcccttcacatgcaggccctgccccctcgctaa

SEQ ID NO: 32288 - DNA, 1899 bp, synthetic construct
  source 1..1899: mol_type = other DNA
atggccttaccagtgaccgccttgctcctgccgctggccttgctgctccacgccgccaggccggagatcgtgctgacacagtctcccgccacactgtcactgtctccaggcgaaagagccacactgagctgtagcgtgtccagcagcatcagcagcagcaacctgcactggtatcagcagaagcctggacaggcccctcggctgctgatctacagcacatctaatctggcctctggcatccccgccagattttctggctctggaagcggcaccgacttcaccctgaccataagcagcctggaacctgaggacttcgccgtgtactactgccagcagtggtccagctatccccacacatttggcggaggcaccaaggtggaaatcaagagactcgagatccagaaccctgatcctgccgtgtaccagctgcgggatagcaagagcagcgacaagagcgtgtgtctgttcaccgacttcgacagccagaccaacgtgtcccagagcaaggactccgacgtgtacatcaccgataagtgcgtgctggacatgcggagcatggacttcaagagcaactccgccgtggcctggtccaacaagtccgatttcgcctgcgccaacgccttcaacaacagcattatccccgaggacacattcttcccaagcagcgacgtgccctgcgacgtgaagctggtggaaaagagcttcgagacagacaccaacctgaacttccagaacctgagcgtgatcggcttcagaatcctgctgctgaaagtggccggctttaacctgctgatgaccctgcggctgtggtccagccgcgccaagagaagcggatctggcgtgaagcagaccctgaatttcgacctgctgaagctggctggcgacgtggaatccaacccaggccctactagtatggactggatttggcgcatccttttccttgtcggcgctgctaccggcgcgcattccttcgaacaggttcagctggttcagagcggagccgaagtgaagaaacctggggcctctgtgaaggtgtcctgcaaggcttccggctacacctttaccaactacctgatcgagtgggtccgacaggctccaggacaaggactggaatggatgggcctgattaaccctggcagcggcggcaccaactacaacgagaagttcaagggcagagtgaccatgaccaccgacaccagcacaagcaccgcctacatggaactgcggagcctgagaagcgacgacaccgccgtgtattattgcgccagaagaagccctctcggctcttggatctactacgcctatgacggcgtggcctattggggccagggaacactggttacagtgtcctctacgcgtgaggacctgaagaacgtgttcccacctgaggtggccgtgttcgagcctagcaaggccgagatcgcccacacccagaaagccaccctcgtgtgcctggctaccggcttctaccccgaccatgtggaactgtcttggtgggtcaacggcaaagaggtgcacagcggcgtgtgtaccgacccccagccactgaaagaacagcccgccctgaacgacagccggtactgcctgagcagcagactgagagtgtccgccaccttctggcagaacccccggaaccacttcagatgccaggtgcagttctacggcctgagcgagaacgacgagtggacccaggacagagccaagcccgtgacccagatcgtgtctgccgaagcctggggcagagccgattgcggcatcaccagcgccagctaccaccagggcgtgctgagcgccaccatcctgtacgagatcctgctgggcaaggccaccctgtacgccgtgctggtgtctgccctggtgctgatggctatggtcaagcggaaggacagccggggataa

SEQ ID NO: 32289 - DNA, 1911 bp, synthetic construct
  source 1..1911: mol_type = other DNA
atggccttaccagtgaccgccttgctcctgccgctggccttgctgctccacgccgccaggccggagatcgtgctgacacagtctcccgccacactgtcactgtctccaggcgaaagagccacactgagctgtagcgtgtccagcagcatcagcagcagcaacctgcactggtatcagcagaagcctggacaggcccctcggctgctgatctacagcacatctaatctggcctctggcatccccgccagattttctggctctggaagcggcaccgacttcaccctgaccataagcagcctggaacctgaggacttcgccgtgtactactgccagcagtggtccagctatccccacacatttggcggaggcaccaaggtggaaatcaagagactcgagatccagaaccctgatcctgccgtgtaccagctgcgggatagcaagagcagcgacaagagcgtgtgtctgttcaccgacttcgacagccagaccaacgtgtcccagagcaaggactccgacgtgtacatcaccgataagtgcgtgctggacatgcggagcatggacttcaagagcaactccgccgtggcctggtccaacaagtccgatttcgcctgcgccaacgccttcaacaacagcattatccccgaggacacattcttcccaagccccgagagcagctgcgacgtgaagctggtggaaaagagcttcgagacagacaccaacctgaacttccagaacctgagcgtgatcggcttcagaatcctgctgctgaaagtggccggctttaacctgctgatgaccctgcggctgtggtccagctctagtcgcgccaagagaagcggatctggcgtgaagcagaccctgaatttcgacctgctgaagctggctggcgacgtggaatccaacccaggccctactagtatggactggatttggcgcatccttttccttgtcggcgctgctaccggcgcgcattccttcgaacaggttcagctggttcagagcggagccgaagtgaagaaacctggggcctctgtgaaggtgtcctgcaaggcttccggctacacctttaccaactacctgatcgagtgggtccgacaggctccaggacaaggactggaatggatgggcctgattaaccctggcagcggcggcaccaactacaacgagaagttcaagggcagagtgaccatgaccaccgacaccagcacaagcaccgcctacatggaactgcggagcctgagaagcgacgacaccgccgtgtattattgcgccagaagaagccctctcggctcttggatctactacgcctatgacggcgtggcctattggggccagggaacactggttacagtgtcctctgccagcacgcgtgaggacctgaagaacgtgttcccacctgaggtggccgtgttcgagcctagcgaggccgagatcagccacacccagaaagccaccctcgtgtgcctggctaccggcttctaccccgaccatgtggaactgtcttggtgggtcaacggcaaagaggtgcacagcggcgtgtgtaccgacccccagccactgaaagaacagcccgccctgaacgacagccggtactgcctgagcagcagactgagagtgtccgccaccttctggcagaacccccggaaccacttcagatgccaggtgcagttctacggcctgagcgagaacgacgagtggacccaggacagagccaagcccgtgacccagatcgtgtctgccgaagcctggggcagagccgattgcggctttaccagcgagagctaccagcagggcgtgctgagcgccaccatcctgtacgagatcctgctgggcaaggccaccctgtacgccgtgctggtgtctgccctggtgctgatggctatggtcaagcggaaggacagccggggataa

SEQ ID NO: 32290 - DNA, 1458 bp, synthetic construct
  source 1..1458: mol_type = other DNA
atggccttaccagtgaccgccttgctcctgccgctggccttgctgctccacgccgccaggccgcagatcgtgctgacacagagccccgccatcatgtctgttagccctggcgagaaagtgaccatgacctgtagcgccagcagcagcgtgaactacatgcactggttccagcagaagcccggcacaagccctaagctgtgggtgtacagcaccagcaatctggcctctggcgtgccagccagattttctggctctggcagcggcaccagctacagcctgacaatcagcagcatggaagccgaggatgccgccacctactattgtcagcagcggagcatctacccaccttggacatttggcggaggcaccaagctggaaatcaaaggcggaggcggaagtggaggcggaggatctggcggcggaggctctgaagttcagctccagcagagcggccctgagcttgtgaaacctggcgcttccgtgaagatcagctgcaaggccagcggctacagcttcaccggctacaccatgaactgggtcaagcagtcccacggcaagaacctggaatggatcggcctgattaacccctacaacggcggcacctcctacaaccagaagttcaaggccaaggccacactgaccgtggacaagagcagcagcacagcctacatgcagctgaagtccctgaccagcgaggacagcgccgtgtactactgcgccagagattacggctacgtgctggactattggggccagggcacaagcgtgacagtgtctagtacgcgtaccacgacgccagcgccgcgaccaccaacaccggcgcccaccatcgcgtcgcagcccctgtccctgcgcccagaggcgtgccggccagcggcggggggcgcagtgcacacgagggggctggacttcgcctgtgacatctacatctgggcgcccttggccgggacttgtggggtccttctcctgtcactggttatcaccctttactgcaaacggggcagaaagaaactcctgtatatattcaaacaaccatttatgagaccagtacaaactactcaagaggaagatggctgtagctgccgatttccagaagaagaagaaggaggatgtgaactgagagtgaagttcagcaggagcgcagacgcccccgcgtaccagcagggccagaaccagctctataacgagctgaatctaggacgaagagaggagtacgatgttttggacaagagacgtggccgggaccctgagatggggggaaagccgagaaggaagaaccctcaggaaggcctgtacaatgaactgcagaaagataagatggcggaggcctacagtgagattgggatgaaaggcgagcgccggaggggcaaggggcacgatggcctttaccagggtctcagtacagccaccaaggacacctacgacgcccttcacatgcaggccctgccccctcgctaa

SEQ ID NO: 32291 - DNA, 1869 bp, synthetic construct
  source 1..1869: mol_type = other DNA
atggccttaccagtgaccgccttgctcctgccgctggccttgctgctccacgccgccaggccgcagatcgtgctgacacagagccccgccatcatgtctgttagccctggcgagaaagtgaccatgacctgtagcgccagcagcagcgtgaactacatgcactggttccagcagaagcccggcacaagccctaagctgtgggtgtacagcaccagcaatctggcctctggcgtgccagccagattttctggctctggcagcggcaccagctacagcctgacaatcagcagcatggaagccgaggatgccgccacctactattgtcagcagcggagcatctacccaccttggacatttggcggaggcaccaagctggaaatcaaactcgagatccagaaccctgatcctgccgtgtaccagctgcgggatagcaagagcagcgacaagagcgtgtgtctgttcaccgacttcgacagccagaccaacgtgtcccagagcaaggactccgacgtgtacatcaccgataagtgcgtgctggacatgcggagcatggacttcaagagcaactccgccgtggcctggtccaacaagtccgatttcgcctgcgccaacgccttcaacaacagcattatccccgaggacacattcttcccaagccccgagagcagctgcgacgtgaagctggtggaaaagagcttcgagacagacaccaacctgaacttccagaacctgagcgtgatcggcttcagaatcctgctgctgaaagtggccggctttaacctgctgatgaccctgcggctgtggtccagctctagtcgcgccaagagaagcggatctggcgtgaagcagaccctgaatttcgacctgctgaagctggctggcgacgtggaatccaacccaggccctactagtatggactggatttggcgcatccttttccttgtcggcgctgctaccggcgcgcattccttcgaagttcagctccagcagagcggccctgagcttgtgaaacctggcgcttccgtgaagatcagctgcaaggccagcggctacagcttcaccggctacaccatgaactgggtcaagcagtcccacggcaagaacctggaatggatcggcctgattaacccctacaacggcggcacctcctacaaccagaagttcaaggccaaggccacactgaccgtggacaagagcagcagcacagcctacatgcagctgaagtccctgaccagcgaggacagcgccgtgtactactgcgccagagattacggctacgtgctggactattggggccagggcacaagcgtgacagtgtctagtacgcgtgaggacctgaagaacgtgttcccacctgaggtggccgtgttcgagcctagcgaggccgagatcagccacacccagaaagccaccctcgtgtgcctggctaccggcttctaccccgaccatgtggaactgtcttggtgggtcaacggcaaagaggtgcacagcggcgtgtgtaccgacccccagccactgaaagaacagcccgccctgaacgacagccggtactgcctgagcagcagactgagagtgtccgccaccttctggcagaacccccggaaccacttcagatgccaggtgcagttctacggcctgagcgagaacgacgagtggacccaggacagagccaagcccgtgacccagatcgtgtctgccgaagcctggggcagagccgattgcggctttaccagcgagagctaccagcagggcgtgctgagcgccaccatcctgtacgagatcctgctgggcaaggccaccctgtacgccgtgctggtgtctgccctggtgctgatggctatggtcaagcggaaggacagccggggataa

SEQ ID NO: 32292 - DNA, 1509 bp, synthetic construct
  source 1..1509: mol_type = other DNA
atggccttaccagtgaccgccttgctcctgccgctggccttgctgctccacgccgccaggccgcaggttcagctccagcagtctggacctggcctggtcaagcctagccagacactgtctctgacctgtgccatcagcggcgatagcgtgtcctctaatagagccgcctggaactggatcagacagagccctagcagaggactccagtggctgggcagaacctactaccgcagcaagtggtacaacgactacgccgtgtctctgcggagccggatcaccatcaatcccgtgaccagcaagaaccaggtggccctgcacatgaacagcgtgacccctgaagataccgccgtgtactactgtgccagagccggaattgtggtggtgcccggacctgagacattctactactacgaccacggcctggacgtgtggggccagggaacaacagtgactgtctcttctggaggcggtggatctggcggcggaggtagtggtggtggcggatctgacatccagatgacacagagcccctctagcctgtctgccagcgtgggagacagagtgaccatcacctgtagagccagccagagcatcagaaactacctgaactggtatcagcaaaagcccggcaaggcccctgagctgctgattcatgctgcaagcagcctccagagcggcgtgccaagcagattttctggcagcggcagcggaaccgacttcaccctgacaatatctagcctccagcctgaggacttcgccagctactactgccagcagagctacagcgcccctcctatcacctttggacagggcaccagactggaaatcaagacgcgtaccacgacgccagcgccgcgaccaccaacaccggcgcccaccatcgcgtcgcagcccctgtccctgcgcccagaggcgtgccggccagcggcggggggcgcagtgcacacgagggggctggacttcgcctgtgacatctacatctgggcgcccttggccgggacttgtggggtccttctcctgtcactggttatcaccctttactgcaaacggggcagaaagaaactcctgtatatattcaaacaaccatttatgagaccagtacaaactactcaagaggaagatggctgtagctgccgatttccagaagaagaagaaggaggatgtgaactgagagtgaagttcagcaggagcgcagacgcccccgcgtaccagcagggccagaaccagctctataacgagctgaatctaggacgaagagaggagtacgatgttttggacaagagacgtggccgggaccctgagatggggggaaagccgagaaggaagaaccctcaggaaggcctgtacaatgaactgcagaaagataagatggcggaggcctacagtgagattgggatgaaaggcgagcgccggaggggcaaggggcacgatggcctttaccagggtctcagtacagccaccaaggacacctacgacgcccttcacatgcaggccctgccccctcgctaa

SEQ ID NO: 32293 - DNA, 1905 bp, synthetic construct
  source 1..1905: mol_type = other DNA
atggccttaccagtgaccgccttgctcctgccgctggccttgctgctccacgccgccaggccgcaggttcagctccagcagtctggacctggcctggtcaagcctagccagacactgtctctgacctgtgccatcagcggcgatagcgtgtcctctaatagagccgcctggaactggatcagacagagccctagcagaggactccagtggctgggcagaacctactaccgcagcaagtggtacaacgactacgccgtgtctctgcggagccggatcaccatcaatcccgtgaccagcaagaaccaggtggccctgcacatgaacagcgtgacccctgaagataccgccgtgtactactgtgccagagccggaattgtggtggtgcccggacctgagacattctactactacgaccacggcctggacgtgtggggccagggaacaacagtgactgtctcttctctcgaggacctgaagaacgtgttcccacctgaggtggccgtgttcgagcctagcgaggccgagatcagccacacccagaaagccaccctcgtgtgcctggctaccggcttctaccccgaccatgtggaactgtcttggtgggtcaacggcaaagaggtgcacagcggcgtgtgtaccgacccccagccactgaaagaacagcccgccctgaacgacagccggtactgcctgagcagcagactgagagtgtccgccaccttctggcagaacccccggaaccacttcagatgccaggtgcagttctacggcctgagcgagaacgacgagtggacccaggacagagccaagcccgtgacccagatcgtgtctgccgaagcctggggcagagccgattgcggctttaccagcgagagctaccagcagggcgtgctgagcgccaccatcctgtacgagatcctgctgggcaaggccaccctgtacgccgtgctggtgtctgccctggtgctgatggctatggtcaagcggaaggacagccggggaagggccaagcgatctggatctggagcaacaaacttctcactactcaaacaagcaggtgacgtggaggagaatcccgggcctactagtatggactggatttggcgcatccttttccttgtcggcgctgctaccggcgcgcattccttcgaagacatccagatgacacagagcccctctagcctgtctgccagcgtgggagacagagtgaccatcacctgtagagccagccagagcatcagaaactacctgaactggtatcagcaaaagcccggcaaggcccctgagctgctgattcatgctgcaagcagcctccagagcggcgtgccaagcagattttctggcagcggcagcggaaccgacttcaccctgacaatatctagcctccagcctgaggacttcgccagctactactgccagcagagctacagcgcccctcctatcacctttggacagggcaccagactggaaatcaagacgcgtatccagaaccctgatcctgccgtgtaccagctgcgggatagcaagagcagcgacaagagcgtgtgtctgttcaccgacttcgacagccagaccaacgtgtcccagagcaaggactccgacgtgtacatcaccgataagtgcgtgctggacatgcggagcatggacttcaagagcaactccgccgtggcctggtccaacaagtccgatttcgcctgcgccaacgccttcaacaacagcattatccccgaggacacattcttcccaagccccgagagcagctgcgacgtgaagctggtggaaaagagcttcgagacagacaccaacctgaacttccagaacctgagcgtgatcggcttcagaatcctgctgctgaaagtggccggctttaacctgctgatgaccctgcggctgtggtccagctaa

SEQ ID NO: 32294 - DNA, 1917 bp, synthetic construct
  source 1..1917: mol_type = other DNA
atggccttaccagtgaccgccttgctcctgccgctggccttgctgctccacgccgccaggccgcaggttcagctccagcagtctggacctggcctggtcaagcctagccagacactgtctctgacctgtgccatcagcggcgatagcgtgtcctctaatagagccgcctggaactggatcagacagagccctagcagaggactccagtggctgggcagaacctactaccgcagcaagtggtacaacgactacgccgtgtctctgcggagccggatcaccatcaatcccgtgaccagcaagaaccaggtggccctgcacatgaacagcgtgacccctgaagataccgccgtgtactactgtgccagagccggaattgtggtggtgcccggacctgagacattctactactacgaccacggcctggacgtgtggggccagggaacaacagtgactgtctcttctctcgagatccagaaccctgatcctgccgtgtaccagctgcgggatagcaagagcagcgacaagagcgtgtgtctgttcaccgacttcgacagccagaccaacgtgtcccagagcaaggactccgacgtgtacatcaccgataagtgcgtgctggacatgcggagcatggacttcaagagcaactccgccgtggcctggtccaacaagtccgatttcgcctgcgccaacgccttcaacaacagcattatccccgaggacacattcttcccaagcagcgacgtgccctgcgacgtgaagctggtggaaaagagcttcgagacagacaccaacctgaacttccagaacctgagcgtgatcggcttcagaatcctgctgctgaaagtggccggctttaacctgctgatgaccctgcggctgtggtccagccgcgccaagagaagcggatctggcgtgaagcagaccctgaatttcgacctgctgaagctggctggcgacgtggaatccaacccaggccctactagtatggactggatttggcgcatccttttccttgtcggcgctgctaccggcgcgcattccttcgaagacatccagatgacacagagcccctctagcctgtctgccagcgtgggagacagagtgaccatcacctgtagagccagccagagcatcagaaactacctgaactggtatcagcaaaagcccggcaaggcccctgagctgctgattcatgctgcaagcagcctccagagcggcgtgccaagcagattttctggcagcggcagcggaaccgacttcaccctgacaatatctagcctccagcctgaggacttcgccagctactactgccagcagagctacagcgcccctcctatcacctttggacagggcaccagactggaaatcaagacgcgtgaggacctgaagaacgtgttcccacctgaggtggccgtgttcgagcctagcaaggccgagatcgcccacacccagaaagccaccctcgtgtgcctggctaccggcttctaccccgaccatgtggaactgtcttggtgggtcaacggcaaagaggtgcacagcggcgtgtgtaccgacccccagccactgaaagaacagcccgccctgaacgacagccggtactgcctgagcagcagactgagagtgtccgccaccttctggcagaacccccggaaccacttcagatgccaggtgcagttctacggcctgagcgagaacgacgagtggacccaggacagagccaagcccgtgacccagatcgtgtctgccgaagcctggggcagagccgattgcggcatcaccagcgccagctaccaccagggcgtgctgagcgccaccatcctgtacgagatcctgctgggcaaggccaccctgtacgccgtgctggtgtctgccctggtgctgatggctatggtcaagcggaaggacagccggggataa

SEQ ID NO: 32295 - DNA, 2256 bp, synthetic construct
  source 1..2256: mol_type = other DNA
atggccttaccagtgaccgccttgctcctgccgctggccttgctgctccacgccgccaggccgcaggttcagctccagcagtctggacctggcctggtcaagcctagccagacactgtctctgacctgtgccatcagcggcgatagcgtgtcctctaatagagccgcctggaactggatcagacagagccctagcagaggactccagtggctgggcagaacctactaccgcagcaagtggtacaacgactacgccgtgtctctgcggagccggatcaccatcaatcccgtgaccagcaagaaccaggtggccctgcacatgaacagcgtgacccctgaagataccgccgtgtactactgtgccagagccggaattgtggtggtgcccggacctgagacattctactactacgaccacggcctggacgtgtggggccagggaacaacagtgactgtctcttctctcgaggacctgaagaacgtgttcccacctgaggtggccgtgttcgagcctagcgaggccgagatcagccacacccagaaagccaccctcgtgtgcctggctaccggcttctaccccgaccatgtggaactgtcttggtgggtcaacggcaaagaggtgcacagcggcgtgtctaccgacccccagccactgaaagaacagcccgccctgaacgacagccggtactgcctgagcagcagactgagagtgtccgccaccttctggcagaacccccggaaccacttcagatgccaggtgcagttctacggcctgagcgagaacgacgagtggacccaggacagagccaagcccgtgacccagatcgtgtctgccgaagcctggggcagagccgattgcggatcccagagcttcggcctgctggaccccaagctgtgctacctgctggatggcatcctgttcatctacggcgtgatcctgaccgccctgttcctgagagtgaagttcagcagaagcgccgacgcccctgcctaccagcagggacagaaccaactgtacaacgagctgaacctgggcagacgggaagagtacgacgtgctggacaagcggagaggcagggaccctgagatgggcggaaagccccggagaaagaacccccaggaaggactgtataacgaactccagaaagacaagatggccgaagcctacagcgagatcggcatgaagggcgagcggagaagaggcaagggccacgatggcctgtaccagggcctgagcaccgccaccaaggacacctatgacgccctgcacatgcaggccctgcctccaagaagggccaagcgatctggatctggagcaacaaacttctcactactcaaacaagcaggtgacgtggaggagaatcccgggcctactagtatggactggatttggcgcatccttttccttgtcggcgctgctaccggcgcgcattccttcgaagacatccagatgacacagagcccctctagcctgtctgccagcgtgggagacagagtgaccatcacctgtagagccagccagagcatcagaaactacctgaactggtatcagcaaaagcccggcaaggcccctgagctgctgattcatgctgcaagcagcctccagagcggcgtgccaagcagattttctggcagcggcagcggaaccgacttcaccctgacaatatctagcctccagcctgaggacttcgccagctactactgccagcagagctacagcgcccctcctatcacctttggacagggcaccagactggaaatcaagacgcgtatccagaaccctgatcctgccgtgtaccagctgcgggatagcaagagcagcgacaagagcgtgtgtctgttcaccgacttcgacagccagaccaacgtgtcccagagcaaggactccgacgtgtacatcaccgataagaccgtgctggacatgcggagcatggacttcaagagcaactccgccgtggcctggtccaacaagtccgatttcgcctgcgccaacgccttcaacaacagcattatccccgaggacacattcttcccaagccccgagagcagctgcggtaccatcactcaaggtttggcagtgtcaaccatctcatcattctttccacctggctaccaagtgtccttctgcctggtcatggtgctgctgttcgccgtggataccggcctgtacttcagcgtcaagaccaacatccggtccagcaccagagactggaaggaccacaagttcaagtggcggaaggacccccaggacaagtaa

SEQ ID NO: 32296 - DNA, 1461 bp, synthetic construct
  source 1..1461: mol_type = other DNA
atggccttaccagtgaccgccttgctcctgccgctggccttgctgctccacgccgccaggccggacgagatcgtgatgacccagacccctgccaccctgtctgtgtctgccggcgagagagtgaccattacctgcaaggccagccagagcgtgtccaacgacgtgacctggtatcagcagaagcccggccaggcccccagactgctgatctacagcgccagcaacagatacagcggcgtgcccgccagattttccggcagcggctacggcaccgagttcaccttcaccatcagcagcgtgcagagcgaggacttcgccgtgtacttctgtcagcaagactacagcagcttcggccagggcaccaagctggaaatcaagaggggcggaggcggaagtggaggcggaggatctggcggcggaggctctcaggtgcagctggtggaatctggacctggcgtggtgcagcctggcagaagcctgagaatcagctgtgccgtgtccggcttcagcgtgaccaactacggcgtgcactgggtgcgccagccacctggaaaaggactggaatggctgggcgtgatctgggctggcggcatcaccaactacaacagcgccttcatgtcccggctgaccatctccaaggacaacagcaagaacaccgtgtacctccagatgaacagcctgcgggccgaggacaccgccatgtactactgtgcttccagaggcggccactacggctacgccctggattattggggccagggaaccctcgtgaccgtgtcctctacgcgtaccacgacgccagcgccgcgaccaccaacaccggcgcccaccatcgcgtcgcagcccctgtccctgcgcccagaggcgtgccggccagcggcggggggcgcagtgcacacgagggggctggacttcgcctgtgacatctacatctgggcgcccttggccgggacttgtggggtccttctcctgtcactggttatcaccctttactgcaaacggggcagaaagaaactcctgtatatattcaaacaaccatttatgagaccagtacaaactactcaagaggaagatggctgtagctgccgatttccagaagaagaagaaggaggatgtgaactgagagtgaagttcagcaggagcgcagacgcccccgcgtaccagcagggccagaaccagctctataacgagctgaatctaggacgaagagaggagtacgatgttttggacaagagacgtggccgggaccctgagatggggggaaagccgagaaggaagaaccctcaggaaggcctgtacaatgaactgcagaaagataagatggcggaggcctacagtgagattgggatgaaaggcgagcgccggaggggcaaggggcacgatggcctttaccagggtctcagtacagccaccaaggacacctacgacgcccttcacatgcaggccctgccccctcgctga

SEQ ID NO: 32297 - DNA, 1854 bp, synthetic construct
  source 1..1854: mol_type = other DNA
atggccttaccagtgaccgccttgctcctgccgctggccttgctgctccacgccgccaggccggacatccagatgacacagagccctagcagcctgtctgccagcgtgggagacagagtgaccatcacatgcaaggccagccagagcgtgtccaacgacgtgacctggtatcagcagaagcctggacaggcccctaagctgctgatctacagcgccagcaacagatacagcggagtgcccgccagattttccggctctggctacggcaccgagttcacctttaccatcagcagcgtgcagagcgaggacttcgccgtgtacttctgccagcaagactacagcagcttcggccagggcaccaagctggaaatcaagagactcgaggacctgaagaacgtgttcccacctgaggtggccgtgttcgagcctagcgaggccgagatcagccacacccagaaagccaccctcgtgtgcctggctaccggcttctaccccgaccatgtggaactgtcttggtgggtcaacggcaaagaggtgcacagcggcgtgtgtaccgacccccagccactgaaagaacagcccgccctgaacgacagccggtactgcctgagcagcagactgagagtgtccgccaccttctggcagaacccccggaaccacttcagatgccaggtgcagttctacggcctgagcgagaacgacgagtggacccaggacagagccaagcccgtgacccagatcgtgtctgccgaagcctggggcagagccgattgcggctttaccagcgagagctaccagcagggcgtgctgagcgccaccatcctgtacgagatcctgctgggcaaggccaccctgtacgccgtgctggtgtctgccctggtgctgatggctatggtcaagcggaaggacagccggggaagggccaagcgatctggatctggagcaacaaacttctcactactcaaacaagcaggtgacgtggaggagaatcccgggcctactagtatggactggatttggcgcatccttttccttgtcggcgctgctaccggcgcgcattccttcgaacaggtgcagctggtggaatctggacctggcgtggtgcagcctggcagaagcctgagaatcagctgtgccgtgtccggcttcagcgtgaccaactacggcgtgcactgggtgcgccagccacctggaaaaggactggaatggctgggcgtgatctgggctggcggcatcaccaactacaacagcgccttcatgtcccggctgaccatctccaaggacaacagcaagaacaccgtgtacctccagatgaacagcctgcgggccgaggacaccgccatgtactactgtgcttccagaggcggccactacggctacgccctggattattggggccagggaaccctcgtgaccgtgtcctctacgcgtatccagaaccctgatcctgccgtgtaccagctgcgggatagcaagagcagcgacaagagcgtgtgtctgttcaccgacttcgacagccagaccaacgtgtcccagagcaaggactccgacgtgtacatcaccgataagtgcgtgctggacatgcggagcatggacttcaagagcaactccgccgtggcctggtccaacaagtccgatttcgcctgcgccaacgccttcaacaacagcattatccccgaggacacattcttcccaagccccgagagcagctgcgacgtgaagctggtggaaaagagcttcgagacagacaccaacctgaacttccagaacctgagcgtgatcggcttcagaatcctgctgctgaaagtggccggctttaacctgctgatgaccctgcggctgtggtccagctaa

SEQ ID NO: 32298 - DNA, 1470 bp, synthetic construct
  source 1..1470: mol_type = other DNA
atggccttaccagtgaccgccttgctcctgccgctggccttgctgctccacgccgccaggccggagaacgtgctgacacagagccctgccatcatgagtgcctctccaggcgagaaagtgaccatgacctgtagagccagcagcagcgtgtccagcagctacctgcactggtatcagcagaagtccggcgcaagccccaaagtgtggatctacagcaccagcaatctggcctctggcgtgccaggcagattttctggctctggcagcggcacaagctacagcctgacaatcagctccgtggaagccgaagatgccgccacctactactgccagcagtacagcggctaccccatcacatttggagccggcaccaaggtggaagtgaagagaggcggaggcggaagtggaggcggaggatctggcggcggaggctctcaggttcagctcaaagaatctggccccgtgctggtggccccaagccagacactgtctatcacctgtaccgtgtccggcttcagcctggcctcctacaacatccactgggtccgacagcctccaggcaaaggactggaatggctgggagtgatttgggctggcggcagcaccaactacaacagcgcactgatgagccggctgagcatcagcaaggacaacagcaagagccaggtgttcctccagatgaactccctccagaccgacgacaccgccatgtactactgcgccaagagaagcgacgactacagttggttcgcctactggggccagggcacactggttactgtgtctgcttctacgcgtaccacgacgccagcgccgcgaccaccaacaccggcgcccaccatcgcgtcgcagcccctgtccctgcgcccagaggcgtgccggccagcggcggggggcgcagtgcacacgagggggctggacttcgcctgtgacatctacatctgggcgcccttggccgggacttgtggggtccttctcctgtcactggttatcaccctttactgcaaacggggcagaaagaaactcctgtatatattcaaacaaccatttatgagaccagtacaaactactcaagaggaagatggctgtagctgccgatttccagaagaagaagaaggaggatgtgaactgagagtgaagttcagcaggagcgcagacgcccccgcgtaccagcagggccagaaccagctctataacgagctgaatctaggacgaagagaggagtacgatgttttggacaagagacgtggccgggaccctgagatggggggaaagccgagaaggaagaaccctcaggaaggcctgtacaatgaactgcagaaagataagatggcggaggcctacagtgagattgggatgaaaggcgagcgccggaggggcaaggggcacgatggcctttaccagggtctcagtacagccaccaaggacacctacgacgcccttcacatgcaggccctgccccctcgctaa

SEQ ID NO: 32299 - DNA, 1884 bp, synthetic construct
  source 1..1884: mol_type = other DNA
atggccttaccagtgaccgccttgctcctgccgctggccttgctgctccacgccgccaggccggagaacgtgctgacacagagccctgccatcatgagtgcctctccaggcgagaaagtgaccatgacctgtagagccagcagcagcgtgtccagcagctacctgcactggtatcagcagaagtccggcgcaagccccaaagtgtggatctacagcaccagcaatctggcctctggcgtgccaggcagattttctggctctggcagcggcacaagctacagcctgacaatcagctccgtggaagccgaagatgccgccacctactactgccagcagtacagcggctaccccatcacatttggagccggcaccaaggtggaagtgaagagactcgagatccagaaccctgatcctgccgtgtaccagctgcgggatagcaagagcagcgacaagagcgtgtgtctgttcaccgacttcgacagccagaccaacgtgtcccagagcaaggactccgacgtgtacatcaccgataagtgcgtgctggacatgcggagcatggacttcaagagcaactccgccgtggcctggtccaacaagtccgatttcgcctgcgccaacgccttcaacaacagcattatccccgaggacacattcttcccaagccccgagagcagctgcgacgtgaagctggtggaaaagagcttcgagacagacaccaacctgaacttccagaacctgagcgtgatcggcttcagaatcctgctgctgaaagtggccggctttaacctgctgatgaccctgcggctgtggtccagctctagtcgcgccaagagaagcggatctggcgtgaagcagaccctgaatttcgacctgctgaagctggctggcgacgtggaatccaacccaggccctactagtatggactggatttggcgcatccttttccttgtcggcgctgctaccggcgcgcattccttcgaacaggttcagctcaaagaatctggccccgtgctggtggccccaagccagacactgtctatcacctgtaccgtgtccggcttcagcctggcctcctacaacatccactgggtccgacagcctccaggcaaaggactggaatggctgggagtgatttgggctggcggcagcaccaactacaacagcgcactgatgagccggctgagcatcagcaaggacaacagcaagagccaggtgttcctccagatgaactccctccagaccgacgacaccgccatgtactactgcgccaagagaagcgacgactacagttggttcgcctactggggccagggcacactggttactgtgtctgcttctacgcgtgaggacctgaagaacgtgttcccacctgaggtggccgtgttcgagcctagcgaggccgagatcagccacacccagaaagccaccctcgtgtgcctggctaccggcttctaccccgaccatgtggaactgtcttggtgggtcaacggcaaagaggtgcacagcggcgtgtgtaccgacccccagccactgaaagaacagcccgccctgaacgacagccggtactgcctgagcagcagactgagagtgtccgccaccttctggcagaacccccggaaccacttcagatgccaggtgcagttctacggcctgagcgagaacgacgagtggacccaggacagagccaagcccgtgacccagatcgtgtctgccgaagcctggggcagagccgattgcggctttaccagcgagagctaccagcagggcgtgctgagcgccaccatcctgtacgagatcctgctgggcaaggccaccctgtacgccgtgctggtgtctgccctggtgctgatggctatggtcaagcggaaggacagccggggataa

SEQ ID NO: 32300 - DNA, 1440 bp, synthetic construct
  source 1..1440: mol_type = other DNA
atggccttaccagtgaccgccttgctcctgccgctggccttgctgctccacgccgccaggccggacatccagctgacacagagccctagcacactgagcgccagcatgggcgacagagtgaccatcacatgtagcgcctctagcagcgtgcggttcatccactggtatcagcagaagcctggcaaggcccctaagcggctgatctacgataccagcaaactggcctctggcgtgcccagcagattttctggctctggcagcggcaccgacttcaccctgacaatatctagcctccagcctgaggacttcgccacctactactgtcagcagtggggcagcagccctttcacctttggacagggcaccaaggtggaaatcaagggcggaggcggaagtggaggcggaggatctggcggcggaggctctgaagtgcagctggttgagtacggtggcggactggttcaacctggcggtagcctgagactgtcttgtgccgccagcggcttcaacatcaaggactactatatccactgggtccgacaggccccaggcaaaggacttgaatgggttgcctggatcgaccccgagaacggcgataccgagttcgtgcccaagtttcagggcagagccaccatgagcgccgacacctctaagaacacagcctacctccagatgaacagcctgagagccgaggacaccgccgtgtactactgtaaaaccggcggcttttggggccagggcacactggtcacagtcagctctacgcgtaccacgacgccagcgccgcgaccaccaacaccggcgcccaccatcgcgtcgcagcccctgtccctgcgcccagaggcgtgccggccagcggcggggggcgcagtgcacacgagggggctggacttcgcctgtgacatctacatctgggcgcccttggccgggacttgtggggtccttctcctgtcactggttatcaccctttactgcaaacggggcagaaagaaactcctgtatatattcaaacaaccatttatgagaccagtacaaactactcaagaggaagatggctgtagctgccgatttccagaagaagaagaaggaggatgtgaactgagagtgaagttcagcaggagcgcagacgcccccgcgtaccagcagggccagaaccagctctataacgagctgaatctaggacgaagagaggagtacgatgttttggacaagagacgtggccgggaccctgagatggggggaaagccgagaaggaagaaccctcaggaaggcctgtacaatgaactgcagaaagataagatggcggaggcctacagtgagattgggatgaaaggcgagcgccggaggggcaaggggcacgatggcctttaccagggtctcagtacagccaccaaggacacctacgacgcccttcacatgcaggccctgccccctcgctaa

SEQ ID NO: 32301 - DNA, 1833 bp, synthetic construct
  source 1..1833: mol_type = other DNA
atggccttaccagtgaccgccttgctcctgccgctggccttgctgctccacgccgccaggccggacatccagctgacacagagccctagcacactgagcgccagcatgggcgacagagtgaccatcacatgtagcgcctctagcagcgtgcggttcatccactggtatcagcagaagcctggcaaggcccctaagcggctgatctacgataccagcaaactggcctctggcgtgcccagcagattttctggctctggcagcggcaccgacttcaccctgacaatatctagcctccagcctgaggacttcgccacctactactgtcagcagtggggcagcagccctttcacctttggacagggcaccaaggtggaaatcaagctcgaggacctgaagaacgtgttcccacctgaggtggccgtgttcgagcctagcgaggccgagatcagccacacccagaaagccaccctcgtgtgcctggctaccggcttctaccccgaccatgtggaactgtcttggtgggtcaacggcaaagaggtgcacagcggcgtgtgtaccgacccccagccactgaaagaacagcccgccctgaacgacagccggtactgcctgagcagcagactgagagtgtccgccaccttctggcagaacccccggaaccacttcagatgccaggtgcagttctacggcctgagcgagaacgacgagtggacccaggacagagccaagcccgtgacccagatcgtgtctgccgaagcctggggcagagccgattgcggctttaccagcgagagctaccagcagggcgtgctgagcgccaccatcctgtacgagatcctgctgggcaaggccaccctgtacgccgtgctggtgtctgccctggtgctgatggctatggtcaagcggaaggacagccggggaagggccaagcgatctggatctggagcaacaaacttctcactactcaaacaagcaggtgacgtggaggagaatcccgggcctactagtatggactggatttggcgcatccttttccttgtcggcgctgctaccggcgcgcattccttcgaagtgcagctggttgagtacggtggcggactggttcaacctggcggtagcctgagactgtcttgtgccgccagcggcttcaacatcaaggactactatatccactgggtccgacaggccccaggcaaaggacttgaatgggttgcctggatcgaccccgagaacggcgataccgagttcgtgcccaagtttcagggcagagccaccatgagcgccgacacctctaagaacacagcctacctccagatgaacagcctgagagccgaggacaccgccgtgtactactgtaaaaccggcggcttttggggccagggcacactggtcacagtcagctctacgcgtatccagaaccctgatcctgccgtgtaccagctgcgggatagcaagagcagcgacaagagcgtgtgtctgttcaccgacttcgacagccagaccaacgtgtcccagagcaaggactccgacgtgtacatcaccgataagtgcgtgctggacatgcggagcatggacttcaagagcaactccgccgtggcctggtccaacaagtccgatttcgcctgcgccaacgccttcaacaacagcattatccccgaggacacattcttcccaagccccgagagcagctgcgacgtgaagctggtggaaaagagcttcgagacagacaccaacctgaacttccagaacctgagcgtgatcggcttcagaatcctgctgctgaaagtggccggctttaacctgctgatgaccctgcggctgtggtccagctaa

SEQ ID NO: 32302 - DNA, 1845 bp, synthetic construct
  source 1..1845: mol_type = other DNA
atggccttaccagtgaccgccttgctcctgccgctggccttgctgctccacgccgccaggccggacatccagctgacacagagccctagcacactgagcgccagcatgggcgacagagtgaccatcacatgtagcgcctctagcagcgtgcggttcatccactggtatcagcagaagcctggcaaggcccctaagcggctgatctacgataccagcaaactggcctctggcgtgcccagcagattttctggctctggcagcggcaccgacttcaccctgacaatatctagcctccagcctgaggacttcgccacctactactgtcagcagtggggcagcagccctttcacctttggacagggcaccaaggtggaaatcaagctcgagatccagaaccctgatcctgccgtgtaccagctgcgggatagcaagagcagcgacaagagcgtgtgtctgttcaccgacttcgacagccagaccaacgtgtcccagagcaaggactccgacgtgtacatcaccgataagtgcgtgctggacatgcggagcatggacttcaagagcaactccgccgtggcctggtccaacaagtccgatttcgcctgcgccaacgccttcaacaacagcattatccccgaggacacattcttcccaagcagcgacgtgccctgcgacgtgaagctggtggaaaagagcttcgagacagacaccaacctgaacttccagaacctgagcgtgatcggcttcagaatcctgctgctgaaagtggccggctttaacctgctgatgaccctgcggctgtggtccagccgcgccaagagaagcggatctggcgtgaagcagaccctgaatttcgacctgctgaagctggctggcgacgtggaatccaacccaggccctactagtatggactggatttggcgcatccttttccttgtcggcgctgctaccggcgcgcattccttcgaagtgcagctggttgagtacggtggcggactggttcaacctggcggtagcctgagactgtcttgtgccgccagcggcttcaacatcaaggactactatatccactgggtccgacaggccccaggcaaaggacttgaatgggttgcctggatcgaccccgagaacggcgataccgagttcgtgcccaagtttcagggcagagccaccatgagcgccgacacctctaagaacacagcctacctccagatgaacagcctgagagccgaggacaccgccgtgtactactgtaaaaccggcggcttttggggccagggcacactggtcacagtcagctctacgcgtgaggacctgaagaacgtgttcccacctgaggtggccgtgttcgagcctagcaaggccgagatcgcccacacccagaaagccaccctcgtgtgcctggctaccggcttctaccccgaccatgtggaactgtcttggtgggtcaacggcaaagaggtgcacagcggcgtgtgtaccgacccccagccactgaaagaacagcccgccctgaacgacagccggtactgcctgagcagcagactgagagtgtccgccaccttctggcagaacccccggaaccacttcagatgccaggtgcagttctacggcctgagcgagaacgacgagtggacccaggacagagccaagcccgtgacccagatcgtgtctgccgaagcctggggcagagccgattgcggcatcaccagcgccagctaccaccagggcgtgctgagcgccaccatcctgtacgagatcctgctgggcaaggccaccctgtacgccgtgctggtgtctgccctggtgctgatggctatggtcaagcggaaggacagccggggataa

SEQ ID NO: 32303 - DNA, 2184 bp, synthetic construct
  source 1..2184: mol_type = other DNA
atggccttaccagtgaccgccttgctcctgccgctggccttgctgctccacgccgccaggccggacatccagctgacacagagccctagcacactgagcgccagcatgggcgacagagtgaccatcacatgtagcgcctctagcagcgtgcggttcatccactggtatcagcagaagcctggcaaggcccctaagcggctgatctacgataccagcaaactggcctctggcgtgcccagcagattttctggctctggcagcggcaccgacttcaccctgacaatatctagcctccagcctgaggacttcgccacctactactgtcagcagtggggcagcagccctttcacctttggacagggcaccaaggtggaaatcaagctcgaggacctgaagaacgtgttcccacctgaggtggccgtgttcgagcctagcgaggccgagatcagccacacccagaaagccaccctcgtgtgcctggctaccggcttctaccccgaccatgtggaactgtcttggtgggtcaacggcaaagaggtgcacagcggcgtgtctaccgacccccagccactgaaagaacagcccgccctgaacgacagccggtactgcctgagcagcagactgagagtgtccgccaccttctggcagaacccccggaaccacttcagatgccaggtgcagttctacggcctgagcgagaacgacgagtggacccaggacagagccaagcccgtgacccagatcgtgtctgccgaagcctggggcagagccgattgcggatcccagagcttcggcctgctggaccccaagctgtgctacctgctggatggcatcctgttcatctacggcgtgatcctgaccgccctgttcctgagagtgaagttcagcagaagcgccgacgcccctgcctaccagcagggacagaaccaactgtacaacgagctgaacctgggcagacgggaagagtacgacgtgctggacaagcggagaggcagggaccctgagatgggcggaaagccccggagaaagaacccccaggaaggactgtataacgaactccagaaagacaagatggccgaagcctacagcgagatcggcatgaagggcgagcggagaagaggcaagggccacgatggcctgtaccagggcctgagcaccgccaccaaggacacctatgacgccctgcacatgcaggccctgcctccaagaagggccaagcgatctggatctggagcaacaaacttctcactactcaaacaagcaggtgacgtggaggagaatcccgggcctactagtatggactggatttggcgcatccttttccttgtcggcgctgctaccggcgcgcattccttcgaagtgcagctggttgagtacggtggcggactggttcaacctggcggtagcctgagactgtcttgtgccgccagcggcttcaacatcaaggactactatatccactgggtccgacaggccccaggcaaaggacttgaatgggttgcctggatcgaccccgagaacggcgataccgagttcgtgcccaagtttcagggcagagccaccatgagcgccgacacctctaagaacacagcctacctccagatgaacagcctgagagccgaggacaccgccgtgtactactgtaaaaccggcggcttttggggccagggcacactggtcacagtcagctctacgcgtatccagaaccctgatcctgccgtgtaccagctgcgggatagcaagagcagcgacaagagcgtgtgtctgttcaccgacttcgacagccagaccaacgtgtcccagagcaaggactccgacgtgtacatcaccgataagaccgtgctggacatgcggagcatggacttcaagagcaactccgccgtggcctggtccaacaagtccgatttcgcctgcgccaacgccttcaacaacagcattatccccgaggacacattcttcccaagccccgagagcagctgcggtaccatcactcaaggtttggcagtgtcaaccatctcatcattctttccacctggctaccaagtgtccttctgcctggtcatggtgctgctgttcgccgtggataccggcctgtacttcagcgtcaagaccaacatccggtccagcaccagagactggaaggaccacaagttcaagtggcggaaggaccctcaggacaagtaa

SEQ ID NO: 32304 - DNA, 1479 bp, synthetic construct
  source 1..1479: mol_type = other DNA
atggccttaccagtgaccgccttgctcctgccgctggccttgctgctccacgccgccaggccggacatcgtgatgacacagagccctgatagcctggccgtgtctctgggagagagagccaccatcaactgcaagagcagccagagcctgctgaacagcggcaacaacaagaactacgtgacatggtatcagcagaagcccggccagcctcctaagctgctgatctactggggcagcaccagatccacaggcgtgcccgatagattttctggctctggcagcggcaccgacttcaccctgacaatttctagcctgcaagccgaggacgtggccgtgtactactgccagaacgactacacataccccttcaccttcggccagggcaccaagctggaaatcaaaggcggaggcggaagtggaggcggaggatctggcggcggaggctctcaagttcagctggttcagagcggagccgaagtgaagaaacctggggcctctgtgaaggtgtcctgcaaggcttccggctataccttcaccagcttttggctgaactgggtccgacaggcccctggacaaggactggaatggatgggcaacatctaccccagcgacagctacaccgtgtacaaccagaaattcaaggaccgcgtgaccatgaccagggacaccagcacaagcacagtgtacatggaactgagcagcctgcggagcgaggataccgccgtgtattattgcgccagaacctggcggggcaacagcttcgattattggggccagggaaccaccgtgaccgtgtcatctacgcgtaccacgacgccagcgccgcgaccaccaacaccggcgcccaccatcgcgtcgcagcccctgtccctgcgcccagaggcgtgccggccagcggcggggggcgcagtgcacacgagggggctggacttcgcctgtgacatctacatctgggcgcccttggccgggacttgtggggtccttctcctgtcactggttatcaccctttactgcaaacggggcagaaagaaactcctgtatatattcaaacaaccatttatgagaccagtacaaactactcaagaggaagatggctgtagctgccgatttccagaagaagaagaaggaggatgtgaactgagagtgaagttcagcaggagcgcagacgcccccgcgtaccagcagggccagaaccagctctataacgagctgaatctaggacgaagagaggagtacgatgttttggacaagagacgtggccgggaccctgagatggggggaaagccgagaaggaagaaccctcaggaaggcctgtacaatgaactgcagaaagataagatggcggaggcctacagtgagattgggatgaaaggcgagcgccggaggggcaaggggcacgatggcctttaccagggtctcagtacagccaccaaggacacctacgacgcccttcacatgcaggccctgccccctcgctaa

SEQ ID NO: 32305 - DNA, 1893 bp, synthetic construct
  source 1..1893: mol_type = other DNA
atggccttaccagtgaccgccttgctcctgccgctggccttgctgctccacgccgccaggccggacatcgtgatgacacagagccctgatagcctggccgtgtctctgggagagagagccaccatcaactgcaagagcagccagagcctgctgaacagcggcaacaacaagaactacgtgacatggtatcagcagaagcccggccagcctcctaagctgctgatctactggggcagcaccagatccacaggcgtgcccgatagattttctggctctggcagcggcaccgacttcaccctgacaatttctagcctgcaagccgaggacgtggccgtgtactactgccagaacgactacacataccccttcaccttcggccagggcaccaagctggaaatcaaactcgagatccagaaccctgatcctgccgtgtaccagctgcgggatagcaagagcagcgacaagagcgtgtgtctgttcaccgacttcgacagccagaccaacgtgtcccagagcaaggactccgacgtgtacatcaccgataagtgcgtgctggacatgcggagcatggacttcaagagcaactccgccgtggcctggtccaacaagtccgatttcgcctgcgccaacgccttcaacaacagcattatccccgaggacacattcttcccaagccccgagagcagctgcgacgtgaagctggtggaaaagagcttcgagacagacaccaacctgaacttccagaacctgagcgtgatcggcttcagaatcctgctgctgaaagtggccggctttaacctgctgatgaccctgcggctgtggtccagctctagtcgcgccaagagaagcggatctggcgtgaagcagaccctgaatttcgacctgctgaagctggctggcgacgtggaatccaacccaggccctactagtatggactggatttggcgcatccttttccttgtcggcgctgctaccggcgcgcattccttcgaacaagttcagctggttcagagcggagccgaagtgaagaaacctggggcctctgtgaaggtgtcctgcaaggcttccggctataccttcaccagcttttggctgaactgggtccgacaggcccctggacaaggactggaatggatgggcaacatctaccccagcaccagctacaccgtgtacaaccagaaattcaaggaccgcgtgaccatgaccagggacaccagcacaagcacagtgtacatggaactgagcagcctgcggagcgaggataccgccgtgtattattgcgccagaacctggcggggcaacagcttcgattattggggccagggaaccaccgtgaccgtgtcatctacgcgtgaggacctgaagaacgtgttcccacctgaggtggccgtgttcgagcctagcgaggccgagatcagccacacccagaaagccaccctcgtgtgcctggctaccggcttctaccccgaccatgtggaactgtcttggtgggtcaacggcaaagaggtgcacagcggcgtgtgtaccgacccccagccactgaaagaacagcccgccctgaacgacagccggtactgcctgagcagcagactgagagtgtccgccaccttctggcagaacccccggaaccacttcagatgccaggtgcagttctacggcctgagcgagaacgacgagtggacccaggacagagccaagcccgtgacccagatcgtgtctgccgaagcctggggcagagccgattgcggctttaccagcgagagctaccagcagggcgtgctgagcgccaccatcctgtacgagatcctgctgggcaaggccaccctgtacgccgtgctggtgtctgccctggtgctgatggctatggtcaagcggaaggacagccggggataa

SEQ ID NO: 32306 - DNA, 1875 bp, synthetic construct
  source 1..1875: mol_type = other DNA
atggccttaccagtgaccgccttgctcctgccgctggccttgctgctccacgccgccaggccggacatcgtgatgacacagagccctgatagcctggccgtgtctctgggagagagagccaccatcaactgcaagagcagccagagcctgctgaacagcggcaaccagaagaactacctggcctggtatcagcagaagcccggccagcctcctaagctgctgatctactggggcagcaccagatccacaggcgtgcccgatagattttctggctctggcagcggcaccgacttcaccctgacaatttctagcctgcaagccgaggacgtggccgtgtactactgccagaacgactacacataccccttcaccttcggccagggcaccaagctggaaatcaaactcgaggacctgaagaacgtgttcccacctgaggtggccgtgttcgagcctagcgaggccgagatcagccacacccagaaagccaccctcgtgtgcctggctaccggcttctaccccgaccatgtggaactgtcttggtgggtcaacggcaaagaggtgcacagcggcgtgtgtaccgacccccagccactgaaagaacagcccgccctgaacgacagccggtactgcctgagcagcagactgagagtgtccgccaccttctggcagaacccccggaaccacttcagatgccaggtgcagttctacggcctgagcgagaacgacgagtggacccaggacagagccaagcccgtgacccagatcgtgtctgccgaagcctggggcagagccgattgcggctttaccagcgagagctaccagcagggcgtgctgagcgccaccatcctgtacgagatcctgctgggcaaggccaccctgtacgccgtgctggtgtctgccctggtgctgatggctatggtcaagcggaaggacagccggggaagggccaagcgatctggatctggagcaacaaacttctcactactcaaacaagcaggtgacgtggaggagaatcccgggcctactagtatggactggatttggcgcatccttttccttgtcggcgctgctaccggcgcgcattccttcgaacaagttcagctggttcagagcggagccgaagtgaagaaacctggggcctctgtgaaggtgtcctgcaaggcttccggctataccttcaccagcttttggctgaactgggtccgacaggcccctggacaaggactggaatggatgggcaacatctaccccagcgacagctacaccgtgtacaaccagaaattcaaggaccgcgtgaccatgaccagggacaccagcacaagcacagtgtacatggaactgagcagcctgcggagcgaggataccgccgtgtattattgcgccagaacctggcggggcaacagcttcgattattggggccagggaaccaccgtgaccgtgtcatctacgcgtatccagaaccctgatcctgccgtgtaccagctgcgggatagcaagagcagcgacaagagcgtgtgtctgttcaccgacttcgacagccagaccaacgtgtcccagagcaaggactccgacgtgtacatcaccgataagtgcgtgctggacatgcggagcatggacttcaagagcaactccgccgtggcctggtccaacaagtccgatttcgcctgcgccaacgccttcaacaacagcattatccccgaggacacattcttcccaagccccgagagcagctgcgacgtgaagctggtggaaaagagcttcgagacagacaccaacctgaacttccagaacctgagcgtgatcggcttcagaatcctgctgctgaaagtggccggctttaacctgctgatgaccctgcggctgtggtccagctaa

SEQ ID NO: 32307 - DNA, 1887 bp, synthetic construct
  source 1..1887: mol_type = other DNA
atggccttaccagtgaccgccttgctcctgccgctggccttgctgctccacgccgccaggccggacatcgtgatgacacagagccctgatagcctggccgtgtctctgggagagagagccaccatcaactgcaagagcagccagagcctgctgaacagcggcaaccagaagaactacctggcctggtatcagcagaagcccggccagcctcctaagctgctgatctactggggcagcaccagatccacaggcgtgcccgatagattttctggctctggcagcggcaccgacttcaccctgacaatttctagcctgcaagccgaggacgtggccgtgtactactgccagaacgactacacataccccttcaccttcggccagggcaccaagctggaaatcaaactcgagatccagaaccctgatcctgccgtgtaccagctgcgggatagcaagagcagcgacaagagcgtgtgtctgttcaccgacttcgacagccagaccaacgtgtcccagagcaaggactccgacgtgtacatcaccgataagtgcgtgctggacatgcggagcatggacttcaagagcaactccgccgtggcctggtccaacaagtccgatttcgcctgcgccaacgccttcaacaacagcattatccccgaggacacattcttcccaagcagcgacgtgccctgcgacgtgaagctggtggaaaagagcttcgagacagacaccaacctgaacttccagaacctgagcgtgatcggcttcagaatcctgctgctgaaagtggccggctttaacctgctgatgaccctgcggctgtggtccagccgcgccaagagaagcggatctggcgtgaagcagaccctgaatttcgacctgctgaagctggctggcgacgtggaatccaacccaggccctactagtatggactggatttggcgcatccttttccttgtcggcgctgctaccggcgcgcattccttcgaacaagttcagctggttcagagcggagccgaagtgaagaaacctggggcctctgtgaaggtgtcctgcaaggcttccggctataccttcaccagcttttggctgaactgggtccgacaggcccctggacaaggactggaatggatgggcaacatctaccccagcaccagctacaccgtgtacaaccagaaattcaaggaccgcgtgaccatgaccagggacaccagcacaagcacagtgtacatggaactgagcagcctgcggagcgaggataccgccgtgtattattgcgccagaacctggcggggcaacagcttcgattattggggccagggaaccaccgtgaccgtgtcatctacgcgtgaggacctgaagaacgtgttcccacctgaggtggccgtgttcgagcctagcaaggccgagatcgcccacacccagaaagccaccctcgtgtgcctggctaccggcttctaccccgaccatgtggaactgtcttggtgggtcaacggcaaagaggtgcacagcggcgtgtgtaccgacccccagccactgaaagaacagcccgccctgaacgacagccggtactgcctgagcagcagactgagagtgtccgccaccttctggcagaacccccggaaccacttcagatgccaggtgcagttctacggcctgagcgagaacgacgagtggacccaggacagagccaagcccgtgacccagatcgtgtctgccgaagcctggggcagagccgattgcggcatcaccagcgccagctaccaccagggcgtgctgagcgccaccatcctgtacgagatcctgctgggcaaggccaccctgtacgccgtgctggtgtctgccctggtgctgatggctatggtcaagcggaaggacagccggggataa

SEQ ID NO: 32308 - DNA, 1467 bp, synthetic construct
  source 1..1467: mol_type = other DNA
atggccttaccagtgaccgccttgctcctgccgctggccttgctgctccacgccgccaggccgcaagtgaagctggaagagtctggcggaggactggtgcaggctggaagaagcctgagactgtcttgtgccgccagcgagcacacctttagctctcacgtgatgggctggttcagacaggcccctggcaaagaaagggaaagcgtggccgttatcggctggcgggatattagcaccagctacgccgatagcgtgaagggcagattcaccatcagccgggacaacgccaagaaaaccctgtacctccagatgaacagcctgaagccagaggacaccgccgtgtactactgcgccgccagaagaattgacgccgccgactttgattcttggggccagggaacccaagtgaccgtttctagcggaggaggaggatctgaagtgcaactggttgaatccggtggcggcctggtgcaagcaggcggatctctcagacttagctgtgccgcctccggcagaaccttcacaatgggatggtttaggcaggctccagggaaagagagagagttcgtcgccgccatctctctgtctcccacactggcctactacgccgagtctgtgaaaggccggttcaccatctccagagataatgccaagaacaccgtggtgctgcaaatgaactctctgaaacccgaggatacagccctgtactattgtgccgctgaccggaagtccgtgatgagcatcagacccgattactggggacagggcacacaagtcacagtgtcctctacgcgtaccacgacgccagcgccgcgaccaccaacaccggcgcccaccatcgcgtcgcagcccctgtccctgcgcccagaggcgtgccggccagcggcggggggcgcagtgcacacgagggggctggacttcgcctgtgacatctacatctgggcgcccttggccgggacttgtggggtccttctcctgtcactggttatcaccctttactgcaaacggggcagaaagaaactcctgtatatattcaaacaaccatttatgagaccagtacaaactactcaagaggaagatggctgtagctgccgatttccagaagaagaagaaggaggatgtgaactgagagtgaagttcagcaggagcgcagacgcccccgcgtaccagcagggccagaaccagctctataacgagctgaatctaggacgaagagaggagtacgatgttttggacaagagacgtggccgggaccctgagatggggggaaagccgagaaggaagaaccctcaggaaggcctgtacaatgaactgcagaaagataagatggcggaggcctacagtgagattgggatgaaaggcgagcgccggaggggcaaggggcacgatggcctttaccagggtctcagtacagccaccaaggacacctacgacgcccttcacatgcaggccctgccccctcgctaa

SEQ ID NO: 32309 - DNA, 1872 bp, synthetic construct
  source 1..1872: mol_type = other DNA
atggccttaccagtgaccgccttgctcctgccgctggccttgctgctccacgccgccaggccgagctacgtgctgacacagcctccatccgtgtctgtggctccaggacagaccgccagaatcacatgcggcggcaacaacatcggcggcaagagcgtgcactggtatcagcagccacctggacaggctccagtggtggtggtgtacgacgacagcgatagacctagcggcatccccgagagattcagcggcagcaattccggcaataccgccacactgaccatcagcagagtggaagctggcgacgaggccgtgtactactgccaagtgtgggacagcagcagcgatcacgtggtgtttggcggcggaacaaagctgacagtgcttctcgaggacctgaagaacgtgttcccacctgaggtggccgtgttcgagcctagcaaggccgagatcgcccacacccagaaagccaccctcgtgtgcctggctaccggcttctaccccgaccatgtggaactgtcttggtgggtcaacggcaaagaggtgcacagcggcgtgtgtaccgacccccagccactgaaagaacagcccgccctgaacgacagccggtactgcctgagcagcagactgagagtgtccgccaccttctggcagaacccccggaaccacttcagatgccaggtgcagttctacggcctgagcgagaacgacgagtggacccaggacagagccaagcccgtgacccagatcgtgtctgccgaagcctggggcagagccgattgcggcatcaccagcgccagctaccaccagggcgtgctgagcgccaccatcctgtacgagatcctgctgggcaaggccaccctgtacgccgtgctggtgtctgccctggtgctgatggctatggtcaagcggaaggacagccggggaagggccaagcgatctggatctggagcaacaaacttctcactactcaaacaagcaggtgacgtggaggagaatcccgggcctactagtatggactggatttggcgcatccttttccttgtcggcgctgctaccggcgcgcattccttcgaacaactccagctgcaagagtctggccctggcctggtcaagcctagcgaaacactgagcctgacctgtaccgtgtctggcggctctatcagctccagcagctatttctggggctggatcagacaacctcctggcaaaggactggaatggatcggctccatctactacagcggcatcacctactacaaccccagcctgaagtccagagtgaccatctccgtggacaccagcaagaaccagttctccctgaagctgagcagcgtgacagccgccgataccgccgtgtattattgtgccagacatgacggcgctgtggccggcctgtttgattattggggacagggcaccctggtcaccgtgtcatctgctacgcgtatccagaaccctgatcctgccgtgtaccagctgcgggatagcaagagcagcgacaagagcgtgtgtctgttcaccgacttcgacagccagaccaacgtgtcccagagcaaggactccgacgtgtacatcaccgataagtgcgtgctggacatgcggagcatggacttcaagagcaactccgccgtggcctggtccaacaagtccgatttcgcctgcgccaacgccttcaacaacagcattatccccgaggacacattcttcccaagcagcgacgtgccctgcgacgtgaagctggtggaaaagagcttcgagacagacaccaacctgaacttccagaacctgagcgtgatcggcttcagaatcctgctgctgaaagtggccggctttaacctgctgatgaccctgcggctgtggtccagctaa

SEQ ID NO: 32310 - DNA, 2244 bp, synthetic construct
  source 1..2244: mol_type = other DNA
atggccttaccagtgaccgccttgctcctgccgctggccttgctgctccacgccgccaggccgagctacgtgctgacacagcctccatccgtgtctgtggctccaggacagaccgccagaatcacatgcggcggcaacaacatcggcggcaagagcgtgcactggtatcagcagccacctggacaggctccagtggtggtggtgtacgacgacagcgatagacctagcggcatccccgagagattcagcggcagcaattccggcaataccgccacactgaccatcagcagagtggaagctggcgacgaggccgtgtactactgccaagtgtgggacagcagcagcgatcacgtggtgtttggcggcggaacaaagctgacagtgcttctcgaggacctgaagaacgtgttcccacctgaggtggccgtgttcgagcctagcgaggccgagatcagccacacccagaaagccaccctcgtgtgcctggctaccggcttctaccccgaccatgtggaactgtcttggtgggtcaacggcaaagaggtgcacagcggcgtgtctaccgacccccagccactgaaagaacagcccgccctgaacgacagccggtactgcctgagcagcagactgagagtgtccgccaccttctggcagaacccccggaaccacttcagatgccaggtgcagttctacggcctgagcgagaacgacgagtggacccaggacagagccaagcccgtgacccagatcgtgtctgccgaagcctggggcagagccgattgcggatcccagagcttcggcctgctggaccccaagctgtgctacctgctggatggcatcctgttcatctacggcgtgatcctgaccgccctgttcctgagagtgaagttcagcagaagcgccgacgcccctgcctaccagcagggacagaaccaactgtacaacgagctgaacctgggcagacgggaagagtacgacgtgctggacaagcggagaggcagggaccctgagatgggcggaaagccccggagaaagaacccccaggaaggactgtataacgaactccagaaagacaagatggccgaagcctacagcgagatcggcatgaagggcgagcggagaagaggcaagggccacgatggcctgtaccagggcctgagcaccgccaccaaggacacctatgacgccctgcacatgcaggccctgcctccaagaagggccaagcgatctggatctggagcaacaaacttctcactactcaaacaagcaggtgacgtggaggagaatcccgggcctactagtatggactggatttggcgcatccttttccttgtcggcgctgctaccggcgcgcattccttcgaacaactccagctgcaagagtctggccctggcctggtcaagcctagcgaaacactgagcctgacctgtaccgtgtctggcggctctatcagctccagcagctatttctggggctggatcagacaacctcctggcaaaggactggaatggatcggctccatctactacagcggcatcacctactacaaccccagcctgaagtccagagtgaccatctccgtggacaccagcaagaaccagttctccctgaagctgagcagcgtgacagccgccgataccgccgtgtattattgtgccagacatgacggcgctgtggccggcctgtttgattattggggacagggcaccctggtcaccgtgtcatctgctacgcgtatccagaaccctgatcctgccgtgtaccagctgcgggatagcaagagcagcgacaagagcgtgtgtctgttcaccgacttcgacagccagaccaacgtgtcccagagcaaggactccgacgtgtacatcaccgataagaccgtgctggacatgcggagcatggacttcaagagcaactccgccgtggcctggtccaacaagtccgatttcgcctgcgccaacgccttcaacaacagcattatccccgaggacacattcttcccaagccccgagagcagctgcggtacccagagttttgggttgttggaccctaaattgtgctatctgttggacggaatcctgttcatttacggagtgatcctgaccgcattgttcctgaagagaggccggaagaagctgctgtacatcttcaagcagcctttcatgcggcccgtgcagaccacccaggaagaggacggctgctcctgccggttccccgaggaagaagaaggcggctgcgagctgtaa

SEQ ID NO: 32311 - DNA, 2256 bp, synthetic construct
  source 1..2256: mol_type = other DNA
atggccttaccagtgaccgccttgctcctgccgctggccttgctgctccacgccgccaggccgagctacgtgctgacacagcctccatccgtgtctgtggctccaggacagaccgccagaatcacatgcggcggcaacaacatcggcggcaagagcgtgcactggtatcagcagccacctggacaggctccagtggtggtggtgtacgacgacagcgatagacctagcggcatccccgagagattcagcggcagcaattccggcaataccgccacactgaccatcagcagagtggaagctggcgacgaggccgtgtactactgccaagtgtgggacagcagcagcgatcacgtggtgtttggcggcggaacaaagctgacagtgcttctcgaggacctgaagaacgtgttcccacctgaggtggccgtgttcgagcctagcgaggccgagatcagccacacccagaaagccaccctcgtgtgcctggctaccggcttctaccccgaccatgtggaactgtcttggtgggtcaacggcaaagaggtgcacagcggcgtgtctaccgacccccagccactgaaagaacagcccgccctgaacgacagccggtactgcctgagcagcagactgagagtgtccgccaccttctggcagaacccccggaaccacttcagatgccaggtgcagttctacggcctgagcgagaacgacgagtggacccaggacagagccaagcccgtgacccagatcgtgtctgccgaagcctggggcagagccgattgcggatcccagagcttcggcctgctggaccccaagctgtgctacctgctggatggcatcctgttcatctacggcgtgatcctgaccgccctgttcctgagagtgaagttcagcagaagcgccgacgcccctgcctaccagcagggacagaaccaactgtacaacgagctgaacctgggcagacgggaagagtacgacgtgctggacaagcggagaggcagggaccctgagatgggcggaaagccccggagaaagaacccccaggaaggactgtataacgaactccagaaagacaagatggccgaagcctacagcgagatcggcatgaagggcgagcggagaagaggcaagggccacgatggcctgtaccagggcctgagcaccgccaccaaggacacctatgacgccctgcacatgcaggccctgcctccaagaagggccaagcgatctggatctggagcaacaaacttctcactactcaaacaagcaggtgacgtggaggagaatcccgggcctactagtatggactggatttggcgcatccttttccttgtcggcgctgctaccggcgcgcattccttcgaacaactccagctgcaagagtctggccctggcctggtcaagcctagcgaaacactgagcctgacctgtaccgtgtctggcggctctatcagctccagcagctatttctggggctggatcagacaacctcctggcaaaggactggaatggatcggctccatctactacagcggcatcacctactacaaccccagcctgaagtccagagtgaccatctccgtggacaccagcaagaaccagttctccctgaagctgagcagcgtgacagccgccgataccgccgtgtattattgtgccagacatgacggcgctgtggccggcctgtttgattattggggacagggcaccctggtcaccgtgtcatctgctacgcgtatccagaaccctgatcctgccgtgtaccagctgcgggatagcaagagcagcgacaagagcgtgtgtctgttcaccgacttcgacagccagaccaacgtgtcccagagcaaggactccgacgtgtacatcaccgataagaccgtgctggacatgcggagcatggacttcaagagcaactccgccgtggcctggtccaacaagtccgatttcgcctgcgccaacgccttcaacaacagcattatccccgaggacacattcttcccaagccccgagagcagctgcggtacccagagttttgggttgttggaccctaaattgtgctatctgttggacggaatcctgttcatttacggagtgatcctgaccgcattgttcctgaggagcaagcggtcacggctgctccacagcgattacatgaatatgacaccacgaagaccgggtcctactcgcaaacactaccaaccctacgcacctccccgcgactttgcagcgtaccgatctaatctagaaggagtcgac

SEQ ID NO: 32312 - DNA, 2736 bp, synthetic construct
  source 1..2736: mol_type = other DNA
atggccttaccagtgaccgccttgctcctgccgctggccttgctgctccacgccgccaggccgagctacgtgctgacacagcctccatccgtgtctgtggctccaggacagaccgccagaatcacatgcggcggcaacaacatcggcggcaagagcgtgcactggtatcagcagccacctggacaggctccagtggtggtggtgtacgacgacagcgatagacctagcggcatccccgagagattcagcggcagcaattccggcaataccgccacactgaccatcagcagagtggaagctggcgacgaggccgtgtactactgccaagtgtgggacagcagcagcgatcacgtggtgtttggcggcggaacaaagctgacagtgcttctcgaggacctgaagaacgtgttcccacctgaggtggccgtgttcgagcctagcaaggccgagatcgcccacacccagaaagccaccctcgtgtgcctggctaccggcttctaccccgaccatgtggaactgtcttggtgggtcaacggcaaagaggtgcacagcggcgtgtgtaccgacccccagccactgaaagaacagcccgccctgaacgacagccggtactgcctgagcagcagactgagagtgtccgccaccttctggcagaacccccggaaccacttcagatgccaggtgcagttctacggcctgagcgagaacgacgagtggacccaggacagagccaagcccgtgacccagatcgtgtctgccgaagcctggggcagagccgattgcggcatcaccagcgccagctaccaccagggcgtgctgagcgccaccatcctgtacgagatcctgctgggcaaggccaccctgtacgccgtgctggtgtctgccctggtgctgatggctatggtcaagcggaaggacagccggggaagggccaagcgatctggatctggagcaacaaacttctcactactcaaacaagcaggtgacgtggaggagaatcccgggcctactagtatggactggatttggcgcatccttttccttgtcggcgctgctaccggcgcgcattccttcgaacaactccagctgcaagagtctggccctggcctggtcaagcctagcgaaacactgagcctgacctgtaccgtgtctggcggctctatcagctccagcagctatttctggggctggatcagacaacctcctggcaaaggactggaatggatcggctccatctactacagcggcatcacctactacaaccccagcctgaagtccagagtgaccatctccgtggacaccagcaagaaccagttctccctgaagctgagcagcgtgacagccgccgataccgccgtgtattattgtgccagacatgacggcgctgtggccggcctgtttgattattggggacagggcaccctggtcaccgtgtcatctgctacgcgtatccagaaccctgatcctgccgtgtaccagctgcgggatagcaagagcagcgacaagagcgtgtgtctgttcaccgacttcgacagccagaccaacgtgtcccagagcaaggactccgacgtgtacatcaccgataagtgcgtgctggacatgcggagcatggacttcaagagcaactccgccgtggcctggtccaacaagtccgatttcgcctgcgccaacgccttcaacaacagcattatccccgaggacacattcttcccaagcagcgacgtgccctgcgacgtgaagctggtggaaaagagcttcgagacagacaccaacctgaacttccagaacctgagcgtgatcggcttcagaatcctgctgctgaaagtggccggctttaacctgctgatgaccctgcggctgtggtccagccgcgccaagagaagcggatctggcgtgaagcagaccctgaatttcgacctgctgaagctggctggcgacgtggaatccaacccaggcccttctagaatggaatacgcctctgacgcttcactggaccccgaagccccgtggcctcccgcgccccgcgctcgcgcctgccgcgtactgccttgggccctggtcgcggggctgctgctgctgctgctgctcgctgccgcctgcgccgtcttcctcgcctgcccctgggccgtgtccggggctcgcgcctcgcccggctccgcggccagcccgagactccgcgagggtcccgagctttcgcccgacgatcccgccggcctcttggacctgcggcagggcatgtttgcgcagctggtggcccaaaatgttctgctgatcgatgggcccctgagctggtacagtgacccaggcctggcaggcgtgtccctgacggggggcctgagctacaaagaggacacgaaggagctggtggtggccaaggctggagtctactatgtcttctttcaactagagctgcggcgcgtggtggccggcgagggctcaggctccgtttcacttgcgctgcacctgcagccactgcgctctgctgctggggccgccgccctggctttgaccgtggacctgccacccgcctcctccgaggctcggaactcggccttcggtttccagggccgcttgctgcacctgagtgccggccagcgcctgggcgtccatcttcacactgaggccagggcacgccatgcctggcagcttacccagggcgccacagtcttgggactcttccgggtgacccccgaaatcccagccggactcccttcaccgaggtcggaacatatgtga

SEQ ID NO: 32313 - DNA, 2700 bp, synthetic construct
  source 1..2700: mol_type = other DNA
atggccttaccagtgaccgccttgctcctgccgctggccttgctgctccacgccgccaggccgagctacgtgctgacacagcctccatccgtgtctgtggctccaggacagaccgccagaatcacatgcggcggcaacaacatcggcggcaagagcgtgcactggtatcagcagccacctggacaggctccagtggtggtggtgtacgacgacagcgatagacctagcggcatccccgagagattcagcggcagcaattccggcaataccgccacactgaccatcagcagagtggaagctggcgacgaggccgtgtactactgccaagtgtgggacagcagcagcgatcacgtggtgtttggcggcggaacaaagctgacagtgcttctcgaggacctgaagaacgtgttcccacctgaggtggccgtgttcgagcctagcaaggccgagatcgcccacacccagaaagccaccctcgtgtgcctggctaccggcttctaccccgaccatgtggaactgtcttggtgggtcaacggcaaagaggtgcacagcggcgtgtgtaccgacccccagccactgaaagaacagcccgccctgaacgacagccggtactgcctgagcagcagactgagagtgtccgccaccttctggcagaacccccggaaccacttcagatgccaggtgcagttctacggcctgagcgagaacgacgagtggacccaggacagagccaagcccgtgacccagatcgtgtctgccgaagcctggggcagagccgattgcggcatcaccagcgccagctaccaccagggcgtgctgagcgccaccatcctgtacgagatcctgctgggcaaggccaccctgtacgccgtgctggtgtctgccctggtgctgatggctatggtcaagcggaaggacagccggggaagggccaagcgatctggatctggagcaacaaacttctcactactcaaacaagcaggtgacgtggaggagaatcccgggcctactagtatggactggatttggcgcatccttttccttgtcggcgctgctaccggcgcgcattccttcgaacaactccagctgcaagagtctggccctggcctggtcaagcctagcgaaacactgagcctgacctgtaccgtgtctggcggctctatcagctccagcagctatttctggggctggatcagacaacctcctggcaaaggactggaatggatcggctccatctactacagcggcatcacctactacaaccccagcctgaagtccagagtgaccatctccgtggacaccagcaagaaccagttctccctgaagctgagcagcgtgacagccgccgataccgccgtgtattattgtgccagacatgacggcgctgtggccggcctgtttgattattggggacagggcaccctggtcaccgtgtcatctgctacgcgtatccagaaccctgatcctgccgtgtaccagctgcgggatagcaagagcagcgacaagagcgtgtgtctgttcaccgacttcgacagccagaccaacgtgtcccagagcaaggactccgacgtgtacatcaccgataagtgcgtgctggacatgcggagcatggacttcaagagcaactccgccgtggcctggtccaacaagtccgatttcgcctgcgccaacgccttcaacaacagcattatccccgaggacacattcttcccaagcagcgacgtgccctgcgacgtgaagctggtggaaaagagcttcgagacagacaccaacctgaacttccagaacctgagcgtgatcggcttcagaatcctgctgctgaaagtggccggctttaacctgctgatgaccctgcggctgtggtccagccgcgccaagagaagcggatctggcgtgaagcagaccctgaatttcgacctgctgaagctggctggcgacgtggaatccaacccaggcccttctagaaccatgtgtagcagaggctgggatagctgtctggccctggaactgctgctgctccctctgtctctgctcgtgacatccatccagggacacctggtgcacatgaccgtggtgtctggcagcaacgtgaccctgaacatcagcgagagcctgcctgagaactacaagcagctgacctggttctacaccttcgaccagaaaatcgtggaatgggacagccggaagtccaagtatttcgagagcaagttcaagggcagagtgcggctggaccctcaaagcggagccctgtacatctccaaggtgcagaaagaggacaacagcacctacatcatgcgggtgctgaagaaaaccggcaacgagcaagagtggaagatcaagctccaggtgctggaccccgtgcctaagcctgtgattaagatcgagaagattgaggacatggacgacaactgctacctgaagctgagctgcgtgatccctggcgagagcgtgaactacacttggtacggcgacaagcggccctttccaaaagaactccagaacagcgtgctggaaaccacactgatgccccacaactacagccggtgctacacttgtcaggtgtccaacagcgtgtccagcaagaacggcaccgtgtgtctgagccctccatgtacactggcccggtcctttggagtggaatggatcgcctcttggctggtggtcaccgtgcctacaattctgggcctgctgctgacataa

SEQ ID NO: 32314 - DNA, 3153 bp, synthetic construct
  source 1..3153: mol_type = other DNA
atggccttaccagtgaccgccttgctcctgccgctggccttgctgctccacgccgccaggccgagctacgtgctgacacagcctccatccgtgtctgtggctccaggacagaccgccagaatcacatgcggcggcaacaacatcggcggcaagagcgtgcactggtatcagcagccacctggacaggctccagtggtggtggtgtacgacgacagcgatagacctagcggcatccccgagagattcagcggcagcaattccggcaataccgccacactgaccatcagcagagtggaagctggcgacgaggccgtgtactactgccaagtgtgggacagcagcagcgatcacgtggtgtttggcggcggaacaaagctgacagtgcttctcgaggacctgaagaacgtgttcccacctgaggtggccgtgttcgagcctagcgaggccgagatcagccacacccagaaagccaccctcgtgtgcctggctaccggcttctaccccgaccatgtggaactgtcttggtgggtcaacggcaaagaggtgcacagcggcgtgtctaccgacccccagccactgaaagaacagcccgccctgaacgacagccggtactgcctgagcagcagactgagagtgtccgccaccttctggcagaacccccggaaccacttcagatgccaggtgcagttctacggcctgagcgagaacgacgagtggacccaggacagagccaagcccgtgacccagatcgtgtctgccgaagcctggggcagagccgattgcggatcccagagcttcggcctgctggaccccaagctgtgctacctgctggatggcatcctgttcatctacggcgtgatcctgaccgccctgttcctgagagtgaagttcagcagaagcgccgacgcccctgcctaccagcagggacagaaccaactgtacaacgagctgaacctgggcagacgggaagagtacgacgtgctggacaagcggagaggcagggaccctgagatgggcggaaagccccggagaaagaacccccaggaaggactgtataacgaactccagaaagacaagatggccgaagcctacagcgagatcggcatgaagggcgagcggagaagaggcaagggccacgatggcctgtaccagggcctgagcaccgccaccaaggacacctatgacgccctgcacatgcaggccctgcctccaagaagggccaagcgatctggatctggagcaacaaacttctcactactcaaacaagcaggtgacgtggaggagaatcccgggcctactagtatggactggatttggcgcatccttttccttgtcggcgctgctaccggcgcgcattccttcgaacaactccagctgcaagagtctggccctggcctggtcaagcctagcgaaacactgagcctgacctgtaccgtgtctggcggctctatcagctccagcagctatttctggggctggatcagacaacctcctggcaaaggactggaatggatcggctccatctactacagcggcatcacctactacaaccccagcctgaagtccagagtgaccatctccgtggacaccagcaagaaccagttctccctgaagctgagcagcgtgacagccgccgataccgccgtgtattattgtgccagacatgacggcgctgtggccggcctgtttgattattggggacagggcaccctggtcaccgtgtcatctgctacgcgtatccagaaccctgatcctgccgtgtaccagctgcgggatagcaagagcagcgacaagagcgtgtgtctgttcaccgacttcgacagccagaccaacgtgtcccagagcaaggactccgacgtgtacatcaccgataagaccgtgctggacatgcggagcatggacttcaagagcaactccgccgtggcctggtccaacaagtccgatttcgcctgcgccaacgccttcaacaacagcattatccccgaggacacattcttcccaagccccgagagcagctgcggtacccagagttttgggttgttggaccctaaattgtgctatctgttggacggaatcctgttcatttacggagtgatcctgaccgcattgttcctgcgggttaagttttccagatccgcagacgcacccgcttaccaacaagggcagaaccaactctacaatgaacttaatttggggcggagggaagagtacgacgttctggacaaaaggaggggacgagatcccgagatgggcggaaagcctcgaaggaagaatccgcaagaggggctttataacgaactccagaaagataaaatggcagaagcctatagtgagattgggatgaagggagaaaggaggaggggtaaaggtcacgatgggttgtaccaaggattgagcacagccactaaagatacctatgatgcgctccacatgcaggccctgccgccaagacgcgccaagagaagcggatctggcgtgaagcagaccctgaatttcgacctgctgaagctggctggcgacgtggaatccaacccaggcccttctagaggccatatgaccgagtacaagcccacggtgcgcctcgccacccgcgacgacgtccccagggccgtacgcaccctcgccgccgcgttcgccgactaccccgccacgcgccacaccgtcgatccggaccgccacatcgagcgggtcaccgagctgcaagaactcttcctcacgcgcgtcgggctcgacatcggcaaggtgtgggtcgcggacgacggcgccgcggtggcggtctggaccacgccggagagcgtcgaagcgggggcggtgttcgccgagatcggcccgcgcatggccgagttgagcggttcccggctggccgcgcagcaacagatggaaggcctcctggcgccgcaccggcccaaggagcccgcgtggttcctggccaccgtcggcgtctcgcccgaccaccagggcaagggtctgggcagcgccgtcgtgctccccggagtggaggcggccgagcgcgccggggtgcccgccttcctggagacctccgcgccccgcaacctccccttctacgagcggctcggcttcaccgtcaccgccgacgtcgaggtgcccgaaggaccgcgcacctggtgcatgacccgcaagcccggtgcctga

SEQ ID NO: 32315 - DNA, 1473 bp, synthetic construct
  source 1..1473: mol_type = other DNA
atggccttaccagtgaccgccttgctcctgccgctggccttgctgctccacgccgccaggccggacatccagatgacacagagccctagcagcctgtctgccagcgtgggagacagagtgaccatcacatgcaaggccagcgaccacatcaacaactggctggcctggtatcagcagaagcctggacaggcccctaagctgctgatctacggcgctaccacactggaaacaggcgtgcccagcagattttctggcagcggctctggcaccgactacaccctgacaatatccagcctccagcctgaggacttcgccacctactactgtcagcagagctggaacaccccttggacattcggccagggcaccaagctggaaatcaagagaggcggaggcggaagtggaggcggaggatctggcggcggaggctctcaagttcagcttcaacagcctggcgctgagctggtcaaacctggcgcttctgtgaagatgagctgcaaagccagcggctacgccttcagcagctactggatcaactggatgaagcagaaacccggccagggactcgaatggatcggccaaatctatcccggcgacggcgacaccaactacaacggcaagttcaagggcagagccacactgaccgccgatacctctagcagcacagcctacatgcagctgagcagcctgaccagcgaagatagcgccgtgtacttctgtgcccggtccatcacaacagtcgtgggctgcgctatggactattggggccagggaacaagcgtgaccgtgtctagtacgcgtaccacgacgccagcgccgcgaccaccaacaccggcgcccaccatcgcgtcgcagcccctgtccctgcgcccagaggcgtgccggccagcggcggggggcgcagtgcacacgagggggctggacttcgcctgtgacatctacatctgggcgcccttggccgggacttgtggggtccttctcctgtcactggttatcaccctttactgcaaacggggcagaaagaaactcctgtatatattcaaacaaccatttatgagaccagtacaaactactcaagaggaagatggctgtagctgccgatttccagaagaagaagaaggaggatgtgaactgagagtgaagttcagcaggagcgcagacgcccccgcgtaccagcagggccagaaccagctctataacgagctgaatctaggacgaagagaggagtacgatgttttggacaagagacgtggccgggaccctgagatggggggaaagccgagaaggaagaaccctcaggaaggcctgtacaatgaactgcagaaagataagatggcggaggcctacagtgagattgggatgaaaggcgagcgccggaggggcaaggggcacgatggcctttaccagggtctcagtacagccaccaaggacacctacgacgcccttcacatgcaggccctgccccctcgctga

SEQ ID NO: 32316 - DNA, 1518 bp, synthetic construct
  source 1..1518: mol_type = other DNA
atggccttaccagtgaccgccttgctcctgccgctggccttgctgctccacgccgccaggccggacatccagatgacacagagccctagcagcctgtctgccagcgtgggagacagagtgaccatcacatgcaaggccagcgaccacatcaacaactggctggcctggtatcagcagaagcctggacaggcccctaagctgctgatctacggcgctaccacactggaaacaggcgtgcccagcagattttctggcagcggctctggcaccgactacaccctgacaatatccagcctccagcctgaggacttcgccacctactactgtcagcagagctggaacaccccttggacattcggccagggcaccaagctggaaatcaagagaggcggaggcggaagtggaggcggaggatctggcggcggaggctctcaagttcagcttcaacagcctggcgctgagctggtcaaacctggcgcttctgtgaagatgagctgcaaagccagcggctacgccttcagcagctactggatcaactggatgaagcagaaacccggccagggactcgaatggatcggccaaatctatcccggcgacggcgacaccaactacaacggcaagttcaagggcagagccacactgaccgccgatacctctagcagcacagcctacatgcagctgagcagcctgaccagcgaagatagcgccgtgtacttctgtgcccggtccatcacaacagtcgtgggctgcgctatggactattggggccagggaacaagcgtgaccgtgtctagtacgcgtggaatgaggactgaggatcttcccaaagctgtcgtctttctcgaaccccaatggtatcgggtgctcgaaaaagactctgtgacactgaaatgccaaggggcctactctcccgaggacaactccacacagtggtttcataatgagtccctcatcagctctcaggccagctcttatttcattgatgccgctacagtggacgactccggcgagtatcggtgtcagaccaatctgtctacactgtctgaccccgtgcagcttgaggtccacattggatggttgctcttgcaagccccacgctgggttttcaaagaggaagatccaatccatctgcggtgccacagctggaaaaacaccgctctccacaaagtcacatacctgcaaaatggcaaaggacgcaaatacttccatcacaattccgatttttacattccgaaggctaccctgaaagacagcggcagctatttctgccggggactcgtcggctccaagaatgtgtcctccgaaaccgtgaatatcacgattacccaaggactggctgtgcctacaatctctagcttctttccgcctggataccaagtctccttctgtcttgtgatggtcctcctgtttgctgtggacacaggactgtacttttccgtgaaaacgaacatccgcagctccacacgcgattggaaagatcacaagtttaaatggcgcaaagatccccaggacaagtaa

SEQ ID NO: 32317 - DNA, 2145 bp, synthetic construct
  source 1..2145: mol_type = other DNA
atggccttaccagtgaccgccttgctcctgccgctggccttgctgctccacgccgccaggccggacatccagatgacacagagccctagcagcctgtctgccagcgtgggagacagagtgaccatcacatgcaaggccagcgaccacatcaacaactggctggcctggtatcagcagaagcctggacaggcccctaagctgctgatctacggcgctaccacactggaaacaggcgtgcccagcagattttctggcagcggctctggcaccgactacaccctgacaatatccagcctccagcctgaggacttcgccacctactactgtcagcagagctggaacaccccttggacattcggccagggcaccaagctggaaatcaagagactcgaggacctgaagaacgtgttcccacctgaggtggccgtgttcgagcctagcgaggccgagatcagccacacccagaaagccaccctcgtgtgcctggctaccggcttctaccccgaccatgtggaactgtcttggtgggtcaacggcaaagaggtgcacagcggcgtgtctaccgacccccagccactgaaagaacagcccgccctgaacgacagccggtactgcctgagcagcagactgagagtgtccgccaccttctggcagaacccccggaaccacttcagatgccaggtgcagttctacggcctgagcgagaacgacgagtggacccaggacagagccaagcccgtgacccagatcgtgtctgccgaagcctggggcagagccgattgcggatcccagagcttcggcctgctggaccccaagctgtgctacctgctggatggcatcctgttcatctacggcgtgatcctgaccgccctgttcctgagagtgaagttcagcagaagcgccgacgcccctgcctaccagcagggacagaaccaactgtacaacgagctgaacctgggcagacgggaagagtacgacgtgctggacaagcggagaggcagggaccctgagatgggcggaaagccccggagaaagaacccccaggaaggactgtataacgaactccagaaagacaagatggccgaagcctacagcgagatcggcatgaagggcgagcggagaagaggcaagggccacgatggcctgtaccagggcctgagcaccgccaccaaggacacctatgacgccctgcacatgcaggccctgcctccaagaagggccaagcgatctggatctggagcaacaaacttctcactactcaaacaagcaggtgacgtggaggagaatcccgggcctactagtatggactggatttggcgcatccttttccttgtcggcgctgctaccggcgcgcattccttcgaacaagttcagcttcaacagcctggcgctgagctggtcaaacctggcgcttctgtgaagatgagctgcaaagccagcggctacgccttcagcagctactggatcaactggatgaagcagaaacccggccagggactcgaatggatcggccaaatctatcccggcgacggcgacaccaactacaacggcaagttcaagggcagagccacactgaccgccgatacctctagcagcacagcctacatgcagctgagcagcctgaccagcgaagatagcgccgtgtacttctgtgcccggtccatcacaacagtcgtgggctgcgctatggactattggggccagggaacaagcgtgaccgtgtctagtacgcgtatccagaaccctgatcctgccgtgtaccagctgcgggatagcaagagcagcgacaagagcgtgtgtctgttcaccgacttcgacagccagaccaacgtgtcccagagcaaggactccgacgtgtacatcaccgataagaccgtgctggacatgcggagcatggacttcaagagcaactccgccgtggcctggtccaacaagtccgatttcgcctgcgccaacgccttcaacaacagcattatccccgaggacacattcttcccaagccccgagagcagctgcggtaccattacccaaggactggctgtgcctacaatctctagcttctttccgcctggataccaagtctccttctgtcttgtgatggtcctcctgtttgctgtggacacaggactgtacttttccgtgtaa

SEQ ID NO: 32318 - DNA, 2724 bp, synthetic construct
  source 1..2724: mol_type = other DNA
atggccttaccagtgaccgccttgctcctgccgctggccttgctgctccacgccgccaggccggacatccagatgacacagagccctagcagcctgtctgccagcgtgggagacagagtgaccatcacatgcaaggccagcgaccacatcaacaactggctggcctggtatcagcagaagcctggacaggcccctaagctgctgatctacggcgctaccacactggaaacaggcgtgcccagcagattttctggcagcggctctggcaccgactacaccctgacaatatccagcctccagcctgaggacttcgccacctactactgtcagcagagctggaacaccccttggacattcggccagggcaccaagctggaaatcaagagactcgaggacctgaagaacgtgttcccacctgaggtggccgtgttcgagcctagcgaggccgagatcagccacacccagaaagccaccctcgtgtgcctggctaccggcttctaccccgaccatgtggaactgtcttggtgggtcaacggcaaagaggtgcacagcggcgtgtctaccgacccccagccactgaaagaacagcccgccctgaacgacagccggtactgcctgagcagcagactgagagtgtccgccaccttctggcagaacccccggaaccacttcagatgccaggtgcagttctacggcctgagcgagaacgacgagtggacccaggacagagccaagcccgtgacccagatcgtgtctgccgaagcctggggcagagccgattgcggatcccagagcttcggcctgctggaccccaagctgtgctacctgctggatggcatcctgttcatctacggcgtgatcctgaccgccctgttcctgagagtgaagttcagcagaagcgccgacgcccctgcctaccagcagggacagaaccaactgtacaacgagctgaacctgggcagacgggaagagtacgacgtgctggacaagcggagaggcagggaccctgagatgggcggaaagccccggagaaagaacccccaggaaggactgtataacgaactccagaaagacaagatggccgaagcctacagcgagatcggcatgaagggcgagcggagaagaggcaagggccacgatggcctgtaccagggcctgagcaccgccaccaaggacacctatgacgccctgcacatgcaggccctgcctccaagaagggccaagcgatctggatctggagcaacaaacttctcactactcaaacaagcaggtgacgtggaggagaatcccgggcctactagtatggactggatttggcgcatccttttccttgtcggcgctgctaccggcgcgcattccttcgaacaagttcagcttcaacagcctggcgctgagctggtcaaacctggcgcttctgtgaagatgagctgcaaagccagcggctacgccttcagcagctactggatcaactggatgaagcagaaacccggccagggactcgaatggatcggccaaatctatcccggcgacggcgacaccaactacaacggcaagttcaagggcagagccacactgaccgccgatacctctagcagcacagcctacatgcagctgagcagcctgaccagcgaagatagcgccgtgtacttctgtgcccggtccatcacaacagtcgtgggctgcgctatggactattggggccagggaacaagcgtgaccgtgtctagtacgcgtatccagaaccctgatcctgccgtgtaccagctgcgggatagcaagagcagcgacaagagcgtgtgtctgttcaccgacttcgacagccagaccaacgtgtcccagagcaaggactccgacgtgtacatcaccgataagaccgtgctggacatgcggagcatggacttcaagagcaactccgccgtggcctggtccaacaagtccgatttcgcctgcgccaacgccttcaacaacagcattatccccgaggacacattcttcccaagccccgagagcagctgcggtaccatcactcaaggtttggcagtgtcaaccatctcatcattctttccacctggctaccaagtgtccttctgcctggtcatggtgctgctgttcgccgtggataccggcctgtacttcagcgtcaagaccaacatccggtccagcaccagagactggaaggaccacaagttcaagtggcggaaggaccctcaggacaagcgcgccaagagaagcggatctggcgtgaagcagaccctgaatttcgacctgctgaagctggctggcgacgtggaatccaacccaggcccttctagaggccatatgtaccggatgcagctgctgagctgtatcgccctgtctctggccctggtcacaaatagcaactgggttaacgtgatctccgacctgaagaagatcgaggacctgatccagtccatgcacatcgacgccacactgtacaccgagagcgacgtgcaccctagctgtaaagtgaccgccatgaagtgctttctgctggaactgcaagtgatctccctggaaagcggcgacgccagcatccacgacaccgtggagaacctgattatcctggctaacaacagcctgagcagcaacggcaacgtgaccgagtccggctgtaaagagtgcgaggaactggaagagaagaatatcaaagagttcctccagagcttcgtgcacatcgtgcagatgttcatcaacaccagctaa

SEQ ID NO: 32319 - DNA, 2925 bp, synthetic construct
  source 1..2925: mol_type = other DNA
atggccttaccagtgaccgccttgctcctgccgctggccttgctgctccacgccgccaggccggacatccagatgacacagagccctagcagcctgtctgccagcgtgggagacagagtgaccatcacatgcaaggccagcgaccacatcaacaactggctggcctggtatcagcagaagcctggacaggcccctaagctgctgatctacggcgctaccacactggaaacaggcgtgcccagcagattttctggcagcggctctggcaccgactacaccctgacaatatccagcctccagcctgaggacttcgccacctactactgtcagcagagctggaacaccccttggacattcggccagggcaccaagctggaaatcaagagactcgaggacctgaagaacgtgttcccacctgaggtggccgtgttcgagcctagcgaggccgagatcagccacacccagaaagccaccctcgtgtgcctggctaccggcttctaccccgaccatgtggaactgtcttggtgggtcaacggcaaagaggtgcacagcggcgtgtctaccgacccccagccactgaaagaacagcccgccctgaacgacagccggtactgcctgagcagcagactgagagtgtccgccaccttctggcagaacccccggaaccacttcagatgccaggtgcagttctacggcctgagcgagaacgacgagtggacccaggacagagccaagcccgtgacccagatcgtgtctgccgaagcctggggcagagccgattgcggatcccagagcttcggcctgctggaccccaagctgtgctacctgctggatggcatcctgttcatctacggcgtgatcctgaccgccctgttcctgagagtgaagttcagcagaagcgccgacgcccctgcctaccagcagggacagaaccaactgtacaacgagctgaacctgggcagacgggaagagtacgacgtgctggacaagcggagaggcagggaccctgagatgggcggaaagccccggagaaagaacccccaggaaggactgtataacgaactccagaaagacaagatggccgaagcctacagcgagatcggcatgaagggcgagcggagaagaggcaagggccacgatggcctgtaccagggcctgagcaccgccaccaaggacacctatgacgccctgcacatgcaggccctgcctccaagaagggccaagcgatctggatctggagcaacaaacttctcactactcaaacaagcaggtgacgtggaggagaatcccgggcctactagtatggactggatttggcgcatccttttccttgtcggcgctgctaccggcgcgcattccttcgaacaagttcagcttcaacagcctggcgctgagctggtcaaacctggcgcttctgtgaagatgagctgcaaagccagcggctacgccttcagcagctactggatcaactggatgaagcagaaacccggccagggactcgaatggatcggccaaatctatcccggcgacggcgacaccaactacaacggcaagttcaagggcagagccacactgaccgccgatacctctagcagcacagcctacatgcagctgagcagcctgaccagcgaagatagcgccgtgtacttctgtgcccggtccatcacaacagtcgtgggctgcgctatggactattggggccagggaacaagcgtgaccgtgtctagtacgcgtatccagaaccctgatcctgccgtgtaccagctgcgggatagcaagagcagcgacaagagcgtgtgtctgttcaccgacttcgacagccagaccaacgtgtcccagagcaaggactccgacgtgtacatcaccgataagaccgtgctggacatgcggagcatggacttcaagagcaactccgccgtggcctggtccaacaagtccgatttcgcctgcgccaacgccttcaacaacagcattatccccgaggacacattcttcccaagccccgagagcagctgcggtaccatcactcaaggtttggcagtgtcaaccatctcatcattctttccacctggctaccaagtgtccttctgcctggtcatggtgctgctgttcgccgtggataccggcctgtacttcagcgtcaagaccaacatccggtccagcaccagagactggaaggaccacaagttcaagtggcggaaggaccctcaggacaagagggccaagcgatctggatctggagcaacaaacttctcactactcaaacaagcaggtgacgtggaggagaatcccgggccttctagaatgtaccggatgcagctgctgagctgtatcgccctgtctctggccctggtcacaaatagcaactgggttaacgtgatctccgacctgaagaagatcgaggacctgatccagtccatgcacatcgacgccacactgtacaccgagagcgacgtgcaccctagctgtaaagtgaccgccatgaagtgctttctgctggaactgcaagtgatctccctggaaagcggcgacgccagcatccacgacaccgtgaagaacctgattatcctggctaacaacagcctgagcagcaacggcaacgtgaccgagtccggctgtaaagagtgcgaggaactggaagagaagaatatcaaagagttcctccagagcttcgtgcacatcgtgcagatgttcatcaacaccagcaagatcgaagtgatgtaccctcctccttacctggacaacgagaagtccaacggcaccatcatccacgtgaagggcaagcacctgtgtccttctccactgttccccggacctagcaagcctttctgggtgctcgttgttgttggcggcgtgctggcctgttacagcctgctggttaccgtggccttcatcatcttttgggtccgaagcaagcggagctaa

SEQ ID NO: 32320 - DNA, 3075 bp, synthetic construct
  source 1..3075: mol_type = other DNA
atggccttaccagtgaccgccttgctcctgccgctggccttgctgctccacgccgccaggccggacatccagatgacacagagccctagcagcctgtctgccagcgtgggagacagagtgaccatcacatgcaaggccagcgaccacatcaacaactggctggcctggtatcagcagaagcctggacaggcccctaagctgctgatctacggcgctaccacactggaaacaggcgtgcccagcagattttctggcagcggctctggcaccgactacaccctgacaatatccagcctccagcctgaggacttcgccacctactactgtcagcagagctggaacaccccttggacattcggccagggcaccaagctggaaatcaagagactcgaggacctgaagaacgtgttcccacctgaggtggccgtgttcgagcctagcgaggccgagatcagccacacccagaaagccaccctcgtgtgcctggctaccggcttctaccccgaccatgtggaactgtcttggtgggtcaacggcaaagaggtgcacagcggcgtgtctaccgacccccagccactgaaagaacagcccgccctgaacgacagccggtactgcctgagcagcagactgagagtgtccgccaccttctggcagaacccccggaaccacttcagatgccaggtgcagttctacggcctgagcgagaacgacgagtggacccaggacagagccaagcccgtgacccagatcgtgtctgccgaagcctggggcagagccgattgcggatcccagagcttcggcctgctggaccccaagctgtgctacctgctggatggcatcctgttcatctacggcgtgatcctgaccgccctgttcctgagagtgaagttcagcagaagcgccgacgcccctgcctaccagcagggacagaaccaactgtacaacgagctgaacctgggcagacgggaagagtacgacgtgctggacaagcggagaggcagggaccctgagatgggcggaaagccccggagaaagaacccccaggaaggactgtataacgaactccagaaagacaagatggccgaagcctacagcgagatcggcatgaagggcgagcggagaagaggcaagggccacgatggcctgtaccagggcctgagcaccgccaccaaggacacctatgacgccctgcacatgcaggccctgcctccaagaagggccaagcgatctggatctggagcaacaaacttctcactactcaaacaagcaggtgacgtggaggagaatcccgggcctactagtatggactggatttggcgcatccttttccttgtcggcgctgctaccggcgcgcattccttcgaacaagttcagcttcaacagcctggcgctgagctggtcaaacctggcgcttctgtgaagatgagctgcaaagccagcggctacgccttcagcagctactggatcaactggatgaagcagaaacccggccagggactcgaatggatcggccaaatctatcccggcgacggcgacaccaactacaacggcaagttcaagggcagagccacactgaccgccgatacctctagcagcacagcctacatgcagctgagcagcctgaccagcgaagatagcgccgtgtacttctgtgcccggtccatcacaacagtcgtgggctgcgctatggactattggggccagggaacaagcgtgaccgtgtctagtacgcgtatccagaaccctgatcctgccgtgtaccagctgcgggatagcaagagcagcgacaagagcgtgtgtctgttcaccgacttcgacagccagaccaacgtgtcccagagcaaggactccgacgtgtacatcaccgataagaccgtgctggacatgcggagcatggacttcaagagcaactccgccgtggcctggtccaacaagtccgatttcgcctgcgccaacgccttcaacaacagcattatccccgaggacacattcttcccaagccccgagagcagctgcggtaccatcactcaaggtttggcagtgtcaaccatctcatcattctttccacctggctaccaagtgtccttctgcctggtcatggtgctgctgttcgccgtggataccggcctgtacttcagcgtcaagaccaacatccggtccagcaccagagactggaaggaccacaagttcaagtggcggaaggaccctcaggacaagagggccaagcgatctggatctggagcaacaaacttctcactactcaaacaagcaggtgacgtggaggagaatcccgggccttctagaatggaatacgcctctgacgcttcactggaccccgaagccccgtggcctcccgcgccccgcgctcgcgcctgccgcgtactgccttgggccctggtcgcggggctgctgctgctgctgctgctcgctgccgcctgcgccgtcttcctcgcctgcccctgggccgtgtccggggctcgcgcctcgcccggctccgcggccagcccgagactccgcgagggtcccgagctttcgcccgacgatcccgccggcctcttggacctgcggcagggcatgtttgcgcagctggtggcccaaaatgttctgctgatcgatgggcccctgagctggtacagtgacccaggcctggcaggcgtgtccctgacggggggcctgagctacaaagaggacacgaaggagctggtggtggccaaggctggagtctactatgtcttctttcaactagagctgcggcgcgtggtggccggcgagggctcaggctccgtttcacttgcgctgcacctgcagccactgcgctctgctgctggggccgccgccctggctttgaccgtggacctgccacccgcctcctccgaggctcggaactcggccttcggtttccagggccgcttgctgcacctgagtgccggccagcgcctgggcgtccatcttcacactgaggccagggcacgccatgcctggcagcttacccagggcgccacagtcttgggactcttccgggtgacccccgaaatcccagccggactcccttcaccgaggtcggaacatatgtga

SEQ ID NO: 32321 - DNA, 3039 bp, synthetic construct
  source 1..3039: mol_type = other DNA
atggccttaccagtgaccgccttgctcctgccgctggccttgctgctccacgccgccaggccggacatccagatgacacagagccctagcagcctgtctgccagcgtgggagacagagtgaccatcacatgcaaggccagcgaccacatcaacaactggctggcctggtatcagcagaagcctggacaggcccctaagctgctgatctacggcgctaccacactggaaacaggcgtgcccagcagattttctggcagcggctctggcaccgactacaccctgacaatatccagcctccagcctgaggacttcgccacctactactgtcagcagagctggaacaccccttggacattcggccagggcaccaagctggaaatcaagagactcgaggacctgaagaacgtgttcccacctgaggtggccgtgttcgagcctagcgaggccgagatcagccacacccagaaagccaccctcgtgtgcctggctaccggcttctaccccgaccatgtggaactgtcttggtgggtcaacggcaaagaggtgcacagcggcgtgtctaccgacccccagccactgaaagaacagcccgccctgaacgacagccggtactgcctgagcagcagactgagagtgtccgccaccttctggcagaacccccggaaccacttcagatgccaggtgcagttctacggcctgagcgagaacgacgagtggacccaggacagagccaagcccgtgacccagatcgtgtctgccgaagcctggggcagagccgattgcggatcccagagcttcggcctgctggaccccaagctgtgctacctgctggatggcatcctgttcatctacggcgtgatcctgaccgccctgttcctgagagtgaagttcagcagaagcgccgacgcccctgcctaccagcagggacagaaccaactgtacaacgagctgaacctgggcagacgggaagagtacgacgtgctggacaagcggagaggcagggaccctgagatgggcggaaagccccggagaaagaacccccaggaaggactgtataacgaactccagaaagacaagatggccgaagcctacagcgagatcggcatgaagggcgagcggagaagaggcaagggccacgatggcctgtaccagggcctgagcaccgccaccaaggacacctatgacgccctgcacatgcaggccctgcctccaagaagggccaagcgatctggatctggagcaacaaacttctcactactcaaacaagcaggtgacgtggaggagaatcccgggcctactagtatggactggatttggcgcatccttttccttgtcggcgctgctaccggcgcgcattccttcgaacaagttcagcttcaacagcctggcgctgagctggtcaaacctggcgcttctgtgaagatgagctgcaaagccagcggctacgccttcagcagctactggatcaactggatgaagcagaaacccggccagggactcgaatggatcggccaaatctatcccggcgacggcgacaccaactacaacggcaagttcaagggcagagccacactgaccgccgatacctctagcagcacagcctacatgcagctgagcagcctgaccagcgaagatagcgccgtgtacttctgtgcccggtccatcacaacagtcgtgggctgcgctatggactattggggccagggaacaagcgtgaccgtgtctagtacgcgtatccagaaccctgatcctgccgtgtaccagctgcgggatagcaagagcagcgacaagagcgtgtgtctgttcaccgacttcgacagccagaccaacgtgtcccagagcaaggactccgacgtgtacatcaccgataagaccgtgctggacatgcggagcatggacttcaagagcaactccgccgtggcctggtccaacaagtccgatttcgcctgcgccaacgccttcaacaacagcattatccccgaggacacattcttcccaagccccgagagcagctgcggtaccatcactcaaggtttggcagtgtcaaccatctcatcattctttccacctggctaccaagtgtccttctgcctggtcatggtgctgctgttcgccgtggataccggcctgtacttcagcgtcaagaccaacatccggtccagcaccagagactggaaggaccacaagttcaagtggcggaaggaccctcaggacaagagggccaagcgatctggatctggagcaacaaacttctcactactcaaacaagcaggtgacgtggaggagaatcccgggccttctagaaccatgtgtagcagaggctgggatagctgtctggccctggaactgctgctgctccctctgtctctgctcgtgacatccatccagggacacctggtgcacatgaccgtggtgtctggcagcaacgtgaccctgaacatcagcgagagcctgcctgagaactacaagcagctgacctggttctacaccttcgaccagaaaatcgtggaatgggacagccggaagtccaagtatttcgagagcaagttcaagggcagagtgcggctggaccctcaaagcggagccctgtacatctccaaggtgcagaaagaggacaacagcacctacatcatgcgggtgctgaagaaaaccggcaacgagcaagagtggaagatcaagctccaggtgctggaccccgtgcctaagcctgtgattaagatcgagaagattgaggacatggacgacaactgctacctgaagctgagctgcgtgatccctggcgagagcgtgaactacacttggtacggcgacaagcggccctttccaaaagaactccagaacagcgtgctggaaaccacactgatgccccacaactacagccggtgctacacttgtcaggtgtccaacagcgtgtccagcaagaacggcaccgtgtgtctgagccctccatgtacactggcccggtcctttggagtggaatggatcgcctcttggctggtggtcaccgtgcctacaattctgggcctgctgctgacataa

SEQ ID NO: 32322 - DNA, 1467 bp, synthetic construct; identical to SEQ ID NO: 32308
  source 1..1467: mol_type = other DNA

SEQ ID NO: 32323 - DNA, 1872 bp, synthetic construct; identical to SEQ ID NO: 32309
  source 1..1872: mol_type = other DNA

SEQ ID NO: 32324 - DNA, 1455 bp, synthetic construct
  source 1..1455: mol_type = other DNA
atggccttaccagtgaccgccttgctcctgccgctggccttgctgctccacgccgccaggccggacatccagatgacacagagccctagcagcctgtctgccagcgtgggagacagagtgaccatcacatgcaaggccagccaggatgtgggcacagccgtggattggtatcagcagaagcctggcaaggcccctaagctgctgatctactgggccagcacaagacacacaggcgtgcccagcagattttctggcagcggctctggcaccgacttcaccctgacaatatccagcctccagcctgaggacttcgccacctactactgccagcagtacaacagctaccctctgaccttcggccagggcaccaaggtggaaatcaaaagaggcggaggcggatctggcggcggaggtagcggtggcggaggatctgaagtgcagctggttgaatcaggtggcggcctggttcaacctggcggatctctgagactgagctgtgccgccagcggctacacctttaccgagtacacaatccactgggtccgacaggcccctggcaaaggacttgagtgggtcgccaacatcaaccccaacaatggcggcaccacctacaaccagaagttcgaggacagattcaccatcagccgggacaacagcaagaacaccctgtacctccagatgaactccctgagagccgaggacaccgccgtgtactattgtgccagaggctggaacttcgactactggggccagggaacactggtcaccgttagctctacgcgtaccacgacgccagcgccgcgaccaccaacaccggcgcccaccatcgcgtcgcagcccctgtccctgcgcccagaggcgtgccggccagcggcggggggcgcagtgcacacgagggggctggacttcgcctgtgacatctacatctgggcgcccttggccgggacttgtggggtccttctcctgtcactggttatcaccctttactgcaaacggggcagaaagaaactcctgtatatattcaaacaaccatttatgagaccagtacaaactactcaagaggaagatggctgtagctgccgatttccagaagaagaagaaggaggatgtgaactgagagtgaagttcagcaggagcgcagacgcccccgcgtaccagcagggccagaaccagctctataacgagctgaatctaggacgaagagaggagtacgatgttttggacaagagacgtggccgggaccctgagatggggggaaagccgagaaggaagaaccctcaggaaggcctgtacaatgaactgcagaaagataagatggcggaggcctacagtgagattgggatgaaaggcgagcgccggaggggcaaggggcacgatggcctttaccagggtctcagtacagccaccaaggacacctacgacgcccttcacatgcaggccctgccccctcgctga

SEQ ID NO: 32325 - DNA, 1500 bp, synthetic construct
  source 1..1500: mol_type = other DNA
atggccttaccagtgaccgccttgctcctgccgctggccttgctgctccacgccgccaggccggacatccagatgacacagagccctagcagcctgtctgccagcgtgggagacagagtgaccatcacatgcaaggccagccaggatgtgggcacagccgtggattggtatcagcagaagcctggcaaggcccctaagctgctgatctactgggccagcacaagacacacaggcgtgcccagcagattttctggcagcggctctggcaccgacttcaccctgacaatatccagcctccagcctgaggacttcgccacctactactgccagcagtacaacagctaccctctgaccttcggccagggcaccaaggtggaaatcaaaagaggcggaggcggatctggcggcggaggtagcggtggcggaggatctgaagtgcagctggttgaatcaggtggcggcctggttcaacctggcggatctctgagactgagctgtgccgccagcggctacacctttaccgagtacacaatccactgggtccgacaggcccctggcaaaggacttgagtgggtcgccaacatcaaccccaacaatggcggcaccacctacaaccagaagttcgaggacagattcaccatcagccgggacaacagcaagaacaccctgtacctccagatgaactccctgagagccgaggacaccgccgtgtactattgtgccagaggctggaacttcgactactggggccagggaacactggtcaccgttagctctacgcgtggaatgaggactgaggatcttcccaaagctgtcgtctttctcgaaccccaatggtatcgggtgctcgaaaaagactctgtgacactgaaatgccaaggggcctactctcccgaggacaactccacacagtggtttcataatgagtccctcatcagctctcaggccagctcttatttcattgatgccgctacagtggacgactccggcgagtatcggtgtcagaccaatctgtctacactgtctgaccccgtgcagcttgaggtccacattggatggttgctcttgcaagccccacgctgggttttcaaagaggaagatccaatccatctgcggtgccacagctggaaaaacaccgctctccacaaagtcacatacctgcaaaatggcaaaggacgcaaatacttccatcacaattccgatttttacattccgaaggctaccctgaaagacagcggcagctatttctgccggggactcgtcggctccaagaatgtgtcctccgaaaccgtgaatatcacgattacccaaggactggctgtgcctacaatctctagcttctttccgcctggataccaagtctccttctgtcttgtgatggtcctcctgtttgctgtggacacaggactgtacttttccgtgaaaacgaacatccgcagctccacacgcgattggaaagatcacaagtttaaatggcgcaaagatccccaggacaagtaa

SEQ ID NO: 32326 - DNA, 2226 bp, synthetic construct
  source 1..2226: mol_type = other DNA
atggccttaccagtgaccgccttgctcctgccgctggccttgctgctccacgccgccaggccggacatccagatgacacagagccctagcagcctgtctgccagcgtgggagacagagtgaccatcacatgcaaggccagccaggatgtgggcacagccgtggattggtatcagcagaagcctggcaaggcccctaagctgctgatctactgggccagcacaagacacacaggcgtgcccagcagattttctggcagcggctctggcaccgacttcaccctgacaatatccagcctccagcctgaggacttcgccacctactactgccagcagtacaacagctaccctctgaccttcggccagggcaccaaggtggaaatcaaaagacccgaggacctgaagaacgtgttcccacctgaggtggccgtgttcgagcctagcgaggccgagatcagccacacccagaaagccaccctcgtgtgcctggctaccggcttctaccccgaccatgtggaactgtcttggtgggtcaacggcaaagaggtgcacagcggcgtgtctaccgacccccagccactgaaagaacagcccgccctgaacgacagccggtactgcctgagcagcagactgagagtgtccgccaccttctggcagaacccccggaaccacttcagatgccaggtgcagttctacggcctgagcgagaacgacgagtggacccaggacagagccaagcccgtgacccagatcgtgtctgccgaagcctggggcagagccgattgcggatcccagagcttcggcctgctggaccccaagctgtgctacctgctggatggcatcctgttcatctacggcgtgatcctgaccgccctgttcctgagagtgaagttcagcagaagcgccgacgcccctgcctaccagcagggacagaaccaactgtacaacgagctgaacctgggcagacgggaagagtacgacgtgctggacaagcggagaggcagggaccctgagatgggcggaaagccccggagaaagaacccccaggaaggactgtataacgaactccagaaagacaagatggccgaagcctacagcgagatcggcatgaagggcgagcggagaagaggcaagggccacgatggcctgtaccagggcctgagcaccgccaccaaggacacctatgacgccctgcacatgcaggccctgcctccaagaagggccaagcgatctggatctggagcaacaaacttctcactactcaaacaagcaggtgacgtggaggagaatcccgggcctactagtatggactggatttggcgcatccttttccttgtcggcgctgctaccggcgcgcattccttcgaagtgcagctggttgaatcaggtggcggcctggttcaacctggcggatctctgagactgagctgtgccgccagcggctacacctttaccgagtacacaatccactgggtccgacaggcccctggcaaaggacttgagtgggtcgccaacatcaaccccaacaatggcggcaccacctacaaccagaagttcgaggacagattcaccatcagccgggacaacagcaagaacaccctgtacctccagatgaactccctgagagccgaggacaccgccgtgtactattgtgccagaggctggaacttcgactactggggccagggaacactggtcaccgttagctctacgcgtgcctctacaaagggaccctccgtgtttcctctggctcccagcagcaagtctacaagcggaggaacagccgctctgggctgcctggtcaaggattactttcccgagcctgtgaccgtgtcctggaatagcggagcactgacaagcggcgtgcacacctttccagccgtgctgcaaagcagcggcctgtactctctgagcagcgtggtcacagtgcctagctctagcctgggcacccagacctacatctgcaatgtgaaccacaagcctagcaacaccaaggtggacaagagagtggaacccaagagctgtggtaccatcactcaaggtttggcagtgtcaaccatctcatcattctttccacctggctaccaagtgtccttctgcctggtcatggtgctgctgttcgccgtggataccggcctgtacttcagcgtcaagaccaacatccggtccagcaccagagactggaaggaccacaagttcaagtggcggaaggacccccaggacaagtaa

SEQ ID NO: 32327 - DNA, 2199 bp, synthetic construct
  source 1..2199: mol_type = other DNA
atggccttaccagtgaccgccttgctcctgccgctggccttgctgctccacgccgccaggccggacatccagatgacacagagccctagcagcctgtctgccagcgtgggagacagagtgaccatcacatgcaaggccagccaggatgtgggcacagccgtggattggtatcagcagaagcctggcaaggcccctaagctgctgatctactgggccagcacaagacacacaggcgtgcccagcagattttctggcagcggctctggcaccgacttcaccctgacaatatccagcctccagcctgaggacttcgccacctactactgccagcagtacaacagctaccctctgaccttcggccagggcaccaaggtggaaatcaaaagactcgaggacctgaagaacgtgttcccacctgaggtggccgtgttcgagcctagcgaggccgagatcagccacacccagaaagccaccctcgtgtgcctggctaccggcttctaccccgaccatgtggaactgtcttggtgggtcaacggcaaagaggtgcacagcggcgtgtctaccgacccccagccactgaaagaacagcccgccctgaacgacagccggtactgcctgagcagcagactgagagtgtccgccaccttctggcagaacccccggaaccacttcagatgccaggtgcagttctacggcctgagcgagaacgacgagtggacccaggacagagccaagcccgtgacccagatcgtgtctgccgaagcctggggcagagccgattgcggatcccagagcttcggcctgctggaccccaagctgtgctacctgctggatggcatcctgttcatctacggcgtgatcctgaccgccctgttcctgagagtgaagttcagcagaagcgccgacgcccctgcctaccagcagggacagaaccaactgtacaacgagctgaacctgggcagacgggaagagtacgacgtgctggacaagcggagaggcagggaccctgagatgggcggaaagccccggagaaagaacccccaggaaggactgtataacgaactccagaaagacaagatggccgaagcctacagcgagatcggcatgaagggcgagcggagaagaggcaagggccacgatggcctgtaccagggcctgagcaccgccaccaaggacacctatgacgccctgcacatgcaggccctgcctccaagaagggccaagcgatctggatctggagcaacaaacttctcactactcaaacaagcaggtgacgtggaggagaatcccgggcctactagtatggactggatttggcgcatccttttccttgtcggcgctgctaccggcgcgcattccttcgaagtgcagctggttgaatcaggtggcggcctggttcaacctggcggatctctgagactgagctgtgccgccagcggctacacctttaccgagtacacaatccactgggtccgacaggcccctggcaaaggacttgagtgggtcgccaacatcaaccccaacaatggcggcaccacctacaaccagaagttcgaggacagattcaccatcagccgggacaacagcaagaacaccctgtacctccagatgaactccctgagagccgaggacaccgccgtgtactattgtgccagaggctggaacttcgactactggggccagggaacactggtcaccgttagctctacgcgtatccagaaccctgatcctgccgtgtaccagctgcgggatagcaagagcagcgacaagagcgtgtgtctgttcaccgacttcgacagccagaccaacgtgtcccagagcaaggactccgacgtgtacatcaccgataagaccgtgctggacatgcggagcatggacttcaagagcaactccgccgtggcctggtccaacaagtccgatttcgcctgcgccaacgccttcaacaacagcattatccccgaggacacattcttcccaagccccgagagcagctgcggtaccatcactcaaggtttggcagtgtcaaccatctcatcattctttccacctggctaccaagtgtccttctgcctggtcatggtgctgctgttcgccgtggataccggcctgtacttcagcgtcaagaccaacatccggtccagcaccagagactggaaggaccacaagttcaagtggcggaaggacccccaggacaagtaa

SEQ ID NO: 32328 - DNA, 3054 bp, synthetic construct
  source 1..3054: mol_type = other DNA
atggccttaccagtgaccgccttgctcctgccgctggccttgctgctccacgccgccaggccggacatccagatgacacagagccctagcagcctgtctgccagcgtgggagacagagtgaccatcacatgcaaggccagccaggatgtgggcacagccgtggattggtatcagcagaagcctggcaaggcccctaagctgctgatctactgggccagcacaagacacacaggcgtgcccagcagattttctggcagcggctctggcaccgacttcaccctgacaatatccagcctccagcctgaggacttcgccacctactactgccagcagtacaacagctaccctctgaccttcggccagggcaccaaggtggaaatcaaaagactcgaggacctgaagaacgtgttcccacctgaggtggccgtgttcgagcctagcgaggccgagatcagccacacccagaaagccaccctcgtgtgcctggctaccggcttctaccccgaccatgtggaactgtcttggtgggtcaacggcaaagaggtgcacagcggcgtgtctaccgacccccagccactgaaagaacagcccgccctgaacgacagccggtactgcctgagcagcagactgagagtgtccgccaccttctggcagaacccccggaaccacttcagatgccaggtgcagttctacggcctgagcgagaacgacgagtggacccaggacagagccaagcccgtgacccagatcgtgtctgccgaagcctggggcagagccgattgcggatcccagagcttcggcctgctggaccccaagctgtgctacctgctggatggcatcctgttcatctacggcgtgatcctgaccgccctgttcctgagagtgaagttcagcagaagcgccgacgcccctgcctaccagcagggacagaaccaactgtacaacgagctgaacctgggcagacgggaagagtacgacgtgctggacaagcggagaggcagggaccctgagatgggcggaaagccccggagaaagaacccccaggaaggactgtataacgaactccagaaagacaagatggccgaagcctacagcgagatcggcatgaagggcgagcggagaagaggcaagggccacgatggcctgtaccagggcctgagcaccgccaccaaggacacctatgacgccctgcacatgcaggccctgcctccaagaagggccaagcgatctggatctggagcaacaaacttctcactactcaaacaagcaggtgacgtggaggagaatcccgggcctactagtatggactggatttggcgcatccttttccttgtcggcgctgctaccggcgcgcattccttcgaagtgcagctggttgaatcaggtggcggcctggttcaacctggcggatctctgagactgagctgtgccgccagcggctacacctttaccgagtacacaatccactgggtccgacaggcccctggcaaaggacttgagtgggtcgccaacatcaaccccaacaatggcggcaccacctacaaccagaagttcgaggacagattcaccatcagccgggacaacagcaagaacaccctgtacctccagatgaactccctgagagccgaggacaccgccgtgtactattgtgccagaggctggaacttcgactactggggccagggaacactggtcaccgttagctctacgcgtatccagaaccctgatcctgccgtgtaccagctgcgggatagcaagagcagcgacaagagcgtgtgtctgttcaccgacttcgacagccagaccaacgtgtcccagagcaaggactccgacgtgtacatcaccgataagaccgtgctggacatgcggagcatggacttcaagagcaactccgccgtggcctggtccaacaagtccgatttcgcctgcgccaacgccttcaacaacagcattatccccgaggacacattcttcccaagccccgagagcagctgcggtaccatcactcaaggtttggcagtgtcaaccatctcatcattctttccacctggctaccaagtgtccttctgcctggtcatggtgctgctgttcgccgtggataccggcctgtacttcagcgtcaagaccaacatccggtccagcaccagagactggaaggaccacaagttcaagtggcggaaggaccctcaggacaagagggccaagcgatctggatctggagcaacaaacttctcactactcaaacaagcaggtgacgtggaggagaatcccgggccttctagaatggaatacgcctctgacgcttcactggaccccgaagccccgtggcctcccgcgccccgcgctcgcgcctgccgcgtactgccttgggccctggtcgcggggctgctgctgctgctgctgctcgctgccgcctgcgccgtcttcctcgcctgcccctgggccgtgtccggggctcgcgcctcgcccggctccgcggccagcccgagactccgcgagggtcccgagctttcgcccgacgatcccgccggcctcttggacctgcggcagggcatgtttgcgcagctggtggcccaaaatgttctgctgatcgatgggcccctgagctggtacagtgacccaggcctggcaggcgtgtccctgacggggggcctgagctacaaagaggacacgaaggagctggtggtggccaaggctggagtctactatgtcttctttcaactagagctgcggcgcgtggtggccggcgagggctcaggctccgtttcacttgcgctgcacctgcagccactgcgctctgctgctggggccgccgccctggctttgaccgtggacctgccacccgcctcctccgaggctcggaactcggccttcggtttccagggccgcttgctgcacctgagtgccggccagcgcctgggcgtccatcttcacactgaggccagggcacgccatgcctggcagcttacccagggcgccacagtcttgggactcttccgggtgacccccgaaatcccagccggactcccttcaccgaggtcggaacatatgtga

SEQ ID NO: 32329 - DNA, 3258 bp, synthetic construct
  source 1..3258: mol_type = other DNA
atggccttaccagtgaccgccttgctcctgccgctggccttgctgctccacgccgccaggccggacatccagatgacacagagccctagcagcctgtctgccagcgtgggagacagagtgaccatcacatgcaaggccagccaggatgtgggcacagccgtggattggtatcagcagaagcctggcaaggcccctaagctgctgatctactgggccagcacaagacacacaggcgtgcccagcagattttctggcagcggctctggcaccgacttcaccctgacaatatccagcctccagcctgaggacttcgccacctactactgccagcagtacaacagctaccctctgaccttcggccagggcaccaaggtggaaatcaaaagactcgaggacctgaagaacgtgttcccacctgaggtggccgtgttcgagcctagcgaggccgagatcagccacacccagaaagccaccctcgtgtgcctggctaccggcttctaccccgaccatgtggaactgtcttggtgggtcaacggcaaagaggtgcacagcggcgtgtctaccgacccccagccactgaaagaacagcccgccctgaacgacagccggtactgcctgagcagcagactgagagtgtccgccaccttctggcagaacccccggaaccacttcagatgccaggtgcagttctacggcctgagcgagaacgacgagtggacccaggacagagccaagcccgtgacccagatcgtgtctgccgaagcctggggcagagccgattgcggatcccagagcttcggcctgctggaccccaagctgtgctacctgctggatggcatcctgttcatctacggcgtgatcctgaccgccctgttcctgagagtgaagttcagcagaagcgccgacgcccctgcctaccagcagggacagaaccaactgtacaacgagctgaacctgggcagacgggaagagtacgacgtgctggacaagcggagaggcagggaccctgagatgggcggaaagccccggagaaagaacccccaggaaggactgtataacgaactccagaaagacaagatggccgaagcctacagcgagatcggcatgaagggcgagcggagaagaggcaagggccacgatggcctgtaccagggcctgagcaccgccaccaaggacacctatgacgccctgcacatgcaggccctgcctccaagaagggccaagcgatctggatctggagcaacaaacttctcactactcaaacaagcaggtgacgtggaggagaatcccgggcctactagtatggactggatttggcgcatccttttccttgtcggcgctgctaccggcgcgcattccttcgaagtgcagctggttgaatcaggtggcggcctggttcaacctggcggatctctgagactgagctgtgccgccagcggctacacctttaccgagtacacaatccactgggtccgacaggcccctggcaaaggacttgagtgggtcgccaacatcaaccccaacaatggcggcaccacctacaaccagaagttcgaggacagattcaccatcagccgggacaacagcaagaacaccctgtacctccagatgaactccctgagagccgaggacaccgccgtgtactattgtgccagaggctggaacttcgactactggggccagggaacactggtcaccgttagctctacgcgtatccagaaccctgatcctgccgtgtaccagctgcgggatagcaagagcagcgacaagagcgtgtgtctgttcaccgacttcgacagccagaccaacgtgtcccagagcaaggactccgacgtgtacatcaccgataagaccgtgctggacatgcggagcatggacttcaagagcaactccgccgtggcctggtccaacaagtccgatttcgcctgcgccaacgccttcaacaacagcattatccccgaggacacattcttcccaagccccgagagcagctgcggtacccagagttttgggttgttggaccctaaattgtgctatctgttggacggaatcctgttcatttacggagtgatcctgaccgcattgttcctgcgggttaagttttccagatccgcagacgcacccgcttaccaacaagggcagaaccaactctacaatgaacttaatttggggcggagggaagagtacgacgttctggacaaaaggaggggacgagatcccgagatgggcggaaagcctcgaaggaagaatccgcaagaggggctttataacgaactccagaaagataaaatggcagaagcctatagtgagattgggatgaagggagaaaggaggaggggtaaaggtcacgatgggttgtaccaaggattgagcacagccactaaagatacctatgatgcgctccacatgcaggccctgccgccaagacgcgccaagagaagcggatctggcgtgaagcagaccctgaatttcgacctgctgaagctggctggcgacgtggaatccaacccaggcccttctagaaccatgtgtagcagaggctgggatagctgtctggccctggaactgctgctgctccctctgtctctgctcgtgacatccatccagggacacctggtgcacatgaccgtggtgtctggcagcaacgtgaccctgaacatcagcgagagcctgcctgagaactacaagcagctgacctggttctacaccttcgaccagaaaatcgtggaatgggacagccggaagtccaagtatttcgagagcaagttcaagggcagagtgcggctggaccctcaaagcggagccctgtacatctccaaggtgcagaaagaggacaacagcacctacatcatgcgggtgctgaagaaaaccggcaacgagcaagagtggaagatcaagctccaggtgctggaccccgtgcctaagcctgtgattaagatcgagaagattgaggacatggacgacaactgctacctgaagctgagctgcgtgatccctggcgagagcgtgaactacacttggtacggcgacaagcggccctttccaaaagaactccagaacagcgtgctggaaaccacactgatgccccacaactacagccggtgctacacttgtcaggtgtccaacagcgtgtccagcaagaacggcaccgtgtgtctgagccctccatgtacactggcccggtcctttggagtggaatggatcgcctcttggctggtggtcaccgtgcctacaattctgggcctgctgctgacataa

SEQ ID NO: 32330 - DNA, 3300 bp, synthetic construct
  source 1..3300: mol_type = other DNA
atggccttaccagtgaccgccttgctcctgccgctggccttgctgctccacgccgccaggccggacatccagatgacacagagccctagcagcctgtctgccagcgtgggagacagagtgaccatcacatgcaaggccagccaggatgtgggcacagccgtggattggtatcagcagaagcctggcaaggcccctaagctgctgatctactgggccagcacaagacacacaggcgtgcccagcagattttctggcagcggctctggcaccgacttcaccctgacaatatccagcctccagcctgaggacttcgccacctactactgccagcagtacaacagctaccctctgaccttcggccagggcaccaaggtggaaatcaaaagactcgaggacctgaagaacgtgttcccacctgaggtggccgtgttcgagcctagcgaggccgagatcagccacacccagaaagccaccctcgtgtgcctggctaccggcttctaccccgaccatgtggaactgtcttggtgggtcaacggcaaagaggtgcacagcggcgtgtctaccgacccccagccactgaaagaacagcccgccctgaacgacagccggtactgcctgagcagcagactgagagtgtccgccaccttctggcagaacccccggaaccacttcagatgccaggtgcagttctacggcctgagcgagaacgacgagtggacccaggacagagccaagcccgtgacccagatcgtgtctgccgaagcctggggcagagccgattgcctcgaggacctgaagaacgtgttcccacctgaggtggccgtgttcgagcctagcgaggccgagatcagccacacccagaaagccaccctcgtgtgcctggctaccggcttctaccccgaccatgtggaactgtcttggtgggtcaacggcaaagaggtgcacagcggcgtgtctaccgacccccagccactgaaagaacagcccgccctgaacgacagccggtactgcctgagcagcagactgagagtgtccgccaccttctggcagaacccccggaaccacttcagatgccaggtgcagttctacggcctgagcgagaacgacgagtggacccaggacagagccaagcccgtgacccagatcgtgtctgccgaagcctggggcagagccgattgcggatcccagagcttcggcctgctggaccccaagctgtgctacctgctggatggcatcctgttcatctacggcgtgatcctgaccgccctgttcctgagagtgaagttcagcagaagcgccgacgcccctgcctaccagcagggacagaaccaactgtacaacgagctgaacctgggcagacgggaagagtacgacgtgctggacaagcggagaggcagggaccctgagatgggcggaaagccccggagaaagaacccccaggaaggactgtataacgaactccagaaagacaagatggccgaagcctacagcgagatcggcatgaagggcgagcggagaagaggcaagggccacgatggcctgtaccagggcctgagcaccgccaccaaggacacctatgacgccctgcacatgcaggccctgcctccaagaagggccaagcgatctggatctggagcaacaaacttctcactactcaaacaagcaggtgacgtggaggagaatcccgggcctactagtatggactggatttggcgcatccttttccttgtcggcgctgctaccggcgcgcattccttcgaagtgcagctggttgaatcaggtggcggcctggttcaacctggcggatctctgagactgagctgtgccgccagcggctacacctttaccgagtacacaatccactgggtccgacaggcccctggcaaaggacttgagtgggtcgccaacatcaaccccaacaatggcggcaccacctacaaccagaagttcgaggacagattcaccatcagccgggacaacagcaagaacaccctgtacctccagatgaactccctgagagccgaggacaccgccgtgtactattgtgccagaggctggaacttcgactactggggccagggaacactggtcaccgttagctctacgcgtatccagaaccctgatcctgccgtgtaccagctgcgggatagcaagagcagcgacaagagcgtgtgtctgttcaccgacttcgacagccagaccaacgtgtcccagagcaaggactccgacgtgtacatcaccgataagaccgtgctggacatgcggagcatggacttcaagagcaactccgccgtggcctggtccaacaagtccgatttcgcctgcgccaacgccttcaacaacagcattatccccgaggacacattcttcccaagccccgagagcagctgcggtaccatcactcaaggtttggcagtgtcaaccatctcatcattctttccacctggctaccaagtgtccttctgcctggtcatggtgctgctgttcgccgtggataccggcctgtacttcagcgtcaagaccaacatccggtccagcaccagagactggaaggaccacaagttcaagtggcggaaggaccctcaggacaagagggccaagcgatctggatctggagcaacaaacttctcactactcaaacaagcaggtgacgtggaggagaatcccgggccttctagaatgtaccggatgcagctgctgagctgtatcgccctgtctctggccctggtcacaaatagcaactgggttaacgtgatctccgacctgaagaagatcgaggacctgatccagtccatgcacatcgacgccacactgtacaccgagagcgacgtgcaccctagctgtaaagtgaccgccatgaagtgctttctgctggaactgcaagtgatctccctggaaagcggcgacgccagcatccacgacaccgtgaagaacctgattatcctggctaacaacagcctgagcagcaacggcaacgtgaccgagtccggctgtaaagagtgcgaggaactggaagagaagaatatcaaagagttcctccagagcttcgtgcacatcgtgcagatgttcatcaacaccagcaagatcgaagtgatgtaccctcctccttacctggacaacgagaagtccaacggcaccatcatccacgtgaagggcaagcacctgtgtccttctccactgttccccggacctagcaagcctttctgggtgctcgttgttgttggcggcgtgctggcctgttacagcctgctggttaccgtggccttcatcatcttttgggtccgaagcaagcggagctaa

SEQ ID NO: 32331 - DNA, 1473 bp, synthetic construct; identical to SEQ ID NO: 32315
  source 1..1473: mol_type = other DNA

SEQ ID NO: 32332 - DNA, 1518 bp, synthetic construct; identical to SEQ ID NO: 32316
  source 1..1518: mol_type = other DNA

SEQ ID NO: 32333 - DNA, 2145 bp, synthetic construct; identical to SEQ ID NO: 32317
  source 1..2145: mol_type = other DNA

SEQ ID NO: 32334 - DNA, 2724 bp, synthetic construct; identical to SEQ ID NO: 32318
  source 1..2724: mol_type = other DNA

SEQ ID NO: 32335 - DNA, 2925 bp, synthetic construct; identical to SEQ ID NO: 32319
  source 1..2925: mol_type = other DNA

SEQ ID NO: 32336 - DNA, 3075 bp, synthetic construct; identical to SEQ ID NO: 32320
  source 1..3075: mol_type = other DNA

SEQ ID NO: 32337 - DNA, 1467 bp, synthetic construct; identical to SEQ ID NO: 32308
  source 1..1467: mol_type = other DNA

SEQ ID NO: 32338 - DNA, 1872 bp, synthetic construct; identical to SEQ ID NO: 32309
  source 1..1872: mol_type = other DNA

SEQ ID NO: 32339 - DNA, 2286 bp, synthetic construct
  source 1..2286: mol_type = other DNA
atggccttaccagtgaccgccttgctcctgccgctggccttgctgctccacgccgccaggccggacatccagatgacacagagccctagcagcctgtctgccagcgtgggagacagagtgaccatcacatgcaaggccagcgaccacatcaacaactggctggcctggtatcagcagaagcctggacaggcccctaagctgctgatctacggcgctaccacactggaaacaggcgtgcccagcagattttctggcagcggctctggcaccgactacaccctgacaatatccagcctccagcctgaggacttcgccacctactactgtcagcagagctggaacaccccttggacattcggccagggcaccaagctggaaatcaagagactcgaggacctgaagaacgtgttcccacctgaggtggccgtgttcgagcctagcgaggccgagatcagccacacccagaaagccaccctcgtgtgcctggctaccggcttctaccccgaccatgtggaactgtcttggtgggtcaacggcaaagaggtgcacagcggcgtgtgtaccgacccccagccactgaaagaacagcccgccctgaacgacagccggtactgcctgagcagcagactgagagtgtccgccaccttctggcagaacccccggaaccacttcagatgccaggtgcagttctacggcctgagcgagaacgacgagtggacccaggacagagccaagcccgtgacccagatcgtgtctgccgaagcctggggcagagccgattgcggctttaccagcgagagctaccagcagggcgtgctgagcgccaccatcctgtacgagatcctgctgggcaaggccaccctgtacgccgtgctggtgtctgccctggtgctgatggctatggtcaagcggaaggacagccggggaagggccaagcgatctggatctggagcaacaaacttctcactactcaaacaagcaggtgacgtggaggagaatcccgggcctactagtgccaccatggactggatttggcgcatccttttccttgtcggcgctgctaccggcgcccattccgggcccgaagtgcaactggttgaatccggtggcggcctggtgcaacccggcggatctctcagacttagctgtgccgcctccggcagaaccttcacaatgggatggtacaggcaggctccagggaaagagagagagttcgtcgccgccatctctctgtctcccacactggcctactacgccgactctgtgaaaggccggttcaccatctccagagataatagcaagaacaccgtggtgctgcaaatgaactctctgagagccgaggatacagccctgtactattgtgccgctgaccggaagtccgtgatgagcatcagacccgattactggggacagggcacactggtcacagtgtctagtggatccggcggcggaggatctggcggaggcggatctgggggcggaggctctttcgaacaagttcagcttcaacagcctggcgctgagctggtcaaacctggcgcttctgtgaagatgagctgcaaagccagcggctacgccttcagcagctactggatcaactggatgaagcagaaacccggccagggactcgaatggatcggccaaatctatcccggcgacggcgacaccaactacaacggcaagttcaagggcagagccacactgaccgccgatacctctagcagcacagcctacatgcagctgagcagcctgaccagcgaagatagcgccgtgtacttctgtgcccggtccatcacaacagtcgtgggctgcgctatggactattggggccagggaacaagcgtgaccgtgtctagtacgcgtatccagaaccctgatcctgccgtgtaccagctgcgggatagcaagagcagcgacaagagcgtgtgtctgttcaccgacttcgacagccagaccaacgtgtcccagagcaaggactccgacgtgtacatcaccgataagtgcgtgctggacatgcggagcatggacttcaagagcaactccgccgtggcctggtccaacaagtccgatttcgcctgcgccaacgccttcaacaacagcattatccccgaggacacattcttcccaagccccgagagcagctgcgacgtgaagctggtggaaaagagcttcgagacagacaccaacctgaacttccagaacctgagcgtgatcggcttcagaatcctgctgctgaaagtggccggctttaacctgctgatgaccctgcggctgtggtccagctaa

SEQ ID NO: 32340 - DNA, 2286 bp, synthetic construct
  source 1..2286: mol_type = other DNA
atggccttaccagtgaccgccttgctcctgccgctggccttgctgctccacgccgccaggccggacatccagatgacacagagccctagcagcctgtctgccagcgtgggagacagagtgaccatcacatgcaaggccagcgaccacatcaacaactggctggcctggtatcagcagaagcctggacaggcccctaagctgctgatctacggcgctaccacactggaaacaggcgtgcccagcagattttctggcagcggctctggcaccgactacaccctgacaatatccagcctccagcctgaggacttcgccacctactactgtcagcagagctggaacaccccttggacattcggccagggcaccaagctggaaatcaagagactcgaggacctgaagaacgtgttcccacctgaggtggccgtgttcgagcctagcgaggccgagatcagccacacccagaaagccaccctcgtgtgcctggctaccggcttctaccccgaccatgtggaactgtcttggtgggtcaacggcaaagaggtgcacagcggcgtgtgtaccgacccccagccactgaaagaacagcccgccctgaacgacagccggtactgcctgagcagcagactgagagtgtccgccaccttctggcagaacccccggaaccacttcagatgccaggtgcagttctacggcctgagcgagaacgacgagtggacccaggacagagccaagcccgtgacccagatcgtgtctgccgaagcctggggcagagccgattgcggctttaccagcgagagctaccagcagggcgtgctgagcgccaccatcctgtacgagatcctgctgggcaaggccaccctgtacgccgtgctggtgtctgccctggtgctgatggctatggtcaagcggaaggacagccggggaagggccaagcgatctggatctggagcaacaaacttctcactactcaaacaagcaggtgacgtggaggagaatcccgggcctactagtgccaccatggactggatttggcgcatccttttccttgtcggcgctgctaccggcgcccattccgggcccgaagtgcaactggttgaatccggtggcggcctggtgcaagcaggcggatctctcagacttagctgtgccgcctccggcagaaccttcacaatgggatggtttaggcaggctccagggaaagagagagagttcgtcgccgccatctctctgtctcccacactggcctactacgccgactctgtgaaaggccggttcaccatctccagagataatgccaagaacaccgtggtgctgcaaatgaactctctgaaacccgaggatacagccctgtactattgtgccgctgaccggaagtccgtgatgagcatcagacccgattactggggacagggcacacaagtcacagtgtcctctggatccggcggcggaggatctggcggaggcggatctgggggcggaggctctttcgaacaagttcagcttcaacagcctggcgctgagctggtcaaacctggcgcttctgtgaagatgagctgcaaagccagcggctacgccttcagcagctactggatcaactggatgaagcagaaacccggccagggactcgaatggatcggccaaatctatcccggcgacggcgacaccaactacaacggcaagttcaagggcagagccacactgaccgccgatacctctagcagcacagcctacatgcagctgagcagcctgaccagcgaagatagcgccgtgtacttctgtgcccggtccatcacaacagtcgtgggctgcgctatggactattggggccagggaacaagcgtgaccgtgtctagtacgcgtatccagaaccctgatcctgccgtgtaccagctgcgggatagcaagagcagcgacaagagcgtgtgtctgttcaccgacttcgacagccagaccaacgtgtcccagagcaaggactccgacgtgtacatcaccgataagtgcgtgctggacatgcggagcatggacttcaagagcaactccgccgtggcctggtccaacaagtccgatttcgcctgcgccaacgccttcaacaacagcattatccccgaggacacattcttcccaagccccgagagcagctgcgacgtgaagctggtggaaaagagcttcgagacagacaccaacctgaacttccagaacctgagcgtgatcggcttcagaatcctgctgctgaaagtggccggctttaacctgctgatgaccctgcggctgtggtccagctaa

SEQ ID NO: 32341 - DNA, 2697 bp, synthetic construct
  source 1..2697: mol_type = other DNA
atggccttaccagtgaccgccttgctcctgccgctggccttgctgctccacgccgccaggccggaagtgcagctggttgaatctggcggaggactggttcaggctggcggatctctgagactgtcttgtgccgccagcggcagaacctttagcatgggctggtttagacaggcccctggcaaagagagagagttcgtcgccgccatcacatactctggcggcagcccttactacgccgactctgtgaagggcagattcaccatcagccgggacaacgccaagaacaccgtgtacctccagatgaacagcctgaagcctgaggacaccgccgtgtactactgcgccgccaatccaacatacggcagcgactggaacgccgagaattggggccagggaacccaagtgacagtgtctagcggtaccggcggaggcggatctggcggcggaggtagcggtggcggaggatctgaattcgacatccagatgacacagagccctagcagcctgtctgccagcgtgggagacagagtgaccatcacatgcaaggccagcgaccacatcaacaactggctggcctggtatcagcagaagcctggacaggcccctaagctgctgatctacggcgctaccacactggaaacaggcgtgcccagcagattttctggcagcggctctggcaccgactacaccctgacaatatccagcctccagcctgaggacttcgccacctactactgtcagcagagctggaacaccccttggacattcggccagggcaccaagctggaaatcaagagactcgaggacctgaagaacgtgttcccacctgaggtggccgtgttcgagcctagcgaggccgagatcagccacacccagaaagccaccctcgtgtgcctggctaccggcttctaccccgaccatgtggaactgtcttggtgggtcaacggcaaagaggtgcacagcggcgtgtgtaccgacccccagccactgaaagaacagcccgccctgaacgacagccggtactgcctgagcagcagactgagagtgtccgccaccttctggcagaacccccggaaccacttcagatgccaggtgcagttctacggcctgagcgagaacgacgagtggacccaggacagagccaagcccgtgacccagatcgtgtctgccgaagcctggggcagagccgattgcggctttaccagcgagagctaccagcagggcgtgctgagcgccaccatcctgtacgagatcctgctgggcaaggccaccctgtacgccgtgctggtgtctgccctggtgctgatggctatggtcaagcggaaggacagccggggaagggccaagcgatctggatctggagcaacaaacttctcactactcaaacaagcaggtgacgtggaggagaatcccgggcctactagtgccaccatggactggatttggcgcatccttttccttgtcggcgctgctaccggcgcccattccgggcccgaagtgcaactggttgaatccggtggcggcctggtgcaagcaggcggatctctcagacttagctgtgccgcctccggcagaaccttcacaatgggatggtttaggcaggctccagggaaagagagagagttcgtcgccgccatctctctgtctcccacactggcctactacgccgactctgtgaaaggccggttcaccatctccagagataatgccaagaacaccgtggtgctgcaaatgaactctctgaaacccgaggatacagccctgtactattgtgccgctgaccggaagtccgtgatgagcatcagacccgattactggggacagggcacacaagtcacagtgtcctctggatccggcggcggaggatctggcggaggcggatctgggggcggaggctctttcgaacaagttcagcttcaacagcctggcgctgagctggtcaaacctggcgcttctgtgaagatgagctgcaaagccagcggctacgccttcagcagctactggatcaactggatgaagcagaaacccggccagggactcgaatggatcggccaaatctatcccggcgacggcgacaccaactacaacggcaagttcaagggcagagccacactgaccgccgatacctctagcagcacagcctacatgcagctgagcagcctgaccagcgaagatagcgccgtgtacttctgtgcccggtccatcacaacagtcgtgggctgcgctatggactattggggccagggaacaagcgtgaccgtgtctagtacgcgtatccagaaccctgatcctgccgtgtaccagctgcgggatagcaagagcagcgacaagagcgtgtgtctgttcaccgacttcgacagccagaccaacgtgtcccagagcaaggactccgacgtgtacatcaccgataagtgcgtgctggacatgcggagcatggacttcaagagcaactccgccgtggcctggtccaacaagtccgatttcgcctgcgccaacgccttcaacaacagcattatccccgaggacacattcttcccaagccccgagagcagctgcgacgtgaagctggtggaaaagagcttcgagacagacaccaacctgaacttccagaacctgagcgtgatcggcttcagaatcctgctgctgaaagtggccggctttaacctgctgatgaccctgcggctgtggtccagctaa

SEQ ID NO: 32342 - DNA, 2295 bp, synthetic construct
  source 1..2295: mol_type = other DNA
atggccttaccagtgaccgccttgctcctgccgctggccttgctgctccacgccgccaggccggagatcgtgctgacacagtctcccgccacactgtcactgtctccaggcgaaagagccacactgagctgtagagccagccagagcgtgtcctcttacctggcctggtatcagcagaagcctggacaggctccccggctgctgatctacgatgccagcaatagagccacaggcatccccgccagattttctggctctggcagcggcaccgatttcaccctgaccataagcagcctggaacctgaggacttcgccgtgtactactgccagcagagaagcaactggcctcctacattcggccagggcaccaaggtggaaatcaaactcgaggacctgaagaacgtgttcccacctgaggtggccgtgttcgagcctagcgaggccgagatcagccacacccagaaagccaccctcgtgtgcctggctaccggcttctaccccgaccatgtggaactgtcttggtgggtcaacggcaaagaggtgcacagcggcgtgtgtaccgacccccagccactgaaagaacagcccgccctgaacgacagccggtactgcctgagcagcagactgagagtgtccgccaccttctggcagaacccccggaaccacttcagatgccaggtgcagttctacggcctgagcgagaacgacgagtggacccaggacagagccaagcccgtgacccagatcgtgtctgccgaagcctggggcagagccgattgcggctttaccagcgagagctaccagcagggcgtgctgagcgccaccatcctgtacgagatcctgctgggcaaggccaccctgtacgccgtgctggtgtctgccctggtgctgatggctatggtcaagcggaaggacagccggggaagggccaagcgatctggatctggagcaacaaacttctcactactcaaacaagcaggtgacgtggaggagaatcccgggcctactagtgccaccatggactggatttggcgcatccttttccttgtcggcgctgctaccggcgcccattccgggcccgaagtgcaactggttgaatccggtggcggcctggtgcaagcaggcggatctctcagacttagctgtgccgcctccggcagaaccttcacaatgggatggtttaggcaggctccagggaaagagagagagttcgtcgccgccatctctctgtctcccacactggcctactacgccgactctgtgaaaggccggttcaccatctccagagataatgccaagaacaccgtggtgctgcaaatgaactctctgaaacccgaggatacagccctgtactattgtgccgctgaccggaagtccgtgatgagcatcagacccgattactggggacagggcacacaagtcacagtgtcctctggatccggcggcggaggatctggcggaggcggatctgggggcggaggctctttcgaacaactccagctgcaagagtctggccccggactggtcaagcctagcgaaacactgagcctgacctgtaccgtgtctggcggcagcatcagcagcagctcttattggtggggctggaccagacagcctcctggcagaggactggaatggatcggcaccatgtactacagcggcaacatctactacaaccccagcctccagagccgggccaccatctctgtggacaccagcaagaaccagttcagcctgaagctgagcagcgtgacagccgccgataccgccgtgtattattgcgccagacatgtgggctacagctacggcagacggttctggtacttcgacctgtggggcagaggcaccctggtcacagtttcttctacgcgtatccagaaccctgatcctgccgtgtaccagctgcgggatagcaagagcagcgacaagagcgtgtgtctgttcaccgacttcgacagccagaccaacgtgtcccagagcaaggactccgacgtgtacatcaccgataagtgcgtgctggacatgcggagcatggacttcaagagcaactccgccgtggcctggtccaacaagtccgatttcgcctgcgccaacgccttcaacaacagcattatccccgaggacacattcttcccaagccccgagagcagctgcgacgtgaagctggtggaaaagagcttcgagacagacaccaacctgaacttccagaacctgagcgtgatcggcttcagaatcctgctgctgaaagtggccggctttaacctgctgatgaccctgcggctgtggtccagctaa

SEQ ID NO: 32343 - DNA, 1848 bp, synthetic construct
  source 1..1848: mol_type = other DNA
atggccttaccagtgaccgccttgctcctgccgctggccttgctgctccacgccgccaggccggacatccagatgacacagagccctagcagcctgtctgccagcgtgggagacagagtgaccatcacatgcaaggccagccaggatgtgggcacagccgtggattggtatcagcagaagcctggcaaggcccctaagctgctgatctactgggccagcacaagacacacaggcgtgcccagcagattttctggcagcggctctggcaccgacttcaccctgacaatatccagcctccagcctgaggacttcgccacctactactgccagcagtacaacagctaccctctgaccttcggccagggcaccaaggtggaaatcaaaagactcgaggacctgaagaacgtgttcccacctgaggtggccgtgttcgagcctagcgaggccgagatcagccacacccagaaagccaccctcgtgtgcctggctaccggcttctaccccgaccatgtggaactgtcttggtgggtcaacggcaaagaggtgcacagcggcgtgtgtaccgacccccagccactgaaagaacagcccgccctgaacgacagccggtactgcctgagcagcagactgagagtgtccgccaccttctggcagaacccccggaaccacttcagatgccaggtgcagttctacggcctgagcgagaacgacgagtggacccaggacagagccaagcccgtgacccagatcgtgtctgccgaagcctggggcagagccgattgcggctttaccagcgagagctaccagcagggcgtgctgagcgccaccatcctgtacgagatcctgctgggcaaggccaccctgtacgccgtgctggtgtctgccctggtgctgatggctatggtcaagcggaaggacagccggggaagggccaagcgatctggatctggagcaacaaacttctcactactcaaacaagcaggtgacgtggaggagaatcccgggcctactagtatggactggatttggcgcatccttttccttgtcggcgctgctaccggcgcgcattccttcgaagtgcagctggttgaatcaggtggcggcctggttcaacctggcggatctctgagactgagctgtgccgccagcggctacacctttaccgagtacacaatccactgggtccgacaggcccctggcaaaggacttgagtgggtcgccaacatcaaccccaacaatggcggcaccacctacaaccagaagttcgaggacagattcaccatcagccgggacaacagcaagaacaccctgtacctccagatgaactccctgagagccgaggacaccgccgtgtactattgtgccagaggctggaacttcgactactggggccagggaacactggtcaccgttagctctacgcgtatccagaaccctgatcctgccgtgtaccagctgcgggatagcaagagcagcgacaagagcgtgtgtctgttcaccgacttcgacagccagaccaacgtgtcccagagcaaggactccgacgtgtacatcaccgataagtgcgtgctggacatgcggagcatggacttcaagagcaactccgccgtggcctggtccaacaagtccgatttcgcctgcgccaacgccttcaacaacagcattatccccgaggacacattcttcccaagccccgagagcagctgcgacgtgaagctggtggaaaagagcttcgagacagacaccaacctgaacttccagaacctgagcgtgatcggcttcagaatcctgctgctgaaagtggccggctttaacctgctgatgaccctgcggctgtggtccagctaa

SEQ ID NO: 32344 - DNA, 2430 bp, synthetic construct
  source 1..2430: mol_type = other DNA
atggccttaccagtgaccgccttgctcctgccgctggccttgctgctccacgccgccaggccggacatccagatgacacagagccctagcagcctgtctgccagcgtgggagacagagtgaccatcacatgcaaggccagccaggatgtgggcacagccgtggattggtatcagcagaagcctggcaaggcccctaagctgctgatctactgggccagcacaagacacacaggcgtgcccagcagattttctggcagcggctctggcaccgacttcaccctgacaatatccagcctccagcctgaggacttcgccacctactactgccagcagtacaacagctaccctctgaccttcggccagggcaccaaggtggaaatcaaaagactcgaggacctgaagaacgtgttcccacctgaggtggccgtgttcgagcctagcgaggccgagatcagccacacccagaaagccaccctcgtgtgcctggctaccggcttctaccccgaccatgtggaactgtcttggtgggtcaacggcaaagaggtgcacagcggcgtgtctaccgacccccagccactgaaagaacagcccgccctgaacgacagccggtactgcctgagcagcagactgagagtgtccgccaccttctggcagaacccccggaaccacttcagatgccaggtgcagttctacggcctgagcgagaacgacgagtggacccaggacagagccaagcccgtgacccagatcgtgtctgccgaagcctggggcagagccgattgcggatcccagagcttcggcctgctggaccccaagctgtgctacctgctggatggcatcctgttcatctacggcgtgatcctgaccgccctgttcctgagagtgaagttcagcagaagcgccgacgcccctgcctaccagcagggacagaaccaactgtacaacgagctgaacctgggcagacgggaagagtacgacgtgctggacaagcggagaggcagggaccctgagatgggcggaaagccccggagaaagaacccccaggaaggactgtataacgaactccagaaagacaagatggccgaagcctacagcgagatcggcatgaagggcgagcggagaagaggcaagggccacgatggcctgtaccagggcctgagcaccgccaccaaggacacctatgacgccctgcacatgcaggccctgcctccaagaagggccaagcgatctggatctggagcaacaaacttctcactactcaaacaagcaggtgacgtggaggagaatcccgggcctactagtatggactggatttggcgcatccttttccttgtcggcgctgctaccggcgcgcattccttcgaagtgcagctggttgaatcaggtggcggcctggttcaacctggcggatctctgagactgagctgtgccgccagcggctacacctttaccgagtacacaatccactgggtccgacaggcccctggcaaaggacttgagtgggtcgccaacatcaaccccaacaatggcggcaccacctacaaccagaagttcgaggacagattcaccatcagccgggacaacagcaagaacaccctgtacctccagatgaactccctgagagccgaggacaccgccgtgtactattgtgccagaggctggaacttcgactactggggccagggaacactggtcaccgttagctctacgcgtatccagaaccctgatcctgccgtgtaccagctgcgggatagcaagagcagcgacaagagcgtgtgtctgttcaccgacttcgacagccagaccaacgtgtcccagagcaaggactccgacgtgtacatcaccgataagaccgtgctggacatgcggagcatggacttcaagagcaactccgccgtggcctggtccaacaagtccgatttcgcctgcgccaacgccttcaacaacagcattatccccgaggacacattcttcccaagccccgagagcagctgcggtacccagagttttgggttgttggaccctaaattgtgctatctgttggacggaatcctgttcatttacggagtgatcctgaccgcattgttcctgcgggttaagttttccagatccgcagacgcacccgcttaccaacaagggcagaaccaactctacaatgaacttaatttggggcggagggaagagtacgacgttctggacaaaaggaggggacgagatcccgagatgggcggaaagcctcgaaggaagaatccgcaagaggggctttataacgaactccagaaagataaaatggcagaagcctatagtgagattgggatgaagggagaaaggaggaggggtaaaggtcacgatgggttgtaccaaggattgagcacagccactaaagatacctatgatgcgctccacatgcaggccctgccgccaagataa

SEQ ID NO: 32345 - DNA, 1530 bp, synthetic construct
  source 1..1530: mol_type = other DNA
atggaatacgccagcgacgcttctctggaccctgaagctccttggcctcctgctcctagagccagagcttgtagagtgctgccctgggctcttgtggctggactgctgcttcttctgctgcttgccgctgcctgtgccgtgtttcttgcttgtccttgggctgtgtccggggccagagcatctcctggatctgctgcaagccccagactgagagagggacctgagctgagccctgatgatccagccggactgctggatctgagacagggcatgtttgcccagctggtggcccagaatgtgctgctgattgatggccctctgagctggtacagcgatcctggacttgctggcgttagcctgactggcggcctgagctacaaagaggacaccaaagaactggtggtggctaaggccggcgtgtactacgtgttctttcagctggaactgcggagagtggtggccggcgaaggatctggatctgtgtctctggccctgcacctccagcctcttagatcagctgctggtgctgctgcactggccctgacagttgatctgcctcctgcctctagcgaggccagaaacagcgcctttggcttccaaggcagactgctgcacctgtctgctggacagagactgggagtgcatctgcacacagaggccagagccagacatgcctggcaactgacacagggcgctacagtgctgggcctgtttagagtgacccctgagatccctgctggcctgccttctccaagaagcgaatctagaggatctggagcaacaaacttctcactactcaaacaagcaggtgacgtggaggagaatcccgggcctgggatccacaccatgtaccggatgcagctgctgagctgtatcgccctgtctctggccctggtcacaaatagcgcccctaccagcagcagcaccaagaaaacccagctgcaactggaacacctcctgctggacctccagatgatcctgaacggcatcaacaactacaagaaccccaagctgacccggatgctgaccttcaagttctacatgcccaagaaggccaccgagctgaagcacctccagtgcctggaagaggaactgaagcccctggaagaagtgctgaatctggcccagagcaagaacttccacctgaggccaagggacctgatctccaacatcaacgtgatcgtgctggaactgaaaggcagcgagacaaccttcatgtgcgagtacgccgacgagacagctaccatcgtggaatttctgaatcggtggatcaccttctgccagagcatcatcagcaccctgacagcgcgtaaaattgaagttatgtatcctcctccttacctagacaatgagaagagcaatggaaccattatccatgtgaaagggaaacacctttgtccaagtcccctatttcccggaccttctaagcccttttgggtgctggtggtggttgggggagtcctggcttgctatagcttgctagtaacagtggcctttattattttctgggtgaggagtaagaggagctaa

SEQ ID NO: 32346 - DNA, 1470 bp, synthetic construct
  source 1..1470: mol_type = other DNA
atggccttaccagtgaccgccttgctcctgccgctggccttgctgctccacgccgccaggccggaggttcagctgcttgagacaggcggaggactggttcaacctggcggaagcagaggactgagctgtgaaggcagcggctttaccttcagcggcttctggatgagctgggtccgacagacacctggcaagaccctggaatggatcggcgacatcaatagcgacggcagcagcatcaactacgcccctagcatcaaggacaggttcaccatcttccgggacaacgacaagagcatcctgtacctccagatgaccaacgtgcggagcgaggacaccggcacctacttttgtgtgaccacctacggcgactactggggccagggaacaaccctgacagtgtctagtgcttctggcggaggcggaagtggaggcggaggatctggcggcggaggctctgatattgtgatgacccagagccagaaattcatgagcaccagcgtgggcgacagagtgtccgtgacatgtaaagccagccagaacgtgggctctcacgtcggctggtatcagcagaagtctggacagagccccaaggcactgatctacagcgccagcaatcggtacatcggcgtgcccgatagattcaccggctctggcagcggcaccgatttcaccctgaccatcagcaacgtgcagtccgaggacctggccgagtatttctgccagcagtaccacatctacccctacacctttggaggcggcacccggctggaaatcaagagaacagtggctgccacgcgtaccacgacgccagcgccgcgaccaccaacaccggcgcccaccatcgcgtcgcagcccctgtccctgcgcccagaggcgtgccggccagcggcggggggcgcagtgcacacgagggggctggacttcgcctgtgacatctacatctgggcgcccttggccgggacttgtggggtccttctcctgtcactggttatcaccctttactgcaaacggggcagaaagaaactcctgtatatattcaaacaaccatttatgagaccagtacaaactactcaagaggaagatggctgtagctgccgatttccagaagaagaagaaggaggatgtgaactgagagtgaagttcagcaggagcgcagacgcccccgcgtaccagcagggccagaaccagctctataacgagctgaatctaggacgaagagaggagtacgatgttttggacaagagacgtggccgggaccctgagatggggggaaagccgagaaggaagaaccctcaggaaggcctgtacaatgaactgcagaaagataagatggcggaggcctacagtgagattgggatgaaaggcgagcgccggaggggcaaggggcacgatggcctttaccagggtctcagtacagccaccaaggacacctacgacgcccttcacatgcaggccctgccccctcgctaa

SEQ ID NO: 32347 - DNA, 1455 bp, synthetic construct
  source 1..1455: mol_type = other DNA
atggccttaccagtgaccgccttgctcctgccgctggccttgctgctccacgccgccaggccgcagatcgtgctgacacagagccctgccatcatgtccgcttctcccggcgagaaagtgaccatgacatgtagcgccagcagcagcgtgtccttcatgcactggtatcagcagaagtccggcacaagccccaagcggtggatctacgataccagcacactggcctctggcgtgccagccagatttggcggatctggcagcggcacatcttacagcctgaccatcagcagcatggaagccgaagatgccgccacctactactgccagcagtggtccagcaatcccctgacatttggagccggcaccaagctggaactgaagagaggcggaggcggaagtggaggcggaggatctggcggcggaggctctcaagttcagctgcaacagagcggccctgagctggttaagcctggcgcttctgtgcggatctcttgcaaggccagcggctacaccttcaccagctactacatccactgggtcaagcagcggcctggacagggactcgaatggatcggctggatctaccccggcaacctgaacaccaagtacaacgagaagttcaagggcaaagccacactgaccgccgacaagagcagcagcacagcctacatgcagctgagcagcctgacaagcgaggacagcgccgtgtacttctgcgccagatacgactggtacttcgacgtgtggggagccggaaccaccgtgacagtttcttctacgcgtaccacgacgccagcgccgcgaccaccaacaccggcgcccaccatcgcgtcgcagcccctgtccctgcgcccagaggcgtgccggccagcggcggggggcgcagtgcacacgagggggctggacttcgcctgtgacatctacatctgggcgcccttggccgggacttgtggggtccttctcctgtcactggttatcaccctttactgcaaacggggcagaaagaaactcctgtatatattcaaacaaccatttatgagaccagtacaaactactcaagaggaagatggctgtagctgccgatttccagaagaagaagaaggaggatgtgaactgagagtgaagttcagcaggagcgcagacgcccccgcgtaccagcagggccagaaccagctctataacgagctgaatctaggacgaagagaggagtacgatgttttggacaagagacgtggccgggaccctgagatggggggaaagccgagaaggaagaaccctcaggaaggcctgtacaatgaactgcagaaagataagatggcggaggcctacagtgagattgggatgaaaggcgagcgccggaggggcaaggggcacgatggcctttaccagggtctcagtacagccaccaaggacacctacgacgcccttcacatgcaggccctgccccctcgctaa

SEQ ID NO: 32348 - DNA, 1851 bp, synthetic construct
  source 1..1851: mol_type = other DNA
atggccttaccagtgaccgccttgctcctgccgctggccttgctgctccacgccgccaggccgcagatcgtgctgacacagagccctgccatcatgtccgcttctcccggcgagaaagtgaccatgacatgtagcgccagcagcagcgtgtccttcatgcactggtatcagcagaagtccggcacaagccccaagcggtggatctacgataccagcacactggcctctggcgtgccagccagatttggcggatctggcagcggcacatcttacagcctgaccatcagcagcatggaagccgaagatgccgccacctactactgccagcagtggtccagcaatcccctgacatttggagccggcaccaagctggaactgaagagactcgaggacctgaagaacgtgttcccacctgaggtggccgtgttcgagcctagcaaggccgagatcgcccacacccagaaagccaccctcgtgtgcctggctaccggcttctaccccgaccatgtggaactgtcttggtgggtcaacggcaaagaggtgcacagcggcgtgtgtaccgacccccagccactgaaagaacagcccgccctgaacgacagccggtactgcctgagcagcagactgagagtgtccgccaccttctggcagaacccccggaaccacttcagatgccaggtgcagttctacggcctgagcgagaacgacgagtggacccaggacagagccaagcccgtgacccagatcgtgtctgccgaagcctggggcagagccgattgcggcatcaccagcgccagctaccaccagggcgtgctgagcgccaccatcctgtacgagatcctgctgggcaaggccaccctgtacgccgtgctggtgtctgccctggtgctgatggctatggtcaagcggaaggacagccggggaagggccaagcgatctggatctggagcaacaaacttctcactactcaaacaagcaggtgacgtggaggagaatcccgggcctactagtatggactggatttggcgcatccttttccttgtcggcgctgctaccggcgcgcattccttcgaacaagttcagctgcaacagagcggccctgagctggttaagcctggcgcttctgtgcggatctcttgcaaggccagcggctacaccttcaccagctactacatccactgggtcaagcagcggcctggacagggactcgaatggatcggctggatctaccccggcaacctgaacaccaagtacaacgagaagttcaagggcaaagccacactgaccgccgacaagagcagcagcacagcctacatgcagctgagcagcctgacaagcgaggacagcgccgtgtacttctgcgccagatacgactggtacttcgacgtgtggggagccggaaccaccgtgacagtttcttctacgcgtatccagaaccctgatcctgccgtgtaccagctgcgggatagcaagagcagcgacaagagcgtgtgtctgttcaccgacttcgacagccagaccaacgtgtcccagagcaaggactccgacgtgtacatcaccgataagtgcgtgctggacatgcggagcatggacttcaagagcaactccgccgtggcctggtccaacaagtccgatttcgcctgcgccaacgccttcaacaacagcattatccccgaggacacattcttcccaagcagcgacgtgccctgcgacgtgaagctggtggaaaagagcttcgagacagacaccaacctgaacttccagaacctgagcgtgatcggcttcagaatcctgctgctgaaagtggccggctttaacctgctgatgaccctgcggctgtggtccagctaa

SEQ ID NO: 32349 - DNA, 1875 bp, synthetic construct; identical to SEQ ID NO: 32306
  source 1..1875: mol_type = other DNA

SEQ ID NO: 32350 - DNA, 1893 bp, synthetic construct
  source 1..1893: mol_type = other DNA
atggccttaccagtgaccgccttgctcctgccgctggccttgctgctccacgccgccaggccggacatcgtgatgacacagagccctgatagcctggccgtgtctctgggagagagagccaccatcaactgcaagagcagccagagcctgctgaacagcggcaaccagaagaactacctggcctggtatcagcagaagcccggccagcctcctaagctgctgatctactggggcagcaccagatccacaggcgtgcccgatagattttctggctctggcagcggcaccgacttcaccctgacaatttctagcctgcaagccgaggacgtggccgtgtactactgccagaacgactacacataccccttcaccttcggccagggcaccaagctggaaatcaaactcgagatccagaaccctgatcctgccgtgtaccagctgcgggatagcaagagcagcgacaagagcgtgtgtctgttcaccgacttcgacagccagaccaacgtgtcccagagcaaggactccgacgtgtacatcaccgataagtgcgtgctggacatgcggagcatggacttcaagagcaactccgccgtggcctggtccaacaagtccgatttcgcctgcgccaacgccttcaacaacagcattatccccgaggacacattcttcccaagccccgagagcagctgcgacgtgaagctggtggaaaagagcttcgagacagacaccaacctgaacttccagaacctgagcgtgatcggcttcagaatcctgctgctgaaagtggccggctttaacctgctgatgaccctgcggctgtggtccagctctagtcgcgccaagagaagcggatctggcgtgaagcagaccctgaatttcgacctgctgaagctggctggcgacgtggaatccaacccaggccctactagtatggactggatttggcgcatccttttccttgtcggcgctgctaccggcgcgcattccttcgaacaagttcagctggttcagagcggagccgaagtgaagaaacctggggcctctgtgaaggtgtcctgcaaggcttccggctataccttcaccagcttttggctgaactgggtccgacaggcccctggacaaggactggaatggatgggcaacatctaccccagcgacagctacaccgtgtacaaccagaaattcaaggaccgcgtgaccatgaccagggacaccagcacaagcacagtgtacatggaactgagcagcctgcggagcgaggataccgccgtgtattattgcgccagaacctggcggggcaacagcttcgattattggggccagggaaccaccgtgaccgtgtcatctacgcgtgaggacctgaagaacgtgttcccacctgaggtggccgtgttcgagcctagcgaggccgagatcagccacacccagaaagccaccctcgtgtgcctggctaccggcttctaccccgaccatgtggaactgtcttggtgggtcaacggcaaagaggtgcacagcggcgtgtgtaccgacccccagccactgaaagaacagcccgccctgaacgacagccggtactgcctgagcagcagactgagagtgtccgccaccttctggcagaacccccggaaccacttcagatgccaggtgcagttctacggcctgagcgagaacgacgagtggacccaggacagagccaagcccgtgacccagatcgtgtctgccgaagcctggggcagagccgattgcggctttaccagcgagagctaccagcagggcgtgctgagcgccaccatcctgtacgagatcctgctgggcaaggccaccctgtacgccgtgctggtgtctgccctggtgctgatggctatggtcaagcggaaggacagccggggataa

SEQ ID NO: 32351 - DNA, 1893 bp, synthetic construct
  source 1..1893: mol_type = other DNA
atggccttaccagtgaccgccttgctcctgccgctggccttgctgctccacgccgccaggccggacatcgtgatgacacagagccctgatagcctggccgtgtctctgggagagagagccaccatcaactgcaagagcagccagagcctgctgaacagcggcaacaacaagaactacgtgacatggtatcagcagaagcccggccagcctcctaagctgctgatctactggggcagcaccagatccacaggcgtgcccgatagattttctggctctggcagcggcaccgacttcaccctgacaatttctagcctgcaagccgaggacgtggccgtgtactactgccagaacgactacacataccccttcaccttcggccagggcaccaagctggaaatcaaactcgagatccagaaccctgatcctgccgtgtaccagctgcgggatagcaagagcagcgacaagagcgtgtgtctgttcaccgacttcgacagccagaccaacgtgtcccagagcaaggactccgacgtgtacatcaccgataagtgcgtgctggacatgcggagcatggacttcaagagcaactccgccgtggcctggtccaacaagtccgatttcgcctgcgccaacgccttcaacaacagcattatccccgaggacacattcttcccaagccccgagagcagctgcgacgtgaagctggtggaaaagagcttcgagacagacaccaacctgaacttccagaacctgagcgtgatcggcttcagaatcctgctgctgaaagtggccggctttaacctgctgatgaccctgcggctgtggtccagctctagtcgcgccaagagaagcggatctggcgtgaagcagaccctgaatttcgacctgctgaagctggctggcgacgtggaatccaacccaggccctactagtatggactggatttggcgcatccttttccttgtcggcgctgctaccggcgcgcattccttcgaacaagttcagctggttcagagcggagccgaagtgaagaaacctggggcctctgtgaaggtgtcctgcaaggcttccggctataccttcaccagcttttggctgaactgggtccgacaggcccctggacaaggactggaatggatgggcaacatctaccccagcgacagctacaccgtgtacaaccagaaattcaaggaccgcgtgaccatgaccagggacaccagcacaagcacagtgtacatggaactgagcagcctgcggagcgaggataccgccgtgtattattgcgccagaacctggcggggcaacagcttcgattattggggccagggaaccaccgtgaccgtgtcatctacgcgtgaggacctgaagaacgtgttcccacctgaggtggccgtgttcgagcctagcgaggccgagatcagccacacccagaaagccaccctcgtgtgcctggctaccggcttctaccccgaccatgtggaactgtcttggtgggtcaacggcaaagaggtgcacagcggcgtgtgtaccgacccccagccactgaaagaacagcccgccctgaacgacagccggtactgcctgagcagcagactgagagtgtccgccaccttctggcagaacccccggaaccacttcagatgccaggtgcagttctacggcctgagcgagaacgacgagtggacccaggacagagccaagcccgtgacccagatcgtgtctgccgaagcctggggcagagccgattgcggctttaccagcgagagctaccagcagggcgtgctgagcgccaccatcctgtacgagatcctgctgggcaaggccaccctgtacgccgtgctggtgtctgccctggtgctgatggctatggtcaagcggaaggacagccggggataa

SEQ ID NO: 32352 - DNA, 1893 bp, synthetic construct
  source 1..1893: mol_type = other DNA
atggccttaccagtgaccgccttgctcctgccgctggccttgctgctccacgccgccaggccggacatcgtgatgacacagagccctgatagcctggccgtgtctctgggagagagagccaccatcaactgcaagagcagccagagcctgctgaacagcggcaaccagaagaactacctggcctggtatcagcagaagcccggccagcctcctaagctgctgatctactggggcagcaccagatccacaggcgtgcccgatagattttctggctctggcagcggcaccgacttcaccctgacaatttctagcctgcaagccgaggacgtggccgtgtactactgccagaacgactacacataccccttcaccttcggccagggcaccaagctggaaatcaaactcgagatccagaaccctgatcctgccgtgtaccagctgcgggatagcaagagcagcgacaagagcgtgtgtctgttcaccgacttcgacagccagaccaacgtgtcccagagcaaggactccgacgtgtacatcaccgataagtgcgtgctggacatgcggagcatggacttcaagagcaactccgccgtggcctggtccaacaagtccgatttcgcctgcgccaacgccttcaacaacagcattatccccgaggacacattcttcccaagccccgagagcagctgcgacgtgaagctggtggaaaagagcttcgagacagacaccaacctgaacttccagaacctgagcgtgatcggcttcagaatcctgctgctgaaagtggccggctttaacctgctgatgaccctgcggctgtggtccagctctagtcgcgccaagagaagcggatctggcgtgaagcagaccctgaatttcgacctgctgaagctggctggcgacgtggaatccaacccaggccctactagtatggactggatttggcgcatccttttccttgtcggcgctgctaccggcgcgcattccttcgaacaagttcagctggttcagagcggagccgaagtgaagaaacctggggcctctgtgaaggtgtcctgcaaggcttccggctataccttcaccagcttttggctgaactgggtccgacaggcccctggacaaggactggaatggatgggcaacatctaccccagcaccagctacaccgtgtacaaccagaaattcaaggaccgcgtgaccatgaccagggacaccagcacaagcacagtgtacatggaactgagcagcctgcggagcgaggataccgccgtgtattattgcgccagaacctggcggggcaacagcttcgattattggggccagggaaccaccgtgaccgtgtcatctacgcgtgaggacctgaagaacgtgttcccacctgaggtggccgtgttcgagcctagcgaggccgagatcagccacacccagaaagccaccctcgtgtgcctggctaccggcttctaccccgaccatgtggaactgtcttggtgggtcaacggcaaagaggtgcacagcggcgtgtgtaccgacccccagccactgaaagaacagcccgccctgaacgacagccggtactgcctgagcagcagactgagagtgtccgccaccttctggcagaacccccggaaccacttcagatgccaggtgcagttctacggcctgagcgagaacgacgagtggacccaggacagagccaagcccgtgacccagatcgtgtctgccgaagcctggggcagagccgattgcggctttaccagcgagagctaccagcagggcgtgctgagcgccaccatcctgtacgagatcctgctgggcaaggccaccctgtacgccgtgctggtgtctgccctggtgctgatggctatggtcaagcggaaggacagccggggataa

SEQ ID NO: 32353 - DNA, 1845 bp, synthetic construct; identical to SEQ ID NO: 32302
  source 1..1845: mol_type = other DNA

SEQ ID NO: 32354 - DNA, 1851 bp, synthetic construct
  source 1..1851: mol_type = other DNA
atggccttaccagtgaccgccttgctcctgccgctggccttgctgctccacgccgccaggccgcagatcgtgctgacacagagccctgccatcatgtccgcttctcccggcgagaaagtgaccatgacatgtagcgccagcagcagcgtgtccttcatgcactggtatcagcagaagtccggcacaagccccaagcggtggatctacgataccagcacactggcctctggcgtgccagccagatttggcggatctggcagcggcacatcttacagcctgaccatcagcagcatggaagccgaagatgccgccacctactactgccagcagtggtccagcaatcccctgacatttggagccggcaccaagctggaactgaagagactcgaggacctgaagaacgtgttcccacctgaggtggccgtgttcgagcctagcgaggccgagatcagccacacccagaaagccaccctcgtgtgcctggctaccggcttctaccccgaccatgtggaactgtcttggtgggtcaacggcaaagaggtgcacagcggcgtgtgtaccgacccccagccactgaaagaacagcccgccctgaacgacagccggtactgcctgagcagcagactgagagtgtccgccaccttctggcagaacccccggaaccacttcagatgccaggtgcagttctacggcctgagcgagaacgacgagtggacccaggacagagccaagcccgtgacccagatcgtgtctgccgaagcctggggcagagccgattgcggctttaccagcgagagctaccagcagggcgtgctgagcgccaccatcctgtacgagatcctgctgggcaaggccaccctgtacgccgtgctggtgtctgccctggtgctgatggctatggtcaagcggaaggacagccggggaagggccaagcgatctggatctggagcaacaaacttctcactactcaaacaagcaggtgacgtggaggagaatcccgggcctactagtatggactggatttggcgcatccttttccttgtcggcgctgctaccggcgcgcattccttcgaacaagttcagctgcaacagagcggccctgagctggttaagcctggcgcttctgtgcggatctcttgcaaggccagcggctacaccttcaccagctactacatccactgggtcaagcagcggcctggacagggactcgaatggatcggctggatctaccccggcaacctgaacaccaagtacaacgagaagttcaagggcaaagccacactgaccgccgacaagagcagcagcacagcctacatgcagctgagcagcctgacaagcgaggacagcgccgtgtacttctgcgccagatacgactggtacttcgacgtgtggggagccggaaccaccgtgacagtttcttctacgcgtatccagaaccctgatcctgccgtgtaccagctgcgggatagcaagagcagcgacaagagcgtgtgtctgttcaccgacttcgacagccagaccaacgtgtcccagagcaaggactccgacgtgtacatcaccgataagtgcgtgctggacatgcggagcatggacttcaagagcaactccgccgtggcctggtccaacaagtccgatttcgcctgcgccaacgccttcaacaacagcattatccccgaggacacattcttcccaagccccgagagcagctgcgacgtgaagctggtggaaaagagcttcgagacagacaccaacctgaacttccagaacctgagcgtgatcggcttcagaatcctgctgctgaaagtggccggctttaacctgctgatgaccctgcggctgtggtccagctaa

SEQ ID NO: 32355 - DNA, 2868 bp, synthetic construct
  source 1..2868: mol_type = other DNA
atggccttaccagtgaccgccttgctcctgccgctggccttgctgctccacgccgccaggccggacatccagatgacacagagccctagcagcctgtctgccagcgtgggagacagagtgaccatcacatgcaaggccagcgaccacatcaacaactggctggcctggtatcagcagaagcctggacaggcccctaagctgctgatctacggcgctaccacactggaaacaggcgtgcccagcagattttctggcagcggctctggcaccgactacaccctgacaatatccagcctccagcctgaggacttcgccacctactactgtcagcagagctggaacaccccttggacattcggccagggcaccaagctggaaatcaagagactcgaggacctgaagaacgtgttcccacctgaggtggccgtgttcgagcctagcgaggccgagatcagccacacccagaaagccaccctcgtgtgcctggctaccggcttctaccccgaccatgtggaactgtcttggtgggtcaacggcaaagaggtgcacagcggcgtgtctaccgacccccagccactgaaagaacagcccgccctgaacgacagccggtactgcctgagcagcagactgagagtgtccgccaccttctggcagaacccccggaaccacttcagatgccaggtgcagttctacggcctgagcgagaacgacgagtggacccaggacagagccaagcccgtgacccagatcgtgtctgccgaagcctggggcagagccgattgcggatcccagagcttcggcctgctggaccccaagctgtgctacctgctggatggcatcctgttcatctacggcgtgatcctgaccgccctgttcctgagagtgaagttcagcagaagcgccgacgcccctgcctaccagcagggacagaaccaactgtacaacgagctgaacctgggcagacgggaagagtacgacgtgctggacaagcggagaggcagggaccctgagatgggcggaaagccccggagaaagaacccccaggaaggactgtataacgaactccagaaagacaagatggccgaagcctacagcgagatcggcatgaagggcgagcggagaagaggcaagggccacgatggcctgtaccagggcctgagcaccgccaccaaggacacctatgacgccctgcacatgcaggccctgcctccaagaagggccaagcgatctggatctggagcaacaaacttctcactactcaaacaagcaggtgacgtggaggagaatcccgggcctactagtgccaccatggactggatttggcgcatccttttccttgtcggcgctgctaccggcgcccattccgggcccgaagtgcagctggttgaatctggcggaggactggttcaggctggcggatctctgagactgtcttgtgccgccagcggcagaacctttagcatgggctggtttagacaggcccctggcaaagagagagagttcgtcgccgccatcacatactctggcggcagcccttactacgccgactctgtgaagggcagattcaccatcagccgggacaacgccaagaacaccgtgtacctccagatgaacagcctgaagcctgaggacaccgccgtgtactactgcgccgccaatccaacatacggcagcgactggaacgccgagaattggggccagggaacccaagtgacagtgtctagcggatccggcggcggaggatctggcggaggcggatctgggggcggaggctctttcgaacaagttcagcttcaacagcctggcgctgagctggtcaaacctggcgcttctgtgaagatgagctgcaaagccagcggctacgccttcagcagctactggatcaactggatgaagcagaaacccggccagggactcgaatggatcggccaaatctatcccggcgacggcgacaccaactacaacggcaagttcaagggcagagccacactgaccgccgatacctctagcagcacagcctacatgcagctgagcagcctgaccagcgaagatagcgccgtgtacttctgtgcccggtccatcacaacagtcgtgggctgcgctatggactattggggccagggaacaagcgtgaccgtgtctagtacgcgtatccagaaccctgatcctgccgtgtaccagctgcgggatagcaagagcagcgacaagagcgtgtgtctgttcaccgacttcgacagccagaccaacgtgtcccagagcaaggactccgacgtgtacatcaccgataagaccgtgctggacatgcggagcatggacttcaagagcaactccgccgtggcctggtccaacaagtccgatttcgcctgcgccaacgccttcaacaacagcattatccccgaggacacattcttcccaagccccgagagcagctgcggtacccagagttttgggttgttggaccctaaattgtgctatctgttggacggaatcctgttcatttacggagtgatcctgaccgcattgttcctgcgggttaagttttccagatccgcagacgcacccgcttaccaacaagggcagaaccaactctacaatgaacttaatttggggcggagggaagagtacgacgttctggacaaaaggaggggacgagatcccgagatgggcggaaagcctcgaaggaagaatccgcaagaggggctttataacgaactccagaaagataaaatggcagaagcctatagtgagattgggatgaagggagaaaggaggaggggtaaaggtcacgatgggttgtaccaaggattgagcacagccactaaagatacctatgatgcgctccacatgcaggccctgccgccaagataa

SEQ ID NO: 32356 - DNA, 3342 bp, synthetic construct
  source 1..3342: mol_type = other DNA
atggccttaccagtgaccgccttgctcctgccgctggccttgctgctccacgccgccaggccggacatccagatgacacagagccctagcagcctgtctgccagcgtgggagacagagtgaccatcacatgcaaggccagcgaccacatcaacaactggctggcctggtatcagcagaagcctggacaggcccctaagctgctgatctacggcgctaccacactggaaacaggcgtgcccagcagattttctggcagcggctctggcaccgactacaccctgacaatatccagcctccagcctgaggacttcgccacctactactgtcagcagagctggaacaccccttggacattcggccagggcaccaagctggaaatcaagagactcgaggacctgaagaacgtgttcccacctgaggtggccgtgttcgagcctagcgaggccgagatcagccacacccagaaagccaccctcgtgtgcctggctaccggcttctaccccgaccatgtggaactgtcttggtgggtcaacggcaaagaggtgcacagcggcgtgtctaccgacccccagccactgaaagaacagcccgccctgaacgacagccggtactgcctgagcagcagactgagagtgtccgccaccttctggcagaacccccggaaccacttcagatgccaggtgcagttctacggcctgagcgagaacgacgagtggacccaggacagagccaagcccgtgacccagatcgtgtctgccgaagcctggggcagagccgattgcggatcccagagcttcggcctgctggaccccaagctgtgctacctgctggatggcatcctgttcatctacggcgtgatcctgaccgccctgttcctgagagtgaagttcagcagaagcgccgacgcccctgcctaccagcagggacagaaccaactgtacaacgagctgaacctgggcagacgggaagagtacgacgtgctggacaagcggagaggcagggaccctgagatgggcggaaagccccggagaaagaacccccaggaaggactgtataacgaactccagaaagacaagatggccgaagcctacagcgagatcggcatgaagggcgagcggagaagaggcaagggccacgatggcctgtaccagggcctgagcaccgccaccaaggacacctatgacgccctgcacatgcaggccctgcctccaagaagggccaagcgatctggatctggagcaacaaacttctcactactcaaacaagcaggtgacgtggaggagaatcccgggcctactagtgccaccatggactggatttggcgcatccttttccttgtcggcgctgctaccggcgcccattccgggcccgaagtgcagctggttgaatctggcggaggactggttcaggctggcggatctctgagactgtcttgtgccgccagcggcagaacctttagcatgggctggtttagacaggcccctggcaaagagagagagttcgtcgccgccatcacatactctggcggcagcccttactacgccgactctgtgaagggcagattcaccatcagccgggacaacgccaagaacaccgtgtacctccagatgaacagcctgaagcctgaggacaccgccgtgtactactgcgccgccaatccaacatacggcagcgactggaacgccgagaattggggccagggaacccaagtgacagtgtctagcggatccggcggcggaggatctggcggaggcggatctgggggcggaggctctttcgaacaagttcagcttcaacagcctggcgctgagctggtcaaacctggcgcttctgtgaagatgagctgcaaagccagcggctacgccttcagcagctactggatcaactggatgaagcagaaacccggccagggactcgaatggatcggccaaatctatcccggcgacggcgacaccaactacaacggcaagttcaagggcagagccacactgaccgccgatacctctagcagcacagcctacatgcagctgagcagcctgaccagcgaagatagcgccgtgtacttctgtgcccggtccatcacaacagtcgtgggctgcgctatggactattggggccagggaacaagcgtgaccgtgtctagtacgcgtatccagaaccctgatcctgccgtgtaccagctgcgggatagcaagagcagcgacaagagcgtgtgtctgttcaccgacttcgacagccagaccaacgtgtcccagagcaaggactccgacgtgtacatcaccgataagaccgtgctggacatgcggagcatggacttcaagagcaactccgccgtggcctggtccaacaagtccgatttcgcctgcgccaacgccttcaacaacagcattatccccgaggacacattcttcccaagccccgagagcagctgcggtaccatcactcaaggtttggcagtgtcaaccatctcatcattctttccacctggctaccaagtgtccttctgcctggtcatggtgctgctgttcgccgtggataccggcctgtacttcagcgtcaagaccaacatccggtccagcaccagagactggaaggaccacaagttcaagtggcggaaggaccctcaggacaagagggccaagcgatctggatctggagcaacaaacttctcactactcaaacaagcaggtgacgtggaggagaatcccgggccttctagaatgtaccggatgcagctgctgagctgtatcgccctgtctctggccctggtcacaaatagcaactgggttaacgtgatctccgacctgaagaagatcgaggacctgatccagtccatgcacatcgacgccacactgtacaccgagagcgacgtgcaccctagctgtaaagtgaccgccatgaagtgctttctgctggaactgcaagtgatctccctggaaagcggcgacgccagcatccacgacaccgtgaagaacctgattatcctggctaacaacagcctgagcagcaacggcaacgtgaccgagtccggctgtaaagagtgcgaggaactggaagagaagaatatcaaagagttcctccagagcttcgtgcacatcgtgcagatgttcatcaacaccagcaagatcgaagtgatgtaccctcctccttacctggacaacgagaagtccaacggcaccatcatccacgtgaagggcaagcacctgtgtccttctccactgttccccggacctagcaagcctttctgggtgctcgttgttgttggcggcgtgctggcctgttacagcctgctggttaccgtggccttcatcatcttttgggtccgaagcaagcggagctaa

SEQ ID NO: 32357 - DNA, 621 bp, synthetic construct
  source 1..621: mol_type = other DNA
atgtaccggatgcagctgctgagctgtatcgccctgtctctggccctggtcacaaatagcaactgggttaacgtgatctccgacctgaagaagatcgaggacctgatccagtccatgcacatcgacgccacactgtacaccgagagcgacgtgcaccctagctgtaaagtgaccgccatgaagtgctttctgctggaactgcaagtgatctccctggaaagcggcgacgccagcatccacgacaccgtgaagaacctgattatcctggctaacaacagcctgagcagcaacggcaacgtgaccgagtccggctgtaaagagtgcgaggaactggaagagaagaatatcaaagagttcctccagagcttcgtgcacatcgtgcagatgttcatcaacaccagcaagatcgaagtgatgtaccctcctccttacctggacaacgagaagtccaacggcaccatcatccacgtgaagggcaagcacctgtgtccttctccactgttccccggacctagcaagcctttctgggtgctcgttgttgttggcggcgtgctggcctgttacagcctgctggttaccgtggccttcatcatcttttgggtccgaagcaagcggagctaa

SEQ ID NO: 32358 - DNA, 2652 bp, synthetic construct
  source 1..2652: mol_type = other DNA
atgcagtctggcacccattggagagtgctgggcctgtgtctgctgtctgttggcgtgtggggccaagacggcaatgaggaaatgggcggcatcacccagacaccatacaaggtgtccatcagcggcaccaccgtgatcctgacctgtcctcagtatcccggcagcgagattctgtggcagcacaacgacaagaacatcggcggcgacgaggacgataagaatatcggctccgatgaggaccacctgagcctgaaagagttcagcgagctggaacagagcggctactacgtgtgctaccccagaggcagcaagcccgaggacgccaacttttacctgtacctgagagccagagtgtgcgagaactgcatggaaatggacgtgatgtccgtggctaccatcgtgatcgtggacatctgcatcaccggcggactgctgctgctggtgtactactggtccaagaaccggaaggccaaggccaagcctgtgacaagaggtgctggtgctggcggcagacagagaggccagaacaaagaaagacctcctcctgtgcctaatcctgactacgagcccatcagaaaaggccagcgggatctgtacagcggcctgaaccagagaagaatcctcgagcgggccaagagaagcggatctggcgcaacaaacttctcactactcaaacaagcaggtgacgtggaggagaatcccgggcctactagtatggaacaaggcaaaggcctggccgtgctgatcctggctatcatcctgctgcaaggcacactggcccagagcatcaagggcaaccacctggtcaaggtgtacgactaccaagaggacggcagcgtgctgctgacatgtgatgccgaggccaagaacatcacctggtttaaggacggcaagatgatcggcttcctgaccgaggacaagaagaagtggaacctgggcagcaacgctaaggaccccagaggcatgtatcagtgcaagggcagccagaacaagagcaagcccctccaggtgtactaccggatgtgccagaactgcatcgagctgaacgccgctaccatcagcggctttctgttcgccgagatcgtgtccatcttcgtgctggccgtgggcgtgtactttatcgctggacaggatggcgtgcggcagagcagagcttccgataagcaaaccctgctgcctaacgaccagctgtaccagcctctgaaggacagagaggacgaccagtacagccacctccagggcaatcagctgagaagaaaccgcgccaagagaagcggatctggcgtgaagcagaccctgaatttcgacctgctgaagctggctggcgacgtggaatccaacccaggccctttcgaaatggaacacagcacctttctgagcggcctggtgctggctacactgctgtctcaggtgtccccattcaagatccccatcgaggaactggaagatcgggtgttcgtgaactgcaacacctctatcacctgggtggaaggcaccgtgggaacactgctgagcgacatcaccagactggacctcggcaagcggattctggaccctcggggcatctacagatgcaacggcaccgacatctacaaggacaaagaaagcaccgtgcaggtccactacagaatgtgccagtcctgcgtggaactggaccctgctacagtggccggcatcatcgtgaccgatgtgatcgctactctgctgctggctctgggagtgttctgcttcgccggacacgaaacaggcagactgtctggcgctgccgatacacaggccctgctgagaaacgaccaagtgtatcagcccctgcgcgacagagatgatgcccagtattctcacctcggcggcaactgggctagaaacaagagggccaagcgatctggatctggacaatgcactaattacgcattgctcaagctggccggtgacgttgagagtaatcctggcccctctagattcaatcatatgtaccggatgcagctgctgagctgtatcgccctgtctctggccctggtcacaaatagcgcccctaccagcagcagcaccaagaaaacccagctgcaactggaacacctcctgctggacctccagatgatcctgaacggcatcaacaactacaagaaccccaagctgacccggatgctgaccttcaagttctacatgcccaagaaggccaccgagctgaagcacctccagtgcctggaagaggaactgaagcccctggaagaagtgctgaatctggcccagagcaagaacttccacctgaggccaagggacctgatctccaacatcaacgtgatcgtgctggaactgaaaggcagcgagacaaccttcatgtgcgagtacgccgacgagacagctaccatcgtggaatttctgaatcggtggatcaccttctgccagagcatcatcagcaccctgacaacgcgtgccaagcctacaacaacccctgctcctagacctcctacaccagctcctacaatcgccagccagcctctgtctctcagacccgaagcctgtagaccagctgctggcggagctgtgcataccagaggactggatttcgcctgcgacatctacatctgggctcctctggctggcacatgtggcgttctgctgctgtccctggtcatcaccctgtactgttaa

SEQ ID NO: 32359 - DNA, 573 bp, synthetic construct
  source 1..573: mol_type = other DNA
atggccacttacgaggttctctgtgaggtggcgcggaaactgggcacggatgacagggaagtggtattgttcctcctaaacgtgttcatacctcaacccacactggcccaattaattggagctcttagagctttaaaggaggagggcaggttaacgtttcccctgttagcggaatgtctgtttcgtgcaggtcgcagagacctcttgcgcgacctgcttcacttagacccgcgttttttagagcgccacctagcgggcacaatgagttatttcagcccttatcagctcactgttctccacgtagacggggagctgtgtgcgagggatattaggtctttgatatttttaagcaaggacactatagggtctcgcagcacaccacagacattcttacactgggtgtactgtatggaaaacttagacctactgggtcccactgacgtggatgccctaatgtcaatgcttagatctttgtcaagagtagacctacagcgccaagtgcaaaccctaatgggccttcacctttccggcccatcacactcccaacactatcgccatacaccactcgagtag

SEQ ID NO: 32360 - DNA, 2547 bp, synthetic construct
  source 1..2547: mol_type = other DNA
atggccttaccagtgaccgccttgctcctgccgctggccttgctgctccacgccgccaggccgagctacgtgctgacacagcctccatccgtgtctgtggctccaggacagaccgccagaatcacatgcggcggcaacaacatcggcagcaagagcgtgcactggtatcagcagccacctggacaggctccagtggtggtggtgtacgacgacagcgatagacctagcggcatccccgagagattcagcggcagcaattccggcaataccgccacactgaccatcagcagagtggaagctggcgacgaggccgtgtactactgccaagtgtgggacagcagcagcgatcacgtggtgtttggcggcggaacaaagctgacagtgcttctcgaggacctgaagaacgtgttcccacctgaggtggccgtgttcgagcctagcgaggccgagatcagccacacccagaaagccaccctcgtgtgcctggctaccggcttctaccccgaccatgtggaactgtcttggtgggtcaacggcaaagaggtgcacagcggcgtgtgtaccgacccccagccactgaaagaacagcccgccctgaacgacagccggtactgcctgagcagcagactgagagtgtccgccaccttctggcagaacccccggaaccacttcagatgccaggtgcagttctacggcctgagcgagaacgacgagtggacccaggacagagccaagcccgtgacccagatcgtgtctgccgaagcctggggcagagccgattgcggctttaccagcgagagctaccagcagggcgtgctgagcgccaccatcctgtacgagatcctgctgggcaaggccaccctgtacgccgtgctggtgtctgccctggtgctgatggctatggtcaagcggaaggacagccggggaagggccaagcgatctggatctggagcaacaaacttctcactactcaaacaagcaggtgacgtggaggagaatcccgggcctactagtatggactggatttggcgcatccttttccttgtcggcgctgctaccggcgcgcattccttcgaacaactccagctgcaagagtctggccctggcctggtcaagcctagcgaaacactgagcctgacctgtaccgtgtctggcggctctatcagctccggcagctatttctggggctggatcagacaacctcctggcaaaggactggaatggatcggctccatctactacagcggcatcacctactacaaccccagcctgaagtccagagtgaccatctccgtggacaccagcaagaaccagttctccctgaagctgagcagcgtgacagccgccgataccgccgtgtattattgtgccagacatgacggcgctgtggccggcctgtttgattattggggacagggcaccctggtcaccgtgtcatctgctacgcgtatccagaaccctgatcctgccgtgtaccagctgcgggatagcaagagcagcgacaagagcgtgtgtctgttcaccgacttcgacagccagaccaacgtgtcccagagcaaggactccgacgtgtacatcaccgataagtgcgtgctggacatgcggagcatggacttcaagagcaactccgccgtggcctggtccaacaagtccgatttcgcctgcgccaacgccttcaacaacagcattatccccgaggacacattcttcccaagccccgagagcagctgcgacgtgaagctggtggaaaagagcttcgagacagacaccaacctgaacttccagaacctgagcgtgatcggcttcagaatcctgctgctgaaagtggccggctttaacctgctgatgaccctgcggctgtggtccagccgcgccaagagaagcggatctggcgtgaagcagaccctgaatttcgacctgctgaagctggctggcgacgtggaatccaacccaggcccttctagaggcgggatccacaccatggctacctacgaggtgctgtgcgaggtggcaagaaagctgggcaccgacgacagagaagtggtgctgttcctgctgaacgtgttcatccctcagcctacactggcccagctgatcggtgcactgagagccctgaaagaggaaggccggctgacctttcctctgctggccgaatgcctgttcagagccggaagaagggatctgctgcgggacctgctgcatctggaccccagatttctggaaagacacctggccggcaccatgagctacttcagcccttaccagctgaccgtgctgcacgttgacggcgaactgtgcgccagagatattcggagcctgatcttcctgagcaaggacaccatcggcagccggtctacccctcagacatttctgcactgggtgtactgcatggaaaacctggacctgctcggccccacagatgtggatgccctgatgtccatgctgagaagcctgagcagagtggacctccagagacaggtgcagacactgatgggactgcacctgagcggacctagccacagccagcactacagacacaccccttaa

SEQ ID NO: 32361 - DNA, 1890 bp, synthetic construct
  source 1..1890: mol_type = other DNA
atggccttaccagtgaccgccttgctcctgccgctggccttgctgctccacgccgccaggccgagctacgtgctgacacagcctccatccgtgtctgtggctccaggacagaccgccagaatcacatgcggcggcaacaacatcggcagcaagagcgtgcactggtatcagcagccacctggacaggctccagtggtggtggtgtacgacgacagcgatagacctagcggcatccccgagagattcagcggcagcaattccggcaataccgccacactgaccatcagcagagtggaagctggcgacgaggccgtgtactactgccaagtgtgggacagcagcagcgatcacgtggtgtttggcggcggaacaaagctgacagtgcttctcgagatccagaaccctgatcctgccgtgtaccagctgcgggatagcaagagcagcgacaagagcgtgtgtctgttcaccgacttcgacagccagaccaacgtgtcccagagcaaggactccgacgtgtacatcaccgataagtgcgtgctggacatgcggagcatggacttcaagagcaactccgccgtggcctggtccaacaagtccgatttcgcctgcgccaacgccttcaacaacagcattatccccgaggacacattcttcccaagccccgagagcagctgcgacgtgaagctggtggaaaagagcttcgagacagacaccaacctgaacttccagaacctgagcgtgatcggcttcagaatcctgctgctgaaagtggccggctttaacctgctgatgaccctgcggctgtggtccagctctagtcgcgccaagagaagcggatctggcgtgaagcagaccctgaatttcgacctgctgaagctggctggcgacgtggaatccaacccaggccctactagtatggactggatttggcgcatccttttccttgtcggcgctgctaccggcgcgcattccttcgaacaactccagctgcaagagtctggccctggcctggtcaagcctagcgaaacactgagcctgacctgtaccgtgtctggcggctctatcagctccggcagctatttctggggctggatcagacaacctcctggcaaaggactggaatggatcggctccatctactacagcggcatcacctactacaaccccagcctgaagtccagagtgaccatctccgtggacaccagcaagaaccagttctccctgaagctgagcagcgtgacagccgccgataccgccgtgtattattgtgccagacatgacggcgctgtggccggcctgtttgattattggggacagggcaccctggtcaccgtgtcatctgctacgcgtgaggacctgaagaacgtgttcccacctgaggtggccgtgttcgagcctagcgaggccgagatcagccacacccagaaagccaccctcgtgtgcctggctaccggcttctaccccgaccatgtggaactgtcttggtgggtcaacggcaaagaggtgcacagcggcgtgtgtaccgacccccagccactgaaagaacagcccgccctgaacgacagccggtactgcctgagcagcagactgagagtgtccgccaccttctggcagaacccccggaaccacttcagatgccaggtgcagttctacggcctgagcgagaacgacgagtggacccaggacagagccaagcccgtgacccagatcgtgtctgccgaagcctggggcagagccgattgcggctttaccagcgagagctaccagcagggcgtgctgagcgccaccatcctgtacgagatcctgctgggcaaggccaccctgtacgccgtgctggtgtctgccctggtgctgatggctatggtcaagcggaaggacagccggggataa

SEQ ID NO: 32362 - DNA, 1869 bp, synthetic construct
  source 1..1869: mol_type = other DNA
atggccttaccagtgaccgccttgctcctgccgctggccttgctgctccacgccgccaggccggacatccagatgacccagagccctagctcactgagcgccagcgtgggcgacagggtgaccattacctgctccgccagccaggacatcagcaactacctgaactggtaccagcagaagcccggcaaggcccccaagctgctgatctactacacctccaacctgcactccggcgtgcccagcaggttcagcggaagcggcagcggcaccgatttcaccctgaccatctccagcctgcagcccgaggacttcgccacctactactgccagcagtacaggaagctcccctggactttcggccagggcaccaaactggagatcaagcgtctcgaggacctgaagaacgtgttcccacctgaggtggccgtgttcgagcctagcaaggccgagatcgcccacacccagaaagccaccctcgtgtgcctggctaccggcttctaccccgaccatgtggaactgtcttggtgggtcaacggcaaagaggtgcacagcggcgtgtgtaccgacccccagccactgaaagaacagcccgccctgaacgacagccggtactgcctgagcagcagactgagagtgtccgccaccttctggcagaacccccggaaccacttcagatgccaggtgcagttctacggcctgagcgagaacgacgagtggacccaggacagagccaagcccgtgacccagatcgtgtctgccgaagcctggggcagagccgattgcggcatcaccagcgccagctaccaccagggcgtgctgagcgccaccatcctgtacgagatcctgctgggcaaggccaccctgtacgccgtgctggtgtctgccctggtgctgatggctatggtcaagcggaaggacagccggggaagggccaagcgatctggatctggagcaacaaacttctcactactcaaacaagcaggtgacgtggaggagaatcccgggcctactagtatggactggatttggcgcatccttttccttgtcggcgctgctaccggcgcgcattccttcgaacaggtgcagctggtccagagcggcgccgaagtgaagaagcccggcagctccgtgaaagtgagctgcaaggccagcggcggcaccttcagcaactactggatgcactgggtgaggcaggcccccggacagggcctggagtggatgggcgccacctacaggggccacagcgacacctactacaaccagaagttcaagggccgggtgaccatcaccgccgacaagagcaccagcaccgcctacatggaactgagcagcctcaggagcgaggacaccgctgtgtattactgcgccaggggcgccatctacgacggctacgacgtgctggacaactggggccagggcacactggtgaccgtgtccagcacgcgtatccagaaccctgatcctgccgtgtaccagctgcgggatagcaagagcagcgacaagagcgtgtgtctgttcaccgacttcgacagccagaccaacgtgtcccagagcaaggactccgacgtgtacatcaccgataagtgcgtgctggacatgcggagcatggacttcaagagcaactccgccgtggcctggtccaacaagtccgatttcgcctgcgccaacgccttcaacaacagcattatccccgaggacacattcttcccaagcagcgacgtgccctgcgacgtgaagctggtggaaaagagcttcgagacagacaccaacctgaacttccagaacctgagcgtgatcggcttcagaatcctgctgctgaaagtggccggctttaacctgctgatgaccctgcggctgtggtccagctaa

SEQ ID NO: 32363 - DNA, 1890 bp, synthetic construct
  source 1..1890: mol_type = other DNA
atggccttaccagtgaccgccttgctcctgccgctggccttgctgctccacgccgccaggccgagctacgtgctgacacagcctccatccgtgtctgtggctccaggacagaccgccagaatcacatgcggcggcaacaacatcggcggcaagagcgtgcactggtatcagcagccacctggacaggctccagtggtggtggtgtacgacgacagcgatagacctagcggcatccccgagagattcagcggcagcaattccggcaataccgccacactgaccatcagcagagtggaagctggcgacgaggccgtgtactactgccaagtgtgggacagcagcagcgatcacgtggtgtttggcggcggaacaaagctgacagtgcttctcgagatccagaaccctgatcctgccgtgtaccagctgcgggatagcaagagcagcgacaagagcgtgtgtctgttcaccgacttcgacagccagaccaacgtgtcccagagcaaggactccgacgtgtacatcaccgataagtgcgtgctggacatgcggagcatggacttcaagagcaactccgccgtggcctggtccaacaagtccgatttcgcctgcgccaacgccttcaacaacagcattatccccgaggacacattcttcccaagccccgagagcagctgcgacgtgaagctggtggaaaagagcttcgagacagacaccaacctgaacttccagaacctgagcgtgatcggcttcagaatcctgctgctgaaagtggccggctttaacctgctgatgaccctgcggctgtggtccagctctagtcgcgccaagagaagcggatctggcgtgaagcagaccctgaatttcgacctgctgaagctggctggcgacgtggaatccaacccaggccctactagtatggactggatttggcgcatccttttccttgtcggcgctgctaccggcgcgcattccttcgaacaactccagctgcaagagtctggccctggcctggtcaagcctagcgaaacactgagcctgacctgtaccgtgtctggcggctctatcagctccagcagctatttctggggctggatcagacaacctcctggcaaaggactggaatggatcggctccatctactacagcggcatcacctactacaaccccagcctgaagtccagagtgaccatctccgtggacaccagcaagaaccagttctccctgaagctgagcagcgtgacagccgccgataccgccgtgtattattgtgccagacatgacggcgctgtggccggcctgtttgattattggggacagggcaccctggtcaccgtgtcatctgctacgcgtgaggacctgaagaacgtgttcccacctgaggtggccgtgttcgagcctagcgaggccgagatcagccacacccagaaagccaccctcgtgtgcctggctaccggcttctaccccgaccatgtggaactgtcttggtgggtcaacggcaaagaggtgcacagcggcgtgtgtaccgacccccagccactgaaagaacagcccgccctgaacgacagccggtactgcctgagcagcagactgagagtgtccgccaccttctggcagaacccccggaaccacttcagatgccaggtgcagttctacggcctgagcgagaacgacgagtggacccaggacagagccaagcccgtgacccagatcgtgtctgccgaagcctggggcagagccgattgcggctttaccagcgagagctaccagcagggcgtgctgagcgccaccatcctgtacgagatcctgctgggcaaggccaccctgtacgccgtgctggtgtctgccctggtgctgatggctatggtcaagcggaaggacagccggggataa

SEQ ID NO: 32364 - DNA, 1884 bp, synthetic construct
  source 1..1884: mol_type = other DNA
atggccttaccagtgaccgccttgctcctgccgctggccttgctgctccacgccgccaggccgagctacgtgctgacacagcctccatccgtgtctgtggctccaggacagaccgccagaatcacatgcggcggcaacaacatcggcggcaagagcgtgcactggtatcagcagccacctggacaggctccagtggtggtggtgtacgacgacagcgatagacctagcggcatccccgagagattcagcggcagcaattccggcaataccgccacactgaccatcagcagagtggaagctggcgacgaggccgtgtactactgccaagtgtgggacagcagcagcgatcacgtggtgtttggcggcggaacaaagctgacagtgcttctcgagatccagaaccctgatcctgccgtgtaccagctgcgggatagcaagagcagcgacaagagcgtgtgtctgttcaccgacttcgacagccagaccaacgtgtcccagagcaaggactccgacgtgtacatcaccgataagtgcgtgctggacatgcggagcatggacttcaagagcaactccgccgtggcctggtccaacaagtccgatttcgcctgcgccaacgccttcaacaacagcattatccccgaggacacattcttcccaagcagcgacgtgccctgcgacgtgaagctggtggaaaagagcttcgagacagacaccaacctgaacttccagaacctgagcgtgatcggcttcagaatcctgctgctgaaagtggccggctttaacctgctgatgaccctgcggctgtggtccagccgcgccaagagaagcggatctggcgtgaagcagaccctgaatttcgacctgctgaagctggctggcgacgtggaatccaacccaggccctactagtatggactggatttggcgcatccttttccttgtcggcgctgctaccggcgcgcattccttcgaacaactccagctgcaagagtctggccctggcctggtcaagcctagcgaaacactgagcctgacctgtaccgtgtctggcggctctatcagctccagcagctatttctggggctggatcagacaacctcctggcaaaggactggaatggatcggctccatctactacagcggcatcacctactacaaccccagcctgaagtccagagtgaccatctccgtggacaccagcaagaaccagttctccctgaagctgagcagcgtgacagccgccgataccgccgtgtattattgtgccagacatgacggcgctgtggccggcctgtttgattattggggacagggcaccctggtcaccgtgtcatctgctacgcgtgaggacctgaagaacgtgttcccacctgaggtggccgtgttcgagcctagcaaggccgagatcgcccacacccagaaagccaccctcgtgtgcctggctaccggcttctaccccgaccatgtggaactgtcttggtgggtcaacggcaaagaggtgcacagcggcgtgtgtaccgacccccagccactgaaagaacagcccgccctgaacgacagccggtactgcctgagcagcagactgagagtgtccgccaccttctggcagaacccccggaaccacttcagatgccaggtgcagttctacggcctgagcgagaacgacgagtggacccaggacagagccaagcccgtgacccagatcgtgtctgccgaagcctggggcagagccgattgcggcatcaccagcgccagctaccaccagggcgtgctgagcgccaccatcctgtacgagatcctgctgggcaaggccaccctgtacgccgtgctggtgtctgccctggtgctgatggctatggtcaagcggaaggacagccggggataa

SEQ ID NO: 32365 - DNA, 1869 bp, synthetic construct
  source 1..1869: mol_type = other DNA
atggccttaccagtgaccgccttgctcctgccgctggccttgctgctccacgccgccaggccggacatcgtgctgacacagtctcccgccacactgtcactgagccctggcgatagagccacactgagctgtagagccagcgagagcgtgacaatcctgggcagccacctgatctactggtatcagcagaagcccggacaggcccctagactgctgattcagctcgccagcaatgtgcagacaggcatccctgccagattttccggcagcggcagcagaaccgatttcaccctgaccataagcagcctggaacctgaggacttcgccgtgtactactgcctccagagccggacaatccccagaacctttggacagggcaccaagctggaaatcaagagactcgaggacctgaagaacgtgttcccacctgaggtggccgtgttcgagcctagcaaggccgagatcgcccacacccagaaagccaccctcgtgtgcctggctaccggcttctaccccgaccatgtggaactgtcttggtgggtcaacggcaaagaggtgcacagcggcgtgtgtaccgacccccagccactgaaagaacagcccgccctgaacgacagccggtactgcctgagcagcagactgagagtgtccgccaccttctggcagaacccccggaaccacttcagatgccaggtgcagttctacggcctgagcgagaacgacgagtggacccaggacagagccaagcccgtgacccagatcgtgtctgccgaagcctggggcagagccgattgcggcatcaccagcgccagctaccaccagggcgtgctgagcgccaccatcctgtacgagatcctgctgggcaaggccaccctgtacgccgtgctggtgtctgccctggtgctgatggctatggtcaagcggaaggacagccggggaagggccaagcgatctggatctggagcaacaaacttctcactactcaaacaagcaggtgacgtggaggagaatcccgggcctactagtatggactggatttggcgcatccttttccttgtcggcgctgctaccggcgcgcattccttcgaacaagttcaactggtgcagagcggctccgagctgaagaaacctggcgagtccgtgaagattagctgcaaggccagcggctacaccttcacacactacagcatgaactgggtccgacaggctccaggccaaggactggaatggatgggcagaatcaacaccgagacaggcgagcccctgtacgccgacgatttcaagggcagattcgtgttcagcctggacaccagcgccagcacagcctatctccagatcagctctctgaaggccgaggacaccgccgtgtattattgcagcaacgactacctgtactccctggactattggggccagggcacactggtcacagtgtctagtacgcgtatccagaaccctgatcctgccgtgtaccagctgcgggatagcaagagcagcgacaagagcgtgtgtctgttcaccgacttcgacagccagaccaacgtgtcccagagcaaggactccgacgtgtacatcaccgataagtgcgtgctggacatgcggagcatggacttcaagagcaactccgccgtggcctggtccaacaagtccgatttcgcctgcgccaacgccttcaacaacagcattatccccgaggacacattcttcccaagcagcgacgtgccctgcgacgtgaagctggtggaaaagagcttcgagacagacaccaacctgaacttccagaacctgagcgtgatcggcttcagaatcctgctgctgaaagtggccggctttaacctgctgatgaccctgcggctgtggtccagctaa

SEQ ID NO: 32366 - DNA, 2289 bp, synthetic construct
  source 1..2289: mol_type = other DNA
atggccttaccagtgaccgccttgctcctgccgctggccttgctgctccacgccgccaggccgagctacgtgctgacacagcctccatccgtgtctgtggctccaggacagaccgccagaatcacatgcggcggcaacaacatcggcggcaagagcgtgcactggtatcagcagccacctggacaggctccagtggtggtggtgtacgacgacagcgatagacctagcggcatccccgagagattcagcggcagcaattccggcaataccgccacactgaccatcagcagagtggaagctggcgacgaggccgtgtactactgccaagtgtgggacagcagcagcgatcacgtggtgtttggcggcggaacaaagctgacagtgcttctcgaggacctgaagaacgtgttcccacctgaggtggccgtgttcgagcctagcgaggccgagatcagccacacccagaaagccaccctcgtgtgcctggctaccggcttctaccccgaccatgtggaactgtcttggtgggtcaacggcaaagaggtgcacagcggcgtgtgtaccgacccccagccactgaaagaacagcccgccctgaacgacagccggtactgcctgagcagcagactgagagtgtccgccaccttctggcagaacccccggaaccacttcagatgccaggtgcagttctacggcctgagcgagaacgacgagtggacccaggacagagccaagcccgtgacccagatcgtgtctgccgaagcctggggcagagccgattgcggctttaccagcgagagctaccagcagggcgtgctgagcgccaccatcctgtacgagatcctgctgggcaaggccaccctgtacgccgtgctggtgtctgccctggtgctgatggctatggtcaagcggaaggacagccggggaagggccaagcgatctggatctggagcaacaaacttctcactactcaaacaagcaggtgacgtggaggagaatcccgggcctactagtgccaccatggactggatttggcgcatccttttccttgtcggcgctgctaccggcgcccattccgggcccgaagtgcaactggttgaatccggtggcggcctggtgcaagcaggcggatctctcagacttagctgtgccgcctccggcagaaccttcacaatgggatggtttaggcaggctccagggaaagagagagagttcgtcgccgccatctctctgtctcccacactggcctactacgccgactctgtgaaaggccggttcaccatctccagagataatgccaagaacaccgtggtgctgcaaatgaactctctgaaacccgaggatacagccctgtactattgtgccgctgaccggaagtccgtgatgagcatcagacccgattactggggacagggcacacaagtcacagtgtcctctggatccggcggcggaggatctggcggaggcggatctgggggcggaggctctttcgaacaactccagctgcaagagtctggccctggcctggtcaagcctagcgaaacactgagcctgacctgtaccgtgtctggcggctctatcagctccagcagctatttctggggctggatcagacaacctcctggcaaaggactggaatggatcggctccatctactacagcggcatcacctactacaaccccagcctgaagtccagagtgaccatctccgtggacaccagcaagaaccagttctccctgaagctgagcagcgtgacagccgccgataccgccgtgtattattgtgccagacatgacggcgctgtggccggcctgtttgattattggggacagggcaccctggtcaccgtgtcatctgctacgcgtatccagaaccctgatcctgccgtgtaccagctgcgggatagcaagagcagcgacaagagcgtgtgtctgttcaccgacttcgacagccagaccaacgtgtcccagagcaaggactccgacgtgtacatcaccgataagtgcgtgctggacatgcggagcatggacttcaagagcaactccgccgtggcctggtccaacaagtccgatttcgcctgcgccaacgccttcaacaacagcattatccccgaggacacattcttcccaagccccgagagcagctgcgacgtgaagctggtggaaaagagcttcgagacagacaccaacctgaacttccagaacctgagcgtgatcggcttcagaatcctgctgctgaaagtggccggctttaacctgctgatgaccctgcggctgtggtccagctaa

SEQ ID NO: 32367 - DNA, 1869 bp, synthetic construct
  source 1..1869: mol_type = other DNA
atggccttaccagtgaccgccttgctcctgccgctggccttgctgctccacgccgccaggccggacatcgtgctgacacagagccctgccaccctgtctctgagccctggcgatagagccaccatcagctgtagagccagcgagagcgtgaccatcctgggcagccacctgatctactggtatcagcagaagcccggccagccccccagactgctgattcagctggcctccaatgtgcagaccggcgtgccagccagattttccggcagcggcagcagaaccgacttcaccctgaccatcagcagcgtggaacccgaggacttcgccgtgtactactgcctccagagccggaccatccccagaacattcggccagggcaccaagctggaaatcaagagactcgaggacctgaagaacgtgttcccacctgaggtggccgtgttcgagcctagcgaggccgagatcagccacacccagaaagccaccctcgtgtgcctggctaccggcttctaccccgaccatgtggaactgtcttggtgggtcaacggcaaagaggtgcacagcggcgtgtgtaccgacccccagccactgaaagaacagcccgccctgaacgacagccggtactgcctgagcagcagactgagagtgtccgccaccttctggcagaacccccggaaccacttcagatgccaggtgcagttctacggcctgagcgagaacgacgagtggacccaggacagagccaagcccgtgacccagatcgtgtctgccgaagcctggggcagagccgattgcggctttaccagcgagagctaccagcagggcgtgctgagcgccaccatcctgtacgagatcctgctgggcaaggccaccctgtacgccgtgctggtgtctgccctggtgctgatggctatggtcaagcggaaggacagccggggaagggccaagcgatctggatctggagcaacaaacttctcactactcaaacaagcaggtgacgtggaggagaatcccgggcctactagtatggactggatttggcgcatccttttccttgtcggcgctgctaccggcgcgcattccttcgaacaggtgcagctggtgcagtctggccccgaagtgaagaaacccggcgagtccgtgaagatcagctgcaaggccagcggctacaccttccggcactacagcatgaactgggtcaagcaggccccaggccagggcctgaagtggatgggcagaatcaacaccgagagcggcgtgcccatctacgccgacgacttcaagggccggttcagcttcaccgtggacaccagcgccagcaccgcctacctggaaatctccagcctgaccagcgaggataccgccgtgtatttctgctccaacgactacctgtacagcctggatttctggggccagggaaccaccctgacagtgtcctctacgcgtatccagaaccctgatcctgccgtgtaccagctgcgggatagcaagagcagcgacaagagcgtgtgtctgttcaccgacttcgacagccagaccaacgtgtcccagagcaaggactccgacgtgtacatcaccgataagtgcgtgctggacatgcggagcatggacttcaagagcaactccgccgtggcctggtccaacaagtccgatttcgcctgcgccaacgccttcaacaacagcattatccccgaggacacattcttcccaagccccgagagcagctgcgacgtgaagctggtggaaaagagcttcgagacagacaccaacctgaacttccagaacctgagcgtgatcggcttcagaatcctgctgctgaaagtggccggctttaacctgctgatgaccctgcggctgtggtccagctaa

SEQ ID NO: 32368 - DNA, 2964 bp, synthetic construct
  source 1..2964: mol_type = other DNA
atggccttaccagtgaccgccttgctcctgccgctggccttgctgctccacgccgccaggccggacatccagatgacacagagccctagcagcctgtctgccagcgtgggagacagagtgaccatcacatgcaaggccagcgaccacatcaacaactggctggcctggtatcagcagaagcctggacaggcccctaagctgctgatctacggcgctaccacactggaaacaggcgtgcccagcagattttctggcagcggctctggcaccgactacaccctgacaatatccagcctccagcctgaggacttcgccacctactactgtcagcagagctggaacaccccttggacattcggccagggcaccaagctggaaatcaagagactcgaggacctgaagaacgtgttcccacctgaggtggccgtgttcgagcctagcgaggccgagatcagccacacccagaaagccaccctcgtgtgcctggctaccggcttctaccccgaccatgtggaactgtcttggtgggtcaacggcaaagaggtgcacagcggcgtgtgtaccgacccccagccactgaaagaacagcccgccctgaacgacagccggtactgcctgagcagcagactgagagtgtccgccaccttctggcagaacccccggaaccacttcagatgccaggtgcagttctacggcctgagcgagaacgacgagtggacccaggacagagccaagcccgtgacccagatcgtgtctgccgaagcctggggcagagccgattgcggctttaccagcgagagctaccagcagggcgtgctgagcgccaccatcctgtacgagatcctgctgggcaaggccaccctgtacgccgtgctggtgtctgccctggtgctgatggctatggtcaagcggaaggacagccggggaagggccaagcgatctggatctggagcaacaaacttctcactactcaaacaagcaggtgacgtggaggagaatcccgggcctactagtgccaccatggactggatttggcgcatccttttccttgtcggcgctgctaccggcgcccattccgggcccgaagtgcaactggttgaatccggtggcggcctggtgcaagcaggcggatctctcagacttagctgtgccgcctccggcagaaccttcacaatgggatggtttaggcaggctccagggaaagagagagagttcgtcgccgccatctctctgtctcccacactggcctactacgccgactctgtgaaaggccggttcaccatctccagagataatgccaagaacaccgtggtgctgcaaatgaactctctgaaacccgaggatacagccctgtactattgtgccgctgaccggaagtccgtgatgagcatcagacccgattactggggacagggcacacaagtcacagtgtcctctggatccggtccattgggtattgctgggattttcgaacaagttcagcttcaacagcctggcgctgagctggtcaaacctggcgcttctgtgaagatgagctgcaaagccagcggctacgccttcagcagctactggatcaactggatgaagcagaaacccggccagggactcgaatggatcggccaaatctatcccggcgacggcgacaccaactacaacggcaagttcaagggcagagccacactgaccgccgatacctctagcagcacagcctacatgcagctgagcagcctgaccagcgaagatagcgccgtgtacttctgtgcccggtccatcacaacagtcgtgggctgcgctatggactattggggccagggaacaagcgtgaccgtgtctagtacgcgtatccagaaccctgatcctgccgtgtaccagctgcgggatagcaagagcagcgacaagagcgtgtgtctgttcaccgacttcgacagccagaccaacgtgtcccagagcaaggactccgacgtgtacatcaccgataagtgcgtgctggacatgcggagcatggacttcaagagcaactccgccgtggcctggtccaacaagtccgatttcgcctgcgccaacgccttcaacaacagcattatccccgaggacacattcttcccaagccccgagagcagctgcgacgtgaagctggtggaaaagagcttcgagacagacaccaacctgaacttccagaacctgagcgtgatcggcttcagaatcctgctgctgaaagtggccggctttaacctgctgatgaccctgcggctgtggtccagccgcgccaagagaagcggatctggcgtgaagcagaccctgaatttcgacctgctgaagctggctggcgacgtggaatccaacccaggcccttctagaggccatatgaccgagtacaagcccacggtgcgcctcgccacccgcgacgacgtccccagggccgtacgcaccctcgccgccgcgttcgccgactaccccgccacgcgccacaccgtcgatccggaccgccacatcgagcgggtcaccgagctgcaagaactcttcctcacgcgcgtcgggctcgacatcggcaaggtgtgggtcgcggacgacggcgccgcggtggcggtctggaccacgccggagagcgtcgaagcgggggcggtgttcgccgagatcggcccgcgcatggccgagttgagcggttcccggctggccgcgcagcaacagatggaaggcctcctggcgccgcaccggcccaaggagcccgcgtggttcctggccaccgtcggcgtctcgcccgaccaccagggcaagggtctgggcagcgccgtcgtgctccccggagtggaggcggccgagcgcgccggggtgcccgccttcctggagacctccgcgccccgcaacctccccttctacgagcggctcggcttcaccgtcaccgccgacgtcgaggtgcccgaaggaccgcgcacctggtgcatgacccgcaagcccggtgcctga

SEQ ID NO: 32369 - DNA, 1395 bp, synthetic construct
  source 1..1395: mol_type = other DNA
atggccacttacgaggttctctgtgaggtggcgcggaaactgggcacggatgacagggaagtggtattgttcctcctaaacgtgttcatacctcaacccacactggcccaattaattggagctcttagagctttaaaggaggagggcaggttaacgtttcccctgttagcggaatgtctgtttcgtgcaggtcgcagagacctcttgcgcgacctgcttcacttagacccgcgttttttagagcgccacctagcgggcacaatgagttatttcagcccttatcagctcactgttctccacgtagacggggagctgtgtgcgagggatattaggtctttgatatttttaagcaaggacactatagggtctcgcagcacaccacagacattcttacactgggtgtactgtatggaaaacttagacctactgggtcccactgacgtggatgccctaatgtcaatgcttagatctttgtcaagagtagacctacagcgccaagtgcaaaccctaatgggccttcacctttccggcccatcacactcccaacactatcgccatacaccactcgagaccgatttctacgactacaaggacgacgatgacaagactagtggctccggcgagggcagaggaagtctactaacctgcggagatgtggaagaaaatcctggcccaatggtgagcaagggcgaggagctgttcaccggggtggtgcccatcctggtcgagctggacggcgacgtaaacggccacaagttcagcgtgtccggcgagggcgagggcgatgccacctacggcaagctgaccctgaagttcatctgcaccaccggcaagctgcccgtgccctggcccaccctcgtgaccaccctgacctacggcgtgcagtgcttcagccgctaccccgaccacatgaagcagcacgacttcttcaagtccgccatgcccgaaggctacgtccaggagcgcaccatcttcttcaaggacgacggcaactacaagacccgcgccgaggtgaagttcgagggcgacaccctggtgaaccgcatcgagctgaagggcatcgacttcaaggaggacggcaacatcctggggcacaagctggagtacaactacaacagccacaacgtctatatcatggccgacaagcagaagaacggcatcaaggtgaacttcaagatccgccacaacatcgaggacggcagcgtgcagctcgccgaccactaccagcagaacacccccatcggcgacggccccgtgctgctgcccgacaaccactacctgagcacccagtccgccctgagcaaagaccccaacgagaagcgcgatcacatggtcctgctggagttcgtgaccgccgccgggatcactctcggcatggacgagctgtacaagtaa

SEQ ID NO: 32370 - DNA, 2403 bp, synthetic construct
  source 1..2403: mol_type = other DNA
atggccttaccagtgaccgccttgctcctgccgctggccttgctgctccacgccgccaggccggacatccagatgacacagagccctagcagcctgtctgccagcgtgggagacagagtgaccatcacatgcaaggccagcgaccacatcaacaactggctggcctggtatcagcagaagcctggacaggcccctaagctgctgatctacggcgctaccacactggaaacaggcgtgcccagcagattttctggcagcggctctggcaccgactacaccctgacaatatccagcctccagcctgaggacttcgccacctactactgtcagcagagctggaacaccccttggacattcggccagggcaccaagctggaaatcaagagactcgaggacctgaagaacgtgttcccacctgaggtggccgtgttcgagcctagcgaggccgagatcagccacacccagaaagccaccctcgtgtgcctggctaccggcttctaccccgaccatgtggaactgtcttggtgggtcaacggcaaagaggtgcacagcggcgtgtgtaccgacccccagccactgaaagaacagcccgccctgaacgacagccggtactgcctgagcagcagactgagagtgtccgccaccttctggcagaacccccggaaccacttcagatgccaggtgcagttctacggcctgagcgagaacgacgagtggacccaggacagagccaagcccgtgacccagatcgtgtctgccgaagcctggggcagagccgattgcggctttaccagcgagagctaccagcagggcgtgctgagcgccaccatcctgtacgagatcctgctgggcaaggccaccctgtacgccgtgctggtgtctgccctggtgctgatggctatggtcaagcggaaggacagccggggaagggccaagcgatctggatctggagcaacaaacttctcactactcaaacaagcaggtgacgtggaggagaatcccgggcctactagtgccaccatggactggatttggcgcatccttttccttgtcggcgctgctaccggcgcccattccgggcccgaagtgcaactggttgaatccggtggcggcctggtgcaagcaggcggatctctcagacttagctgtgccgcctccggcagaaccttcacaatgggatggtttaggcaggctccagggaaagagagagagttcgtcgccgccatctctctgtctcccacactggcctactacgccgactctgtgaaaggccggttcaccatctccagagataatgccaagaacaccgtggtgctgcaaatgaactctctgaaacccgaggatacagccctgtactattgtgccgctgaccggaagtccgtgatgagcatcagacccgattactggggacagggcacacaagtcacagtgtcctctggatccggcggcggaggatctggcggaggcggatctgggggcggaggctctttcgaacaagttcagcttcaacagcctggcgctgagctggtcaaacctggcgcttctgtgaagatgagctgcaaagccagcggctacgccttcagcagctactggatcaactggatgaagcagaaacccggccagggactcgaatggatcggccaaatctatcccggcgacggcgacaccaactacaacggcaagttcaagggcagagccacactgaccgccgatacctctagcagcacagcctacatgcagctgagcagcctgaccagcgaagatagcgccgtgtacttctgtgcccggtccatcacaacagtcgtgggctgcgctatggactattggggccagggaacaagcgtgaccgtgtctagtacgcgtgaggacctgaagaacgtgttcccacctgaggtggccgtgttcgagcctagcgaggccgagatcagccacacccagaaagccaccctcgtgtgcctggctaccggcttctaccccgaccatgtggaactgtcttggtgggtcaacggcaaagaggtgcacagcggcgtgtgtaccgacccccagccactgaaagaacagcccgccctgaacgacagccggtactgcctgagcagcagactgagagtgtccgccaccttctggcagaacccccggaaccacttcagatgccaggtgcagttctacggcctgagcgagaacgacgagtggacccaggacagagccaagcccgtgacccagatcgtgtctgccgaagcctggggcagagccgattgcggctttaccagcgagagctaccagcagggcgtgctgagcgccaccatcctgtacgagatcctgctgggcaaggccaccctgtacgccgtgctggtgtctgccctggtgctgatggctatggtcaagcggaaggacagccggggataa

SEQ ID NO: 32371 - DNA, 2340 bp, synthetic construct
  source 1..2340: mol_type = other DNA
atggccttaccagtgaccgccttgctcctgccgctggccttgctgctccacgccgccaggccggacatccagatgacacagagccctagcagcctgtctgccagcgtgggagacagagtgaccatcacatgcaaggccagcgaccacatcaacaactggctggcctggtatcagcagaagcctggacaggcccctaagctgctgatctacggcgctaccacactggaaacaggcgtgcccagcagattttctggcagcggctctggcaccgactacaccctgacaatatccagcctccagcctgaggacttcgccacctactactgtcagcagagctggaacaccccttggacattcggccagggcaccaagctggaaatcaagagaggcggaggcggaagtggaggcggaggatctggcggcggaggctctcaagttcagcttcaacagcctggcgctgagctggtcaaacctggcgcttctgtgaagatgagctgcaaagccagcggctacgccttcagcagctactggatcaactggatgaagcagaaacccggccagggactcgaatggatcggccaaatctatcccggcgacggcgacaccaactacaacggcaagttcaagggcagagccacactgaccgccgatacctctagcagcacagcctacatgcagctgagcagcctgaccagcgaagatagcgccgtgtacttctgtgcccggtccatcacaacagtcgtgggctgcgctatggactattggggccagggaacaagcgtgaccgtgtctagtacgcgtggcggaggcggaagtggaggcggaggatctggcggcggaggctctgcgcgtggaatgaggactgaggatcttcccaaagctgtcgtctttctcgaaccccaatggtatcgggtgctcgaaaaagactctgtgacactgaaatgccaaggggcctactctcccgaggacaactccacacagtggtttcataatgagtccctcatcagctctcaggccagctcttatttcattgatgccgctacagtggacgactccggcgagtatcggtgtcagaccaatctgtctacactgtctgaccccgtgcagcttgaggtccacattggatggttgctcttgcaagccccacgctgggttttcaaagaggaagatccaatccatctgcggtgccacagctggaaaaacaccgctctccacaaagtcacatacctgcaaaatggcaaaggacgcaaatacttccatcacaattccgatttttacattccgaaggctaccctgaaagacagcggcagctatttctgccggggactcgtcggctccaagaatgtgtcctccgaaaccgtgaatatcacgattacccaaggactggctgtgcctacaatctctagcttctttccgcctggataccaagtctccttctgtcttgtgatggtcctcctgtttgctgtggacacaggactgtacttttccgtgaaaacgaacatccgcagctccacacgcgattggaaagatcacaagtttaaatggcgcaaagatccccaggacaagcgcgccaagagaagcggatctggcgtgaagcagaccctgaatttcgacctgctgaagctggctggcgacgtggaatccaacccaggcccttctagaatgtaccggatgcagctgctgagctgtatcgccctgtctctggccctggtcacaaatagcgcccctaccagcagcagcaccaagaaaacccagctgcaactggaacacctcctgctggacctccagatgatcctgaacggcatcaacaactacaagaaccccaagctgaccgccatgctgaccaagaagttctacatgcccaagaaggccaccgagctgaagcacctccagtgcctggaagaggaactgaagcccctggaagaagtgctgaatctggcccagagcaagaacttccacctgaggccaagggacctgatctccaacatcaacgtgatcgtgctggaactgaaaggcagcgagacaaccttcatgtgcgagtacgccgacgagacagctaccatcgtggaatttctgaatcggtggatcaccttctgcgccagcatcatcagcaccctgacaaagatcgaagtgatgtaccctcctccttacctggacaacgagaagtccaacggcaccatcatccacgtgaagggcaagcacctgtgtccttctccactgttccccggacctagcaagcctttctgggtgctcgttgttgttggcggcgtgctggcctgttacagcctgctggttaccgtggccttcatcatcttttgggtccgaagcaagcggagctaa

SEQ ID NO: 32372 - DNA, 2283 bp, synthetic construct
  source 1..2283: mol_type = other DNA
atggccttaccagtgaccgccttgctcctgccgctggccttgctgctccacgccgccaggccggacatccagatgacacagagccctagcagcctgtctgccagcgtgggagacagagtgaccatcacatgcaaggccagcgaccacatcaacaactggctggcctggtatcagcagaagcctggacaggcccctaagctgctgatctacggcgctaccacactggaaacaggcgtgcccagcagattttctggcagcggctctggcaccgactacaccctgacaatatccagcctccagcctgaggacttcgccacctactactgtcagcagagctggaacaccccttggacattcggccagggcaccaagctggaaatcaagagaggcggaggcggaagtggaggcggaggatctggcggcggaggctctcaagttcagcttcaacagcctggcgctgagctggtcaaacctggcgcttctgtgaagatgagctgcaaagccagcggctacgccttcagcagctactggatcaactggatgaagcagaaacccggccagggactcgaatggatcggccaaatctatcccggcgacggcgacaccaactacaacggcaagttcaagggcagagccacactgaccgccgatacctctagcagcacagcctacatgcagctgagcagcctgaccagcgaagatagcgccgtgtacttctgtgcccggtccatcacaacagtcgtgggctgcgctatggactattggggccagggaacaagcgtgaccgtgtctagtacgcgtggcggaggcggaagtggaggcggaggatctggcggcggaggctctgcgcgtggaatgaggactgaggatcttcccaaagctgtcgtctttctcgaaccccaatggtatcgggtgctcgaaaaagactctgtgacactgaaatgccaaggggcctactctcccgaggacaactccacacagtggtttcataatgagtccctcatcagctctcaggccagctcttatttcattgatgccgctacagtggacgactccggcgagtatcggtgtcagaccaatctgtctacactgtctgaccccgtgcagcttgaggtccacattggatggttgctcttgcaagccccacgctgggttttcaaagaggaagatccaatccatctgcggtgccacagctggaaaaacaccgctctccacaaagtcacatacctgcaaaatggcaaaggacgcaaatacttccatcacaattccgatttttacattccgaaggctaccctgaaagacagcggcagctatttctgccggggactcgtcggctccaagaatgtgtcctccgaaaccgtgaatatcacgattacccaaggactggctgtgcctacaatctctagcttctttccgcctggataccaagtctccttctgtcttgtgatggtcctcctgtttgctgtggacacaggactgtacttttccgtgaaaacgaacatccgcagctccacacgcgattggaaagatcacaagtttaaatggcgcaaagatccccaggacaagcgcgccaagagaagcggatctggcgtgaagcagaccctgaatttcgacctgctgaagctggctggcgacgtggaatccaacccaggcccttctagaatgtaccggatgcagctgctgagctgtatcgccctgtctctggccctggtcacaaatagcaactgggttaacgtgatctccgacctgaagaagatcgaggacctgatccagtccatgcacatcgacgccacactgtacaccgagagcgacgtgcaccctagctgtaaagtgaccgccatgaagtgctttctgctggaactgcaagtgatctccctggaaagcggcgacgccagcatccacgacaccgtgaagaacctgattatcctggctaacaacagcctgagcagcaacggcaacgtgaccgagtccggctgtaaagagtgcgaggaactggaagagaagaatatcaaagagttcctccagagcttcgtgcacatcgtgcagatgttcatcaacaccagcaagatcgaagtgatgtaccctcctccttacctggacaacgagaagtccaacggcaccatcatccacgtgaagggcaagcacctgtgtccttctccactgttccccggacctagcaagcctttctgggtgctcgttgttgttggcggcgtgctggcctgttacagcctgctggttaccgtggccttcatcatcttttgggtccgaagcaagcggagctaa

SEQ ID NO: 32373 - DNA, 732 bp, synthetic construct
  source 1..732: mol_type = other DNA
atgtccgactccaaggaggtccctagccttccatttttgcgacacttgctcgaagagttggacagccatgaggacagcttgctgctgtttctgtgtcacgacgcggccccgggctgcacgacggtcacgcaagctttgtgctcgcttagccaacagcgcaagctgaccctcgcggctctggtcgagatgctctacgtgctgcagcgtatggatcttctcaagagccgcttcgggctcagcaaggagggggccgagcaattgctgggcacaagctttctcacgcgctaccgcaagctcatggtttgcgtgggtgaggagctcgactccagcgagctacgcgctctacgcttgttcgcgtgcaacctgaatccgagcctgagcacggcgctttctgagagcagccgctttgtcgagcttgtactcgcgcttgaaaacgtaggactcgtctcgccatcgagtgtttccgtgcttgcggacatgttgcgcactcttcggcgcctcgatttgtgccagcagcttgttgagtacgaacaacaagagcaagccaggtaccgttactgttacgcggcctcgccctcattgccagttcgtacgttacgtcgggggcacggcgcgagtgaacacgagcagctgtgcatgcccgtgcaagaatcctctgacagccccgagctgctgcgcacgcccgtacaagaatcctccagcgacagccccgagcaaacgactctcgagtag

SEQ ID NO: 32374 - DNA, 1857 bp, synthetic construct; identical to SEQ ID NO: 22716
  source 1..1857: mol_type = other DNA

SEQ ID NO: 32375 - DNA, 1860 bp, synthetic construct
  source 1..1860: mol_type = other DNA
atggccttaccagtgaccgccttgctcctgccgctggccttgctgctccacgccgccaggccggacgtcgtgatgacccagacaccactgagcctgcctgtgtctctgggcgatcaggccagcatcagctgtagaagcagccagagcctggtgcacagaaacggcaacacctacctgcactggtatctccagaagcctggacagagccccaagctgctgatccacaaggtgtccaacagattcagcggcgtgcccgacagattttctggcagcggcagcggaaccgacttcaccctgaagatcagcagagtggaagccgaggacctgggcgtgtacttctgtagccagagcacacacgtgccacctctgacatttggagccggcaccaagctggaactgaagagactcgaggacctgaagaacgtgttcccacctgaggtggccgtgttcgagcctagcgaggccgagatcagccacacccagaaagccaccctcgtgtgcctggctaccggcttctaccccgaccatgtggaactgtcttggtgggtcaacggcaaagaggtgcacagcggcgtgtgtaccgacccccagccactgaaagaacagcccgccctgaacgacagccggtactgcctgagcagcagactgagagtgtccgccaccttctggcagaacccccggaaccacttcagatgccaggtgcagttctacggcctgagcgagaacgacgagtggacccaggacagagccaagcccgtgacccagatcgtgtctgccgaagcctggggcagagccgattgcggctttaccagcgagagctaccagcagggcgtgctgagcgccaccatcctgtacgagatcctgctgggcaaggccaccctgtacgccgtgctggtgtctgccctggtgctgatggctatggtcaagcggaaggacagccggggaagggccaagcgatctggatctggagcaacaaacttctcactactcaaacaagcaggtgacgtggaggagaatcccgggcctactagtatggactggatttggcgcatccttttccttgtcggcgctgctaccggcgcgcattccttcgaagttcagctgctgcaaagcggccctgagctggaaaaacctggcgcttccgtgatgatctcctgcaaggccagcggctctagcttcaccggctacaacatgaactgggtccgacagaacatcggcaagagcctggaatggatcggcgctatcgacccttactacggcggcaccagctacaaccagaagttcaagggcagagccacactgaccgtggacaagagcagcagcacagcctacatgcacctgaagtccctgaccagcgaggacagcgccgtgtactattgtgtgtccggcatggaatactggggccagggcacaagcgtgaccgtttcttctacgcgtatccagaaccctgatcctgccgtgtaccagctgcgggatagcaagagcagcgacaagagcgtgtgtctgttcaccgacttcgacagccagaccaacgtgtcccagagcaaggactccgacgtgtacatcaccgataagtgcgtgctggacatgcggagcatggacttcaagagcaactccgccgtggcctggtccaacaagtccgatttcgcctgcgccaacgccttcaacaacagcattatccccgaggacacattcttcccaagccccgagagcagctgcgacgtgaagctggtggaaaagagcttcgagacagacaccaacctgaacttccagaacctgagcgtgatcggcttcagaatcctgctgctgaaagtggccggctttaacctgctgatgaccctgcggctgtggtccagctaa

SEQ ID NO: 32376 - DNA, 1476 bp, synthetic construct
  source 1..1476: mol_type = other DNA
atggccttaccagtgaccgccttgctcctgccgctggccttgctgctccacgccgccaggccgagctacgtgctgacacagcctccatccgtgtctgtggctccaggacagaccgccagaatcacatgcggcggcaacaacatcggcagcaagagcgtgcactggtatcagcagccacctggacaggctccagtggtggtggtgtacgacgacagcgatagacctagcggcatccccgagagattcagcggcagcaattccggcaataccgccacactgaccatcagcagagtggaagctggcgacgaggccgtgtactactgccaagtgtgggacagcagcagcgatcacgtggtgtttggcggcggaacaaagctgacagtgcttggcggaggcggatctggcggcggaggtagcggtggcggaggatctcaactccagctgcaagagtctggccctggcctggtcaagcctagcgaaacactgagcctgacctgtaccgtgtctggcggctctatcagctccggcagctatttctggggctggatcagacaacctcctggcaaaggactggaatggatcggctccatctactacagcggcatcacctactacaaccccagcctgaagtccagagtgaccatctccgtggacaccagcaagaaccagttctccctgaagctgagcagcgtgacagccgccgataccgccgtgtattattgtgccagacatgacggcgctgtggccggcctgtttgattattggggacagggcaccctggtcaccgtgtcatctgctacgcgtaccacgacgccagcgccgcgaccaccaacaccggcgcccaccatcgcgtcgcagcccctgtccctgcgcccagaggcgtgccggccagcggcggggggcgcagtgcacacgagggggctggacttcgcctgtgacatctacatctgggcgcccttggccgggacttgtggggtccttctcctgtcactggttatcaccctttactgcaaacggggcagaaagaaactcctgtatatattcaaacaaccatttatgagaccagtacaaactactcaagaggaagatggctgtagctgccgatttccagaagaagaagaaggaggatgtgaactgagagtgaagttcagcaggagcgcagacgcccccgcgtaccagcagggccagaaccagctctataacgagctgaatctaggacgaagagaggagtacgatgttttggacaagagacgtggccgggaccctgagatggggggaaagccgagaaggaagaaccctcaggaaggcctgtacaatgaactgcagaaagataagatggcggaggcctacagtgagattgggatgaaaggcgagcgccggaggggcaaggggcacgatggcctttaccagggtctcagtacagccaccaaggacacctacgacgcccttcacatgcaggccctgccccctcgctaa

SEQ ID NO: 32377 - DNA, 1872 bp, synthetic construct
  source 1..1872: mol_type = other DNA
atggccttaccagtgaccgccttgctcctgccgctggccttgctgctccacgccgccaggccgagctacgtgctgacacagcctccatccgtgtctgtggctccaggacagaccgccagaatcacatgcggcggcaacaacatcggcagcaagagcgtgcactggtatcagcagccacctggacaggctccagtggtggtggtgtacgacgacagcgatagacctagcggcatccccgagagattcagcggcagcaattccggcaataccgccacactgaccatcagcagagtggaagctggcgacgaggccgtgtactactgccaagtgtgggacagcagcagcgatcacgtggtgtttggcggcggaacaaagctgacagtgcttctcgaggacctgaagaacgtgttcccacctgaggtggccgtgttcgagcctagcgaggccgagatcagccacacccagaaagccaccctcgtgtgcctggctaccggcttctaccccgaccatgtggaactgtcttggtgggtcaacggcaaagaggtgcacagcggcgtgtgtaccgacccccagccactgaaagaacagcccgccctgaacgacagccggtactgcctgagcagcagactgagagtgtccgccaccttctggcagaacccccggaaccacttcagatgccaggtgcagttctacggcctgagcgagaacgacgagtggacccaggacagagccaagcccgtgacccagatcgtgtctgccgaagcctggggcagagccgattgcggctttaccagcgagagctaccagcagggcgtgctgagcgccaccatcctgtacgagatcctgctgggcaaggccaccctgtacgccgtgctggtgtctgccctggtgctgatggctatggtcaagcggaaggacagccggggaagggccaagcgatctggatctggagcaacaaacttctcactactcaaacaagcaggtgacgtggaggagaatcccgggcctactagtatggactggatttggcgcatccttttccttgtcggcgctgctaccggcgcgcattccttcgaacaactccagctgcaagagtctggccctggcctggtcaagcctagcgaaacactgagcctgacctgtaccgtgtctggcggctctatcagctccggcagctatttctggggctggatcagacaacctcctggcaaaggactggaatggatcggctccatctactacagcggcatcacctactacaaccccagcctgaagtccagagtgaccatctccgtggacaccagcaagaaccagttctccctgaagctgagcagcgtgacagccgccgataccgccgtgtattattgtgccagacatgacggcgctgtggccggcctgtttgattattggggacagggcaccctggtcaccgtgtcatctgctacgcgtatccagaaccctgatcctgccgtgtaccagctgcgggatagcaagagcagcgacaagagcgtgtgtctgttcaccgacttcgacagccagaccaacgtgtcccagagcaaggactccgacgtgtacatcaccgataagtgcgtgctggacatgcggagcatggacttcaagagcaactccgccgtggcctggtccaacaagtccgatttcgcctgcgccaacgccttcaacaacagcattatccccgaggacacattcttcccaagccccgagagcagctgcgacgtgaagctggtggaaaagagcttcgagacagacaccaacctgaacttccagaacctgagcgtgatcggcttcagaatcctgctgctgaaagtggccggctttaacctgctgatgaccctgcggctgtggtccagctaa

SEQ ID NO: 32378 - DNA, 1872 bp, synthetic construct
  source 1..1872: mol_type = other DNA
atggccttaccagtgaccgccttgctcctgccgctggccttgctgctccacgccgccaggccgagctacgtgctgacacagcctccatccgtgtctgtggctccaggacagaccgccagaatcacatgcggcggcaacaacatcggcggcaagagcgtgcactggtatcagcagccacctggacaggctccagtggtggtggtgtacgacgacagcgatagacctagcggcatccccgagagattcagcggcagcaattccggcaataccgccacactgaccatcagcagagtggaagctggcgacgaggccgtgtactactgccaagtgtgggacagcagcagcgatcacgtggtgtttggcggcggaacaaagctgacagtgcttctcgaggacctgaagaacgtgttcccacctgaggtggccgtgttcgagcctagcgaggccgagatcagccacacccagaaagccaccctcgtgtgcctggctaccggcttctaccccgaccatgtggaactgtcttggtgggtcaacggcaaagaggtgcacagcggcgtgtgtaccgacccccagccactgaaagaacagcccgccctgaacgacagccggtactgcctgagcagcagactgagagtgtccgccaccttctggcagaacccccggaaccacttcagatgccaggtgcagttctacggcctgagcgagaacgacgagtggacccaggacagagccaagcccgtgacccagatcgtgtctgccgaagcctggggcagagccgattgcggctttaccagcgagagctaccagcagggcgtgctgagcgccaccatcctgtacgagatcctgctgggcaaggccaccctgtacgccgtgctggtgtctgccctggtgctgatggctatggtcaagcggaaggacagccggggaagggccaagcgatctggatctggagcaacaaacttctcactactcaaacaagcaggtgacgtggaggagaatcccgggcctactagtatggactggatttggcgcatccttttccttgtcggcgctgctaccggcgcgcattccttcgaacaactccagctgcaagagtctggccctggcctggtcaagcctagcgaaacactgagcctgacctgtaccgtgtctggcggctctatcagctccagcagctatttctggggctggatcagacaacctcctggcaaaggactggaatggatcggctccatctactacagcggcatcacctactacaaccccagcctgaagtccagagtgaccatctccgtggacaccagcaagaaccagttctccctgaagctgagcagcgtgacagccgccgataccgccgtgtattattgtgccagacatgacggcgctgtggccggcctgtttgattattggggacagggcaccctggtcaccgtgtcatctgctacgcgtatccagaaccctgatcctgccgtgtaccagctgcgggatagcaagagcagcgacaagagcgtgtgtctgttcaccgacttcgacagccagaccaacgtgtcccagagcaaggactccgacgtgtacatcaccgataagtgcgtgctggacatgcggagcatggacttcaagagcaactccgccgtggcctggtccaacaagtccgatttcgcctgcgccaacgccttcaacaacagcattatccccgaggacacattcttcccaagccccgagagcagctgcgacgtgaagctggtggaaaagagcttcgagacagacaccaacctgaacttccagaacctgagcgtgatcggcttcagaatcctgctgctgaaagtggccggctttaacctgctgatgaccctgcggctgtggtccagctaa

SEQ ID NO: 32379 - DNA, 2460 bp, synthetic construct
  source 1..2460: mol_type = other DNA
atggccttaccagtgaccgccttgctcctgccgctggccttgctgctccacgccgccaggccgagctacgtgctgacacagcctccatccgtgtctgtggctccaggacagaccgccagaatcacatgcggcggcaacaacatcggcggcaagagcgtgcactggtatcagcagccacctggacaggctccagtggtggtggtgtacgacgacagcgatagacctagcggcatccccgagagattcagcggcagcaattccggcaataccgccacactgaccatcagcagagtggaagctggcgacgaggccgtgtactactgccaagtgtgggacagcagcagcgatcacgtggtgtttggcggcggaacaaagctgacagtgcttctcgaggacctgaagaacgtgttcccacctgaggtggccgtgttcgagcctagcgaggccgagatcagccacacccagaaagccaccctcgtgtgcctggctaccggcttctaccccgaccatgtggaactgtcttggtgggtcaacggcaaagaggtgcacagcggcgtgtctaccgacccccagccactgaaagaacagcccgccctgaacgacagccggtactgcctgagcagcagactgagagtgtccgccaccttctggcagaacccccggaaccacttcagatgccaggtgcagttctacggcctgagcgagaacgacgagtggacccaggacagagccaagcccgtgacccagatcgtgtctgccgaagcctggggcagagccgattgcggatcccagagcttcggcctgctggaccccaagctgtgctacctgctggatggcatcctgttcatctacggcgtgatcctgaccgccctgttcctgagagtgaagttcagcagaagcgccgacgcccctgcctaccagcagggacagaaccaactgtacaacgagctgaacctgggcagacgggaagagtacgacgtgctggacaagcggagaggcagggaccctgagatgggcggaaagccccagcggagaaagaacccccaggaaggactgtataacgaactccagaaagacaagatggccgaagcctacagcgagatcggcatgaagggcgagcggagaagaggcaagggccacgatggcctgtaccagggcctgagcaccgccaccaaggacacctatgacgccctgcacatgcaggccctgcctccaagaagggccaagcgatctggatctggagcaacaaacttctcactactcaaacaagcaggtgacgtggaggagaatcccgggcctactagtatggactggatttggcgcatccttttccttgtcggcgctgctaccggcgcgcattccttcgaacaactccagctgcaagagtctggccctggcctggtcaagcctagcgaaacactgagcctgacctgtaccgtgtctggcggctctatcagctccagcagctatttctggggctggatcagacaacctcctggcaaaggactggaatggatcggctccatctactacagcggcatcacctactacaaccccagcctgaagtccagagtgaccatctccgtggacaccagcaagaaccagttctccctgaagctgagcagcgtgacagccgccgataccgccgtgtattattgtgccagacatgacggcgctgtggccggcctgtttgattattggggacagggcaccctggtcaccgtgtcatctgctacgcgtatccagaaccctgatcctgccgtgtaccagctgcgggatagcaagagcagcgacaagagcgtgtgtctgttcaccgacttcgacagccagaccaacgtgtcccagagcaaggactccgacgtgtacatcaccgataagaccgtgctggacatgcggagcatggacttcaagagcaactccgccgtggcctggtccaacaagtccgatttcgcctgcgccaacgccttcaacaacagcattatccccgaggacacattcttcccaagccccgagagcagctgcggtacccagagttttgggttgttggaccctaaattgtgctatctgttggacggaatcctgttcatttacggagtgatcctgaccgcattgttcctgcgggttaagttttccagatccgcagacgcacccgcttaccaacaagggcagaaccaactctacaatgaacttaatttggggcggagggaagagtacgacgttctggacaaaaggaggggacgagatcccgagatgggcggaaagcctcagcgaaggaagaatccgcaagaggggctttataacgaactccagaaagataaaatggcagaagcctatagtgagattgggatgaagggagaaaggaggaggggtaaaggtcacgatgggttgtaccaaggattgagcacagccactaaagatacctatgatgcgctccacatgcaggccctgccgccaagataa

SEQ ID NO: 32380 - DNA, 2235 bp, synthetic construct
  source 1..2235: mol_type = other DNA
atggccttaccagtgaccgccttgctcctgccgctggccttgctgctccacgccgccaggccgagctacgtgctgacacagcctccatccgtgtctgtggctccaggacagaccgccagaatcacatgcggcggcaacaacatcggcggcaagagcgtgcactggtatcagcagccacctggacaggctccagtggtggtggtgtacgacgacagcgatagacctagcggcatccccgagagattcagcggcagcaattccggcaataccgccacactgaccatcagcagagtggaagctggcgacgaggccgtgtactactgccaagtgtgggacagcagcagcgatcacgtggtgtttggcggcggaacaaagctgacagtgcttctcgaggacctgaagaacgtgttcccacctgaggtggccgtgttcgagcctagcgaggccgagatcagccacacccagaaagccaccctcgtgtgcctggctaccggcttctaccccgaccatgtggaactgtcttggtgggtcaacggcaaagaggtgcacagcggcgtgtctaccgacccccagccactgaaagaacagcccgccctgaacgacagccggtactgcctgagcagcagactgagagtgtccgccaccttctggcagaacccccggaaccacttcagatgccaggtgcagttctacggcctgagcgagaacgacgagtggacccaggacagagccaagcccgtgacccagatcgtgtctgccgaagcctggggcagagccgattgcggatccctgggagagcctcagctgtgctatatcctggacgccatcctgtttctgtacggcatcgtgctgaccctgctgtactgccggctgaagatccaagtgcggaaggccgccatcaccagctacgagaaatccgacggcgtgtacaccggcctgagcaccagaaatcaagagacatacgagacactgaagcacgaaaagcctccacaaagggccaagcgatctggatctggagcaacaaacttctcactactcaaacaagcaggtgacgtggaggagaatcccgggcctactagtatggactggatttggcgcatccttttccttgtcggcgctgctaccggcgcgcattccttcgaacaactccagctgcaagagtctggccctggcctggtcaagcctagcgaaacactgagcctgacctgtaccgtgtctggcggctctatcagctccagcagctatttctggggctggatcagacaacctcctggcaaaggactggaatggatcggctccatctactacagcggcatcacctactacaaccccagcctgaagtccagagtgaccatctccgtggacaccagcaagaaccagttctccctgaagctgagcagcgtgacagccgccgataccgccgtgtattattgtgccagacatgacggcgctgtggccggcctgtttgattattggggacagggcaccctggtcaccgtgtcatctgctacgcgtatccagaaccctgatcctgccgtgtaccagctgcgggatagcaagagcagcgacaagagcgtgtgtctgttcaccgacttcgacagccagaccaacgtgtcccagagcaaggactccgacgtgtacatcaccgataagaccgtgctggacatgcggagcatggacttcaagagcaactccgccgtggcctggtccaacaagtccgatttcgcctgcgccaacgccttcaacaacagcattatccccgaggacacattcttcccaagccccgagagcagctgcggtacccagagttttgggttgttggaccctaaattgtgctatctgttggacggaatcctgttcatttacggagtgatcctgaccgcattgttcctgcgggttaagttttccagatccgcagacgcacccgcttaccaacaagggcagaaccaactctacaatgaacttaatttggggcggagggaagagtacgacgttctggacaaaaggaggggacgagatcccgagatgggcggaaagcctcagcgaaggaagaatccgcaagaggggctttataacgaactccagaaagataaaatggcagaagcctatagtgagattgggatgaagggagaaaggaggaggggtaaaggtcacgatgggttgtaccaaggattgagcacagccactaaagatacctatgatgcgctccacatgcaggccctgccgccaagataa

SEQ ID NO: 32381 - DNA, 2010 bp, synthetic construct
  source 1..2010: mol_type = other DNA
atggccttaccagtgaccgccttgctcctgccgctggccttgctgctccacgccgccaggccgagctacgtgctgacacagcctccatccgtgtctgtggctccaggacagaccgccagaatcacatgcggcggcaacaacatcggcggcaagagcgtgcactggtatcagcagccacctggacaggctccagtggtggtggtgtacgacgacagcgatagacctagcggcatccccgagagattcagcggcagcaattccggcaataccgccacactgaccatcagcagagtggaagctggcgacgaggccgtgtactactgccaagtgtgggacagcagcagcgatcacgtggtgtttggcggcggaacaaagctgacagtgcttctcgaggacctgaagaacgtgttcccacctgaggtggccgtgttcgagcctagcgaggccgagatcagccacacccagaaagccaccctcgtgtgcctggctaccggcttctaccccgaccatgtggaactgtcttggtgggtcaacggcaaagaggtgcacagcggcgtgtctaccgacccccagccactgaaagaacagcccgccctgaacgacagccggtactgcctgagcagcagactgagagtgtccgccaccttctggcagaacccccggaaccacttcagatgccaggtgcagttctacggcctgagcgagaacgacgagtggacccaggacagagccaagcccgtgacccagatcgtgtctgccgaagcctggggcagagccgattgcggatccctgggagagcctcagctgtgctatatcctggacgccatcctgtttctgtacggcatcgtgctgaccctgctgtactgccggctgaagatccaagtgcggaaggccgccatcaccagctacgagaaatccgacggcgtgtacaccggcctgagcaccagaaatcaagagacatacgagacactgaagcacgaaaagcctccacaaagggccaagcgatctggatctggagcaacaaacttctcactactcaaacaagcaggtgacgtggaggagaatcccgggcctactagtatggactggatttggcgcatccttttccttgtcggcgctgctaccggcgcgcattccttcgaacaactccagctgcaagagtctggccctggcctggtcaagcctagcgaaacactgagcctgacctgtaccgtgtctggcggctctatcagctccagcagctatttctggggctggatcagacaacctcctggcaaaggactggaatggatcggctccatctactacagcggcatcacctactacaaccccagcctgaagtccagagtgaccatctccgtggacaccagcaagaaccagttctccctgaagctgagcagcgtgacagccgccgataccgccgtgtattattgtgccagacatgacggcgctgtggccggcctgtttgattattggggacagggcaccctggtcaccgtgtcatctgctacgcgtatccagaaccctgatcctgccgtgtaccagctgcgggatagcaagagcagcgacaagagcgtgtgtctgttcaccgacttcgacagccagaccaacgtgtcccagagcaaggactccgacgtgtacatcaccgataagaccgtgctggacatgcggagcatggacttcaagagcaactccgccgtggcctggtccaacaagtccgatttcgcctgcgccaacgccttcaacaacagcattatccccgaggacacattcttcccaagccccgagagcagctgcggtaccctcggagaaccacagctctgttacattctggatgctatcctgttcctctatgggatcgtcctgacactcctgtattgcagactcaaaattcaagttcgcaaagccgccattacctcttacgagaagagtgatggggtgtacacaggactgtctacccggaatcaagaaacctacgaaaccctcaaacatgagaagccacctcagtaa

SEQ ID NO: 32382 - DNA, 2301 bp, synthetic construct
  source 1..2301: mol_type = other DNA
atggccttaccagtgaccgccttgctcctgccgctggccttgctgctccacgccgccaggccggaggttcagctgcttgagtctggcggaggactggttcaacctggcggaagcctgagactgtcttgtgccgccagcggcttcacctttagcagctacgccatgagctgggtccgacaggctcctggcaaaggactggaatgggtgtccagcatcagcggcagcggcgactacatctactacgccgatagcgtgaagggcagattcaccatcagccgggacatcagcaagaacaccctgtacctccagatgaacagcctgagagccgaggacaccgccgtgtactactgtgccaaagaaggcaccggcgctaacagcagcctggccgattatagaggccagggcacactggtcaccgtgtctagtggtaccggcggaggcggatctggcggcggaggtagcggtggcggaggatctgaattcagctacgtgctgacacagcctccatccgtgtctgtggctccaggacagaccgccagaatcacatgcggcggcaacaacatcggcggcaagagcgtgcactggtatcagcagccacctggacaggctccagtggtggtggtgtacgacgacagcgatagacctagcggcatccccgagagattcagcggcagcaattccggcaataccgccacactgaccatcagcagagtggaagctggcgacgaggccgtgtactactgccaagtgtgggacagcagcagcgatcacgtggtgtttggcggcggaacaaagctgacagtgcttctcgaggccgacgtgtcccccaagcctaccatcttcctgccctctatcgccgagacaaagctccagaaggccggcacctacctgtgcctgctggaaaagttcttcccagatgtgattaagatccactggcaggaaaagaagtccaacaccatcctgggcagccaggaaggcaacaccatgaagaccaacgacacctacatgaagttcagctggctgaccgtgcccgagaagtccctggacaaagaacacagatgcatcgtgcggcacgaaaacaacaagaacggcgtggaccaggaaatcatcttcccacccatcaagaccgatgtgattacaatggaccccaaggacaactgctccaaggacgccaacgataccctgctgctccagctgaccaacaccagcgcctactacatgtacttgttgctgctgctgaagtccgtggtgtacttcgccatcatcacatgctgcctgctgcggagaaccgccttctgctgcaacggcgagaagtctagggccaagcgatctggatctggagcaacaaacttctcactactcaaacaagcaggtgacgtggaggagaatcccgggcctactagtatggactggatttggcgcatccttttccttgtcggcgctgctaccggcgcgcattccttcgaacaactccagctgcaagagtctggccctggcctggtcaagcctagcgaaacactgagcctgacctgtaccgtgtctggcggctctatcagctccagcagctatttctggggctggatcagacaacctcctggcaaaggactggaatggatcggctccatctactacagcggcatcacctactacaaccccagcctgaagtccagagtgaccatctccgtggacaccagcaagaaccagttctccctgaagctgagcagcgtgacagccgccgataccgccgtgtattattgtgccagacatgacggcgctgtggccggcctgtttgattattggggacagggcaccctggtcaccgtgtcatctgctacgcgtagccagcctcacaccaagcccagcgtgttcgtgatgaagaacggcaccaacgtggcctgcctcgtgaaagagttctaccccaaggacatcaggatcaacctggtgtccagcaagaagatcaccgagttcgaccccgccatcgtgatctcccccagcggcaagtacaacgccgtgaagctggggaagtacgaggacagcaacagcgtgacctgctccgtgcagcacgacaacaagaccgtgcacagcaccgactttgaagtgaaaaccgactccaccgaccacgtgaagcccaaagagacagagaacaccaagcagcccagcaagagctgccacaagcccaaggccatcgtgcacaccgagaaagtgaacatgatgagcctgaccgtgctgggcctgcggatgctgttcgccaaaaccgtggccgtgaacttcctgctgaccgccaagctgttcttcctctaa

SEQ ID NO: 32383 - DNA, 3285 bp, synthetic construct
  source 1..3285: mol_type = other DNA
atggccttaccagtgaccgccttgctcctgccgctggccttgctgctccacgccgccaggccggaagtgcagctggttgaatctggcggaggactggttcaggctggcggatctctgagactgtcttgtgccgccagcggcagaacctttagcatgggctggtttagacaggcccctggcaaagagagagagttcgtcgccgccatcacatactctggcggcagcccttactacgccgactctgtgaagggcagattcaccatcagccgggacaacgccaagaacaccgtgtacctccagatgaacagcctgaagcctgaggacaccgccgtgtactactgcgccgccaatccaacatacggcagcgactggaacgccgagaattggggccagggaacccaagtgacagtgtctagcggtaccggcggaggcggatctggcggcggaggtagcggtggcggaggatctgaattcgacatccagatgacacagagccctagcagcctgtctgccagcgtgggagacagagtgaccatcacatgcaaggccagcgaccacatcaacaactggctggcctggtatcagcagaagcctggacaggcccctaagctgctgatctacggcgctaccacactggaaacaggcgtgcccagcagattttctggcagcggctctggcaccgactacaccctgacaatatccagcctccagcctgaggacttcgccacctactactgtcagcagagctggaacaccccttggacattcggccagggcaccaagctggaaatcaagagactcgaggacctgaagaacgtgttcccacctgaggtggccgtgttcgagcctagcgaggccgagatcagccacacccagaaagccaccctcgtgtgcctggctaccggcttctaccccgaccatgtggaactgtcttggtgggtcaacggcaaagaggtgcacagcggcgtgtctaccgacccccagccactgaaagaacagcccgccctgaacgacagccggtactgcctgagcagcagactgagagtgtccgccaccttctggcagaacccccggaaccacttcagatgccaggtgcagttctacggcctgagcgagaacgacgagtggacccaggacagagccaagcccgtgacccagatcgtgtctgccgaagcctggggcagagccgattgcggatcccagagcttcggcctgctggaccccaagctgtgctacctgctggatggcatcctgttcatctacggcgtgatcctgaccgccctgttcctgagagtgaagttcagcagaagcgccgacgcccctgcctaccagcagggacagaaccaactgtacaacgagctgaacctgggcagacgggaagagtacgacgtgctggacaagcggagaggcagggaccctgagatgggcggaaagccccagcggagaaagaacccccaggaaggactgtataacgaactccagaaagacaagatggccgaagcctacagcgagatcggcatgaagggcgagcggagaagaggcaagggccacgatggcctgtaccagggcctgagcaccgccaccaaggacacctatgacgccctgcacatgcaggccctgcctccaagaagggccaagcgatctggatctggagcaacaaacttctcactactcaaacaagcaggtgacgtggaggagaatcccgggcctactagtgccaccatggactggatttggcgcatccttttccttgtcggcgctgctaccggcgcccattccgggcccgaagtgcaactggttgaatccggtggcggcctggtgcaagcaggcggatctctcagacttagctgtgccgcctccggcagaaccttcacaatgggatggtttaggcaggctccagggaaagagagagagttcgtcgccgccatctctctgtctcccacactggcctactacgccgactctgtgaaaggccggttcaccatctccagagataatgccaagaacaccgtggtgctgcaaatgaactctctgaaacccgaggatacagccctgtactattgtgccgctgaccggaagtccgtgatgagcatcagacccgattactggggacagggcacacaagtcacagtgtcctctggatccggcggcggaggatctggcggaggcggatctgggggcggaggctctttcgaacaagttcagcttcaacagcctggcgctgagctggtcaaacctggcgcttctgtgaagatgagctgcaaagccagcggctacgccttcagcagctactggatcaactggatgaagcagaaacccggccagggactcgaatggatcggccaaatctatcccggcgacggcgacaccaactacaacggcaagttcaagggcagagccacactgaccgccgatacctctagcagcacagcctacatgcagctgagcagcctgaccagcgaagatagcgccgtgtacttctgtgcccggtccatcacaacagtcgtgggctgcgctatggactattggggccagggaacaagcgtgaccgtgtctagtacgcgtatccagaaccctgatcctgccgtgtaccagctgcgggatagcaagagcagcgacaagagcgtgtgtctgttcaccgacttcgacagccagaccaacgtgtcccagagcaaggactccgacgtgtacatcaccgataagaccgtgctggacatgcggagcatggacttcaagagcaactccgccgtggcctggtccaacaagtccgatttcgcctgcgccaacgccttcaacaacagcattatccccgaggacacattcttcccaagccccgagagcagctgcggtacccagagttttgggttgttggaccctaaattgtgctatctgttggacggaatcctgttcatttacggagtgatcctgaccgcattgttcctgcgggttaagttttccagatccgcagacgcacccgcttaccaacaagggcagaaccaactctacaatgaacttaatttggggcggagggaagagtacgacgttctggacaaaaggaggggacgagatcccgagatgggcggaaagcctcagcgaaggaagaatccgcaagaggggctttataacgaactccagaaagataaaatggcagaagcctatagtgagattgggatgaagggagaaaggaggaggggtaaaggtcacgatgggttgtaccaaggattgagcacagccactaaagatacctatgatgcgctccacatgcaggccctgccgccaagataa

SEQ ID NO: 32384 - DNA, 2697 bp, synthetic construct; identical to SEQ ID NO: 32341
  source 1..2697: mol_type = other DNA

SEQ ID NO: 32385 - DNA, 1470 bp, synthetic construct
  source 1..1470: mol_type = other DNA
atggccttaccagtgaccgccttgctcctgccgctggccttgctgctccacgccgccaggccggagatcgtgctgacacagagccctggcacactgtcactgtctccaggcgaaagagccacactgagctgcaaagccagccagagcgtgtccatcagcggcatcaacctgatgaactggtatcagcagaagcccggccagcagccaagactgctgatctaccacgccagcatcctggcctctggcatccccgatagattttctggcagcggctccggcaccgacttcaccctgacaatcagcagactggaacccgaggacttcgccgtgtactactgccagcagaccagagagagccctctgacattcggccagggcacaagactggaaatcaaaggcggaggcggaagtggaggcggaggatctggcggcggaggctctgaactgcaactgcttgaatcaggtggcggcctggttcagcctggcggatctctgagactgagctgtgccgccagcggcttcaccttctctaagtacgctatggcctgggtccgacaggcccctggaaaaggacttgagtgggtcgcctctatcagcacaggcggcgtgaacacctactacgccgacagcgtgaaggacagattcaccatcagccgggacaacgccaagaacaccctgtacctccagatgaacagcctgagagccgaggacacagccgtgtattattgcgccacacacaccggcgactacttcgactattggggccagggaacaatggtcaccgtgtcctctacgcgtaccacgacgccagcgccgcgaccaccaacaccggcgcccaccatcgcgtcgcagcccctgtccctgcgcccagaggcgtgccggccagcggcggggggcgcagtgcacacgagggggctggacttcgcctgtgacatctacatctgggcgcccttggccgggacttgtggggtccttctcctgtcactggttatcaccctttactgcaaacggggcagaaagaaactcctgtatatattcaaacaaccatttatgagaccagtacaaactactcaagaggaagatggctgtagctgccgatttccagaagaagaagaaggaggatgtgaactgagagtgaagttcagcaggagcgcagacgcccccgcgtaccagcagggccagaaccagctctataacgagctgaatctaggacgaagagaggagtacgatgttttggacaagagacgtggccgggaccctgagatggggggaaagccgagaaggaagaaccctcaggaaggcctgtacaatgaactgcagaaagataagatggcggaggcctacagtgagattgggatgaaaggcgagcgccggaggggcaaggggcacgatggcctttaccagggtctcagtacagccaccaaggacacctacgacgcccttcacatgcaggccctgccccctcgctaa

SEQ ID NO: 32386 - DNA, 1863 bp, synthetic construct
  source 1..1863: mol_type = other DNA
atggccttaccagtgaccgccttgctcctgccgctggccttgctgctccacgccgccaggccggagatcgtgctgacacagagccctggcacactgtcactgtctccaggcgaaagagccacactgagctgcaaagccagccagagcgtgtccatcagcggcatcaacctgatgaactggtatcagcagaagcccggccagcagccaagactgctgatctaccacgccagcatcctggcctctggcatccccgatagattttctggcagcggctccggcaccgacttcaccctgacaatcagcagactggaacccgaggacttcgccgtgtactactgccagcagaccagagagagccctctgacattcggccagggcacaagactggaaatcaaactcgaggacctgaagaacgtgttcccacctgaggtggccgtgttcgagcctagcgaggccgagatcagccacacccagaaagccaccctcgtgtgcctggctaccggcttctaccccgaccatgtggaactgtcttggtgggtcaacggcaaagaggtgcacagcggcgtgtgtaccgacccccagccactgaaagaacagcccgccctgaacgacagccggtactgcctgagcagcagactgagagtgtccgccaccttctggcagaacccccggaaccacttcagatgccaggtgcagttctacggcctgagcgagaacgacgagtggacccaggacagagccaagcccgtgacccagatcgtgtctgccgaagcctggggcagagccgattgcggctttaccagcgagagctaccagcagggcgtgctgagcgccaccatcctgtacgagatcctgctgggcaaggccaccctgtacgccgtgctggtgtctgccctggtgctgatggctatggtcaagcggaaggacagccggggaagggccaagcgatctggatctggagcaacaaacttctcactactcaaacaagcaggtgacgtggaggagaatcccgggcctactagtatggactggatttggcgcatccttttccttgtcggcgctgctaccggcgcgcattccttcgaacaagttcagctggttgaatccggtggcggagtggtgcaacctggcagaagtctgagactgagctgtgccgccagcggcttcagcttcagcaattatggcatggcctgggtccgacaggcccctggaaaaggacttgagtgggtcgccagcatctctaccggcggaggcaatacctactacgccgacagcgtgaaggacagattcaccatcagccgggacaacagcaagaacaccctgtacctccagatgaacagcctgagagccgaggataccgccgtgtactactgcaccagacacgatagaggcggcctgtattggggccagggaacaatggtcaccgtgtcctctacgcgtatccagaaccctgatcctgccgtgtaccagctgcgggatagcaagagcagcgacaagagcgtgtgtctgttcaccgacttcgacagccagaccaacgtgtcccagagcaaggactccgacgtgtacatcaccgataagtgcgtgctggacatgcggagcatggacttcaagagcaactccgccgtggcctggtccaacaagtccgatttcgcctgcgccaacgccttcaacaacagcattatccccgaggacacattcttcccaagccccgagagcagctgcgacgtgaagctggtggaaaagagcttcgagacagacaccaacctgaacttccagaacctgagcgtgatcggcttcagaatcctgctgctgaaagtggccggctttaacctgctgatgaccctgcggctgtggtccagctaa

SEQ ID NO: 32387 - DNA, 1494 bp, synthetic construct; identical to SEQ ID NO: 1013
  source 1..1494: mol_type = other DNA

SEQ ID NO: 32388 - DNA, 1887 bp, synthetic construct; identical to SEQ ID NO: 1073
  source 1..1887: mol_type = other DNA

SEQ ID NO: 32389 - DNA, 2475 bp, synthetic construct; identical to SEQ ID NO: 22699
  source 1..2475: mol_type = other DNA

SEQ ID NO: 32390 - DNA, 1485 bp, synthetic construct
  source 1..1485: mol_type = other DNA
atggccttaccagtgaccgccttgctcctgccgctggccttgctgctccacgccgccaggccggacttcgtgatgacacagagccctgatagcctggccgtgtctctcggcgagcgagtgaccatgagctgcaagtctagccagagcctgctgaacagcggcaaccagaagaactacctgacctggtatcagcagaagcccggccagcctcctaagctgctgatctactgggccagcaccagagaaagcggcgtgcccgatagattttctggctctggcagcggcaccgacttcaccctgacaatttctagcctgcaagccgaggacgtggccgtgtactactgccagaacgactacagctacccctacaccttcggccagggcaccaagctggaaatcaaaggcggaggcggaagtggaggcggaggatctggcggcggaggctctgaagtgcaactggttcagagcggagccgagctgaagaaacctggggccagcgtgaaggtgtcctgtaaagccagcggctacacctttaccgactactacatgaaatgggtccgacaggccccaggccagggactcgaatggatcggcgatattatccccagcaacggggccaccttctacaaccagaaattcaagggccgcgtgaccatcaccgtggacaagagcacaagcaccgcctacatggaactgagcagcctgagaagcgaggacaccgccgtgtattattgcgccagaagccatctgctgcgggccagttggttcgcctattggggacagggaaccctggtcaccgttagctctacgcgtaccacgacgccagcgccgcgaccaccaacaccggcgcccaccatcgcgtcgcagcccctgtccctgcgcccagaggcgtgccggccagcggcggggggcgcagtgcacacgagggggctggacttcgcctgtgacatctacatctgggcgcccttggccgggacttgtggggtccttctcctgtcactggttatcaccctttactgcaaacggggcagaaagaaactcctgtatatattcaaacaaccatttatgagaccagtacaaactactcaagaggaagatggctgtagctgccgatttccagaagaagaagaaggaggatgtgaactgagagtgaagttcagcaggagcgcagacgcccccgcgtaccagcagggccagaaccagctctataacgagctgaatctaggacgaagagaggagtacgatgttttggacaagagacgtggccgggaccctgagatggggggaaagccgagaaggaagaaccctcaggaaggcctgtacaatgaactgcagaaagataagatggcggaggcctacagtgagattgggatgaaaggcgagcgccggaggggcaaggggcacgatggcctttaccagggtctcagtacagccaccaaggacacctacgacgcccttcacatgcaggccctgccccctcgctaa

SEQ ID NO: 32391 - DNA, 1878 bp, synthetic construct
  source 1..1878: mol_type = other DNA
atggccttaccagtgaccgccttgctcctgccgctggccttgctgctccacgccgccaggccggacttcgtgatgacacagagccctgatagcctggccgtgtctctcggcgagcgagtgaccatgagctgcaagtctagccagagcctgctgaacagcggcaaccagaagaactacctgacctggtatcagcagaagcccggccagcctcctaagctgctgatctactgggccagcaccagagaaagcggcgtgcccgatagattttctggctctggcagcggcaccgacttcaccctgacaatttctagcctgcaagccgaggacgtggccgtgtactactgccagaacgactacagctacccctacaccttcggccagggcaccaagctggaaatcaaactcgaggacctgaagaacgtgttcccacctgaggtggccgtgttcgagcctagcgaggccgagatcagccacacccagaaagccaccctcgtgtgcctggctaccggcttctaccccgaccatgtggaactgtcttggtgggtcaacggcaaagaggtgcacagcggcgtgtgtaccgacccccagccactgaaagaacagcccgccctgaacgacagccggtactgcctgagcagcagactgagagtgtccgccaccttctggcagaacccccggaaccacttcagatgccaggtgcagttctacggcctgagcgagaacgacgagtggacccaggacagagccaagcccgtgacccagatcgtgtctgccgaagcctggggcagagccgattgcggctttaccagcgagagctaccagcagggcgtgctgagcgccaccatcctgtacgagatcctgctgggcaaggccaccctgtacgccgtgctggtgtctgccctggtgctgatggctatggtcaagcggaaggacagccggggaagggccaagcgatctggatctggagcaacaaacttctcactactcaaacaagcaggtgacgtggaggagaatcccgggcctactagtatggactggatttggcgcatccttttccttgtcggcgctgctaccggcgcgcattccttcgaagtgcaactggttcagagcggagccgagctgaagaaacctggggccagcgtgaaggtgtcctgtaaagccagcggctacacctttaccgactactacatgaaatgggtccgacaggccccaggccagggactcgaatggatcggcgatattatccccagcaacggggccaccttctacaaccagaaattcaagggccgcgtgaccatcaccgtggacaagagcacaagcaccgcctacatggaactgagcagcctgagaagcgaggacaccgccgtgtattattgcgccagaagccatctgctgcgggccagttggttcgcctattggggacagggaaccctggtcaccgttagctctacgcgtatccagaaccctgatcctgccgtgtaccagctgcgggatagcaagagcagcgacaagagcgtgtgtctgttcaccgacttcgacagccagaccaacgtgtcccagagcaaggactccgacgtgtacatcaccgataagtgcgtgctggacatgcggagcatggacttcaagagcaactccgccgtggcctggtccaacaagtccgatttcgcctgcgccaacgccttcaacaacagcattatccccgaggacacattcttcccaagccccgagagcagctgcgacgtgaagctggtggaaaagagcttcgagacagacaccaacctgaacttccagaacctgagcgtgatcggcttcagaatcctgctgctgaaagtggccggctttaacctgctgatgaccctgcggctgtggtccagctaa

SEQ ID NO: 32392 - DNA, 2466 bp, synthetic construct; identical to SEQ ID NO: 1044
  source 1..2466: mol_type = other DNA

SEQ ID NO: 32393 - DNA, 1488 bp, synthetic construct
  source 1..1488: mol_type = other DNA
atggccttaccagtgaccgccttgctcctgccgctggccttgctgctccacgccgccaggccggacatcgtgatgacccagagccccgatagcctggccgtgtctctgggagagagagccaccatcaactgcgagagcagccagagcctgctgaacagcggcaaccagaagaactacctgacctggtatcagcagaagcccggccagccccccaagcccctgatctattgggccagcaccagagaaagcggcgtgcccgatagattcagcggcagcggaagcggcaccgacttcaccctgaccatcagttctcttcaggccgaggacgtggccgtgtactactgccagaacgactacagctacccctacaccttcggccagggcaccaagctggaaatcaagagaggcggaggcggaagtggaggcggaggatctggcggcggaggctctgaagtgcagctggtgcagtctggggccgaagtgaagaagcctggcgagagcctgaagatcagctgcaagggcagcggctacagcttcaccgactactacatgaagtgggccagacagatgcccggcaagggcctggaatggatgggcgacatcatccccagcaacggggccaccttctacaaccagaaattcaagggccaagtgaccatctccgccgacaagagcatcagcaccacctacctccagtggtccagcctgaaggccagcgacaccgccatgtactattgcgccagaagccatctgctgcgggccagttggttcgcctattggggccagggaacaatggtcacagtgtccagcacgcgtaccacgacgccagcgccgcgaccaccaacaccggcgcccaccatcgcgtcgcagcccctgtccctgcgcccagaggcgtgccggccagcggcggggggcgcagtgcacacgagggggctggacttcgcctgtgacatctacatctgggcgcccttggccgggacttgtggggtccttctcctgtcactggttatcaccctttactgcaaacggggcagaaagaaactcctgtatatattcaaacaaccatttatgagaccagtacaaactactcaagaggaagatggctgtagctgccgatttccagaagaagaagaaggaggatgtgaactgagagtgaagttcagcaggagcgcagacgcccccgcgtaccagcagggccagaaccagctctataacgagctgaatctaggacgaagagaggagtacgatgttttggacaagagacgtggccgggaccctgagatggggggaaagccgagaaggaagaaccctcaggaaggcctgtacaatgaactgcagaaagataagatggcggaggcctacagtgagattgggatgaaaggcgagcgccggaggggcaaggggcacgatggcctttaccagggtctcagtacagccaccaaggacacctacgacgcccttcacatgcaggccctgccccctcgctga

SEQ ID NO: 32394 - DNA, 1902 bp, synthetic construct
  source 1..1902: mol_type = other DNA
atggccttaccagtgaccgccttgctcctgccgctggccttgctgctccacgccgccaggccggacatcgtgatgacccagagccccgatagcctggccgtgtctctgggagagagagccaccatcaactgcgagagcagccagagcctgctgaacagcggcaaccagaagaactacctgacctggtatcagcagaagcccggccagccccccaagcccctgatctattgggccagcaccagagaaagcggcgtgcccgatagattcagcggcagcggaagcggcaccgacttcaccctgaccatcagttctcttcaggccgaggacgtggccgtgtactactgccagaacgactacagctacccctacaccttcggccagggcaccaagctggaaatcaagagactcgagatccagaaccctgatcctgccgtgtaccagctgcgggatagcaagagcagcgacaagagcgtgtgtctgttcaccgacttcgacagccagaccaacgtgtcccagagcaaggactccgacgtgtacatcaccgataagtgcgtgctggacatgcggagcatggacttcaagagcaactccgccgtggcctggtccaacaagtccgatttcgcctgcgccaacgccttcaacaacagcattatccccgaggacacattcttcccaagccccgagagcagctgcgacgtgaagctggtggaaaagagcttcgagacagacaccaacctgaacttccagaacctgagcgtgatcggcttcagaatcctgctgctgaaagtggccggctttaacctgctgatgaccctgcggctgtggtccagctctagtcgcgccaagagaagcggatctggcgtgaagcagaccctgaatttcgacctgctgaagctggctggcgacgtggaatccaacccaggccctactagtatggactggatttggcgcatccttttccttgtcggcgctgctaccggcgcgcattccttcgaagaagtgcagctggtgcagtctggggccgaagtgaagaagcctggcgagagcctgaagatcagctgcaagggcagcggctacagcttcaccgactactacatgaagtgggccagacagatgcccggcaagggcctggaatggatgggcgacatcatccccagcaacggggccaccttctacaaccagaaattcaagggccaagtgaccatctccgccgacaagagcatcagcaccacctacctccagtggtccagcctgaaggccagcgacaccgccatgtactattgcgccagaagccatctgctgcgggccagttggttcgcctattggggccagggaacaatggtcacagtgtccagcacgcgtgaggacctgaagaacgtgttcccacctgaggtggccgtgttcgagcctagcgaggccgagatcagccacacccagaaagccaccctcgtgtgcctggctaccggcttctaccccgaccatgtggaactgtcttggtgggtcaacggcaaagaggtgcacagcggcgtgtgtaccgacccccagccactgaaagaacagcccgccctgaacgacagccggtactgcctgagcagcagactgagagtgtccgccaccttctggcagaacccccggaaccacttcagatgccaggtgcagttctacggcctgagcgagaacgacgagtggacccaggacagagccaagcccgtgacccagatcgtgtctgccgaagcctggggcagagccgattgcggctttaccagcgagagctaccagcagggcgtgctgagcgccaccatcctgtacgagatcctgctgggcaaggccaccctgtacgccgtgctggtgtctgccctggtgctgatggctatggtcaagcggaaggacagccggggataa

SEQ ID NO: 32395 - DNA, 2472 bp, synthetic construct; identical to SEQ ID NO: 1045
  source 1..2472: mol_type = other DNA

SEQ ID NO: 32396 - DNA, 1470 bp, synthetic construct; identical to SEQ ID NO: 32346
  source 1..1470: mol_type = other DNA

SEQ ID NO: 32397 - DNA, 1866 bp, synthetic construct
  source 1..1866: mol_type = other DNA
atggccttaccagtgaccgccttgctcctgccgctggccttgctgctccacgccgccaggccggaggttcagctgcttgagacaggcggaggactggttcaacctggcggaagcagaggactgagctgtgaaggcagcggctttaccttcagcggcttctggatgagctgggtccgacagacacctggcaagaccctggaatggatcggcgacatcaatagcgacggcagcagcatcaactacgcccctagcatcaaggacaggttcaccatcttccgggacaacgacaagagcatcctgtacctccagatgaccaacgtgcggagcgaggacaccggcacctacttttgtgtgaccacctacggcgactactggggccagggaacaaccctgacagtgtctagtgcttctctcgaggacctgaagaacgtgttcccacctgaggtggccgtgttcgagcctagcgaggccgagatcagccacacccagaaagccaccctcgtgtgcctggctaccggcttctaccccgaccatgtggaactgtcttggtgggtcaacggcaaagaggtgcacagcggcgtgtgtaccgacccccagccactgaaagaacagcccgccctgaacgacagccggtactgcctgagcagcagactgagagtgtccgccaccttctggcagaacccccggaaccacttcagatgccaggtgcagttctacggcctgagcgagaacgacgagtggacccaggacagagccaagcccgtgacccagatcgtgtctgccgaagcctggggcagagccgattgcggctttaccagcgagagctaccagcagggcgtgctgagcgccaccatcctgtacgagatcctgctgggcaaggccaccctgtacgccgtgctggtgtctgccctggtgctgatggctatggtcaagcggaaggacagccggggaagggccaagcgatctggatctggagcaacaaacttctcactactcaaacaagcaggtgacgtggaggagaatcccgggcctactagtatggactggatttggcgcatccttttccttgtcggcgctgctaccggcgcgcattccttcgaagatattgtgatgacccagagccagaaattcatgagcaccagcgtgggcgacagagtgtccgtgacatgtaaagccagccagaacgtgggctctcacgtcggctggtatcagcagaagtctggacagagccccaaggcactgatctacagcgccagcaatcggtacatcggcgtgcccgatagattcaccggctctggcagcggcaccgatttcaccctgaccatcagcaacgtgcagtccgaggacctggccgagtatttctgccagcagtaccacatctacccctacacctttggaggcggcacccggctggaaatcaagagaacagtggctgccacgcgtatccagaaccctgatcctgccgtgtaccagctgcgggatagcaagagcagcgacaagagcgtgtgtctgttcaccgacttcgacagccagaccaacgtgtcccagagcaaggactccgacgtgtacatcaccgataagtgcgtgctggacatgcggagcatggacttcaagagcaactccgccgtggcctggtccaacaagtccgatttcgcctgcgccaacgccttcaacaacagcattatccccgaggacacattcttcccaagccccgagagcagctgcgacgtgaagctggtggaaaagagcttcgagacagacaccaacctgaacttccagaacctgagcgtgatcggcttcagaatcctgctgctgaaagtggccggctttaacctgctgatgaccctgcggctgtggtccagctaa

SEQ ID NO: 32398 - DNA, 2454 bp, synthetic construct
  source 1..2454: mol_type = other DNA
atggccttaccagtgaccgccttgctcctgccgctggccttgctgctccacgccgccaggccggaggttcagctgcttgagacaggcggaggactggttcaacctggcggaagcagaggactgagctgtgaaggcagcggctttaccttcagcggcttctggatgagctgggtccgacagacacctggcaagaccctggaatggatcggcgacatcaatagcgacggcagcagcatcaactacgcccctagcatcaaggacaggttcaccatcttccgggacaacgacaagagcatcctgtacctccagatgaccaacgtgcggagcgaggacaccggcacctacttttgtgtgaccacctacggcgactactggggccagggaacaaccctgacagtgtctagtgcttctctcgaggacctgaagaacgtgttcccacctgaggtggccgtgttcgagcctagcgaggccgagatcagccacacccagaaagccaccctcgtgtgcctggctaccggcttctaccccgaccatgtggaactgtcttggtgggtcaacggcaaagaggtgcacagcggcgtgtctaccgacccccagccactgaaagaacagcccgccctgaacgacagccggtactgcctgagcagcagactgagagtgtccgccaccttctggcagaacccccggaaccacttcagatgccaggtgcagttctacggcctgagcgagaacgacgagtggacccaggacagagccaagcccgtgacccagatcgtgtctgccgaagcctggggcagagccgattgcggatcccagagcttcggcctgctggaccccaagctgtgctacctgctggatggcatcctgttcatctacggcgtgatcctgaccgccctgttcctgagagtgaagttcagcagaagcgccgacgcccctgcctaccagcagggacagaaccaactgtacaacgagctgaacctgggcagacgggaagagtacgacgtgctggacaagcggagaggcagggaccctgagatgggcggaaagccccagcggagaaagaacccccaggaaggactgtataacgaactccagaaagacaagatggccgaagcctacagcgagatcggcatgaagggcgagcggagaagaggcaagggccacgatggcctgtaccagggcctgagcaccgccaccaaggacacctatgacgccctgcacatgcaggccctgcctccaagaagggccaagcgatctggatctggagcaacaaacttctcactactcaaacaagcaggtgacgtggaggagaatcccgggcctactagtatggactggatttggcgcatccttttccttgtcggcgctgctaccggcgcgcattccttcgaagatattgtgatgacccagagccagaaattcatgagcaccagcgtgggcgacagagtgtccgtgacatgtaaagccagccagaacgtgggctctcacgtcggctggtatcagcagaagtctggacagagccccaaggcactgatctacagcgccagcaatcggtacatcggcgtgcccgatagattcaccggctctggcagcggcaccgatttcaccctgaccatcagcaacgtgcagtccgaggacctggccgagtatttctgccagcagtaccacatctacccctacacctttggaggcggcacccggctggaaatcaagagaacagtggctgccacgcgtatccagaaccctgatcctgccgtgtaccagctgcgggatagcaagagcagcgacaagagcgtgtgtctgttcaccgacttcgacagccagaccaacgtgtcccagagcaaggactccgacgtgtacatcaccgataagaccgtgctggacatgcggagcatggacttcaagagcaactccgccgtggcctggtccaacaagtccgatttcgcctgcgccaacgccttcaacaacagcattatccccgaggacacattcttcccaagccccgagagcagctgcggtacccagagttttgggttgttggaccctaaattgtgctatctgttggacggaatcctgttcatttacggagtgatcctgaccgcattgttcctgcgggttaagttttccagatccgcagacgcacccgcttaccaacaagggcagaaccaactctacaatgaacttaatttggggcggagggaagagtacgacgttctggacaaaaggaggggacgagatcccgagatgggcggaaagcctcagcgaaggaagaatccgcaagaggggctttataacgaactccagaaagataaaatggcagaagcctatagtgagattgggatgaagggagaaaggaggaggggtaaaggtcacgatgggttgtaccaaggattgagcacagccactaaagatacctatgatgcgctccacatgcaggccctgccgccaagataa

SEQ ID NO: 32399 - DNA, 1467 bp, synthetic construct
  source 1..1467: mol_type = other DNA
atggccttaccagtgaccgccttgctcctgccgctggccttgctgctccacgccgccaggccggacgtcgtgatgacccagacaccactgagcctgcctgtgtctctgggcgatcaggccagcatcagctgtagaagcagccagagcctggtgcacagaaacggcaacacctacctgcactggtatctccagaagcctggacagagccccaagctgctgatccacaaggtgtccaacagattcagcggcgtgcccgacagattttctggcagcggcagcggaaccgacttcaccctgaagatcagcagagtggaagccgaggacctgggcgtgtacttctgtagccagagcacacacgtgccacctctgacatttggagccggcaccaagctggaactgaagagaggaggcggaggaagtggcggcggaggatctggcggtggtggttctgaagttcagctgctgcaaagcggccctgagctggaaaaacctggcgcttccgtgatgatctcctgcaaggccagcggctctagcttcaccggctacaacatgaactgggtccgacagaacatcggcaagagcctggaatggatcggcgctatcgacccttactacggcggcaccagctacaaccagaagttcaagggcagagccacactgaccgtggacaagagcagcagcacagcctacatgcacctgaagtccctgaccagcgaggacagcgccgtgtactattgtgtgtccggcatggaatactggggccagggcacaagcgtgaccgtttcttctacgcgtaccacgacgccagcgccgcgaccaccaacaccggcgcccaccatcgcgtcgcagcccctgtccctgcgcccagaggcgtgccggccagcggcggggggcgcagtgcacacgagggggctggacttcgcctgtgacatctacatctgggcgcccttggccgggacttgtggggtccttctcctgtcactggttatcaccctttactgcaaacggggcagaaagaaactcctgtatatattcaaacaaccatttatgagaccagtacaaactactcaagaggaagatggctgtagctgccgatttccagaagaagaagaaggaggatgtgaactgagagtgaagttcagcaggagcgcagacgcccccgcgtaccagcagggccagaaccagctctataacgagctgaatctaggacgaagagaggagtacgatgttttggacaagagacgtggccgggaccctgagatggggggaaagccgagaaggaagaaccctcaggaaggcctgtacaatgaactgcagaaagataagatggcggaggcctacagtgagattgggatgaaaggcgagcgccggaggggcaaggggcacgatggcctttaccagggtctcagtacagccaccaaggacacctacgacgcccttcacatgcaggccctgccccctcgctaa

SEQ ID NO: 32400 - DNA, 1860 bp, synthetic construct; identical to SEQ ID NO: 32375
  source 1..1860: mol_type = other DNA

SEQ ID NO: 32401 - DNA, 2448 bp, synthetic construct
  source 1..2448: mol_type = other DNA
atggccttaccagtgaccgccttgctcctgccgctggccttgctgctccacgccgccaggccggacgtcgtgatgacccagacaccactgagcctgcctgtgtctctgggcgatcaggccagcatcagctgtagaagcagccagagcctggtgcacagaaacggcaacacctacctgcactggtatctccagaagcctggacagagccccaagctgctgatccacaaggtgtccaacagattcagcggcgtgcccgacagattttctggcagcggcagcggaaccgacttcaccctgaagatcagcagagtggaagccgaggacctgggcgtgtacttctgtagccagagcacacacgtgccacctctgacatttggagccggcaccaagctggaactgaagagactcgaggacctgaagaacgtgttcccacctgaggtggccgtgttcgagcctagcgaggccgagatcagccacacccagaaagccaccctcgtgtgcctggctaccggcttctaccccgaccatgtggaactgtcttggtgggtcaacggcaaagaggtgcacagcggcgtgtctaccgacccccagccactgaaagaacagcccgccctgaacgacagccggtactgcctgagcagcagactgagagtgtccgccaccttctggcagaacccccggaaccacttcagatgccaggtgcagttctacggcctgagcgagaacgacgagtggacccaggacagagccaagcccgtgacccagatcgtgtctgccgaagcctggggcagagccgattgcggatcccagagcttcggcctgctggaccccaagctgtgctacctgctggatggcatcctgttcatctacggcgtgatcctgaccgccctgttcctgagagtgaagttcagcagaagcgccgacgcccctgcctaccagcagggacagaaccaactgtacaacgagctgaacctgggcagacgggaagagtacgacgtgctggacaagcggagaggcagggaccctgagatgggcggaaagccccagcggagaaagaacccccaggaaggactgtataacgaactccagaaagacaagatggccgaagcctacagcgagatcggcatgaagggcgagcggagaagaggcaagggccacgatggcctgtaccagggcctgagcaccgccaccaaggacacctatgacgccctgcacatgcaggccctgcctccaagaagggccaagcgatctggatctggagcaacaaacttctcactactcaaacaagcaggtgacgtggaggagaatcccgggcctactagtatggactggatttggcgcatccttttccttgtcggcgctgctaccggcgcgcattccttcgaagttcagctgctgcaaagcggccctgagctggaaaaacctggcgcttccgtgatgatctcctgcaaggccagcggctctagcttcaccggctacaacatgaactgggtccgacagaacatcggcaagagcctggaatggatcggcgctatcgacccttactacggcggcaccagctacaaccagaagttcaagggcagagccacactgaccgtggacaagagcagcagcacagcctacatgcacctgaagtccctgaccagcgaggacagcgccgtgtactattgtgtgtccggcatggaatactggggccagggcacaagcgtgaccgtttcttctacgcgtatccagaaccctgatcctgccgtgtaccagctgcgggatagcaagagcagcgacaagagcgtgtgtctgttcaccgacttcgacagccagaccaacgtgtcccagagcaaggactccgacgtgtacatcaccgataagaccgtgctggacatgcggagcatggacttcaagagcaactccgccgtggcctggtccaacaagtccgatttcgcctgcgccaacgccttcaacaacagcattatccccgaggacacattcttcccaagccccgagagcagctgcggtacccagagttttgggttgttggaccctaaattgtgctatctgttggacggaatcctgttcatttacggagtgatcctgaccgcattgttcctgcgggttaagttttccagatccgcagacgcacccgcttaccaacaagggcagaaccaactctacaatgaacttaatttggggcggagggaagagtacgacgttctggacaaaaggaggggacgagatcccgagatgggcggaaagcctcagcgaaggaagaatccgcaagaggggctttataacgaactccagaaagataaaatggcagaagcctatagtgagattgggatgaagggagaaaggaggaggggtaaaggtcacgatgggttgtaccaaggattgagcacagccactaaagatacctatgatgcgctccacatgcaggccctgccgccaagataa

SEQ ID NO: 32402 - DNA, 1884 bp, synthetic construct
  source 1..1884: mol_type = other DNA
atggccttaccagtgaccgccttgctcctgccgctggccttgctgctccacgccgccaggccggacatccagatgacacagagccctagcagcctgtctgccagcgtgggagacagagtgaccatcacctgtagagccagccaggacgtgaacacagccgtggcttggtatcagcagaagcctggcaaggcccctaagctgctgatctacagcgccagctttctgtacagcggcgtgcccagcagattcagcggaagcagaagcggcaccgacttcaccctgacaatatccagcctccagcctgaggacttcgccacctactactgccagcagcactacaccacacctccaacattcggccagggcaccaaggtggaaatcaagagaacactcgagatccagaaccctgatcctgccgtgtaccagctgcgggatagcaagagcagcgacaagagcgtgtgtctgttcaccgacttcgacagccagaccaacgtgtcccagagcaaggactccgacgtgtacatcaccgataagtgcgtgctggacatgcggagcatggacttcaagagcaactccgccgtggcctggtccaacaagtccgatttcgcctgcgccaacgccttcaacaacagcattatccccgaggacacattcttcccaagccccgagagcagctgcgacgtgaagctggtggaaaagagcttcgagacagacaccaacctgaacttccagaacctgagcgtgatcggcttcagaatcctgctgctgaaagtggccggctttaacctgctgatgaccctgcggctgtggtccagctctagtcgcgccaagagaagcggatctggcgtgaagcagaccctgaatttcgacctgctgaagctggctggcgacgtggaatccaacccaggccctactagtatggactggatttggcgcatccttttccttgtcggcgctgctaccggcgcgcattccttcgaagtgcagctggttgaatcaggtggcggcctggttcaacctggcggatctctgagactgagctgtgccgccagcggcttcaacatcaaggacacctacatccactgggtccgacaggcccctggcaaaggacttgaatgggtcgccagaatctaccccaccaacggctacaccagatacgccgactctgtgaagggcagattcaccatcagcgccgacaccagcaagaacaccgcctacctccagatgaactccctgagagccgaggacaccgccgtgtactactgtagcagatggggcggagccggagcctacgctatggatgtttggggccagggaaccctggtcaccgtgtcatctacgcgtgaggacctgaagaacgtgttcccacctgaggtggccgtgttcgagcctagcgaggccgagatcagccacacccagaaagccaccctcgtgtgcctggctaccggcttctaccccgaccatgtggaactgtcttggtgggtcaacggcaaagaggtgcacagcggcgtgtgtaccgacccccagccactgaaagaacagcccgccctgaacgacagccggtactgcctgagcagcagactgagagtgtccgccaccttctggcagaacccccggaaccacttcagatgccaggtgcagttctacggcctgagcgagaacgacgagtggacccaggacagagccaagcccgtgacccagatcgtgtctgccgaagcctggggcagagccgattgcggctttaccagcgagagctaccagcagggcgtgctgagcgccaccatcctgtacgagatcctgctgggcaaggccaccctgtacgccgtgctggtgtctgccctggtgctgatggctatggtcaagcggaaggacagccggggataa

SEQ ID NO: 32403 - DNA, 1854 bp, synthetic construct
  source 1..1854: mol_type = other DNA
atggccttaccagtgaccgccttgctcctgccgctggccttgctgctccacgccgccaggccggacatccagatgacacagagccctagcagcctgtctgccagcgtgggagacagagtgaccatcacctgtagagccagccaggacatcagcaactacctgaactggtatcagcagaagcccggcaaggcccctaagctgctgatctactacaccagcagactgcacagcggcgtgcccagcagattttctggctctggcagcggcaccgacttcaccctgacaatatctagcctccagcctgaggacttcgccacctactattgccagcagggcaacaccctgccttacacatttggacagggcaccaaggtggaaatcaagagactcgaggacctgaagaacgtgttcccacctgaggtggccgtgttcgagcctagcgaggccgagatcagccacacccagaaagccaccctcgtgtgcctggctaccggcttctaccccgaccatgtggaactgtcttggtgggtcaacggcaaagaggtgcacagcggcgtgtgtaccgacccccagccactgaaagaacagcccgccctgaacgacagccggtactgcctgagcagcagactgagagtgtccgccaccttctggcagaacccccggaaccacttcagatgccaggtgcagttctacggcctgagcgagaacgacgagtggacccaggacagagccaagcccgtgacccagatcgtgtctgccgaagcctggggcagagccgattgcggctttaccagcgagagctaccagcagggcgtgctgagcgccaccatcctgtacgagatcctgctgggcaaggccaccctgtacgccgtgctggtgtctgccctggtgctgatggctatggtcaagcggaaggacagccggggaagggccaagcgatctggatctggagcaacaaacttctcactactcaaacaagcaggtgacgtggaggagaatcccgggcctactagtatggactggatttggcgcatccttttccttgtcggcgctgctaccggcgcgcattccttcgaagtgcagctggttgaatcaggtggcggcctggttcaacctggcggatctctgagactgagctgtgccgccagcggcttcaccttcagcgactactttatgagctgggtccgacaggcccctggcaaaggacttgaatgggtcgccaccatcagcaatggcggcacctacacttactaccccgacagcgtgaagggcagattcaccatctccagagacaacagcaagaacaccctgtacctccagatgaactccctgagagccgaggacaccgccgtgtactactgcgccagattcgacggctacatcttcgactattggggccagggcaccctggtcacagtctcttctacgcgtatccagaaccctgatcctgccgtgtaccagctgcgggatagcaagagcagcgacaagagcgtgtgtctgttcaccgacttcgacagccagaccaacgtgtcccagagcaaggactccgacgtgtacatcaccgataagtgcgtgctggacatgcggagcatggacttcaagagcaactccgccgtggcctggtccaacaagtccgatttcgcctgcgccaacgccttcaacaacagcattatccccgaggacacattcttcccaagccccgagagcagctgcgacgtgaagctggtggaaaagagcttcgagacagacaccaacctgaacttccagaacctgagcgtgatcggcttcagaatcctgctgctgaaagtggccggctttaacctgctgatgaccctgcggctgtggtccagctaa

SEQ ID NO: 32404 - DNA, 1854 bp, synthetic construct
  source 1..1854: mol_type = other DNA
atggccttaccagtgaccgccttgctcctgccgctggccttgctgctccacgccgccaggccggacatccagatgacacagagccctagcagcctgtctgccagcgtgggagacagagtgaccatcacctgtagagccagccaggacatcagcaactacctgaactggtatcagcagaagcccggcaaggcccctaagctgctgatctactacaccagcagactgcacagcggcgtgcccagcagattttctggctctggcagcggcaccgacttcaccctgacaatatctagcctccagcctgaggacttcgccacctactattgccagcagggcaacaccctgccttacacatttggacagggcaccaaggtggaaatcaagagactcgaggacctgaagaacgtgttcccacctgaggtggccgtgttcgagcctagcgaggccgagatcagccacacccagaaagccaccctcgtgtgcctggctaccggcttctaccccgaccatgtggaactgtcttggtgggtcaacggcaaagaggtgcacagcggcgtgtgtaccgacccccagccactgaaagaacagcccgccctgaacgacagccggtactgcctgagcagcagactgagagtgtccgccaccttctggcagaacccccggaaccacttcagatgccaggtgcagttctacggcctgagcgagaacgacgagtggacccaggacagagccaagcccgtgacccagatcgtgtctgccgaagcctggggcagagccgattgcggctttaccagcgagagctaccagcagggcgtgctgagcgccaccatcctgtacgagatcctgctgggcaaggccaccctgtacgccgtgctggtgtctgccctggtgctgatggctatggtcaagcggaaggacagccggggaagggccaagcgatctggatctggagcaacaaacttctcactactcaaacaagcaggtgacgtggaggagaatcccgggcctactagtatggactggatttggcgcatccttttccttgtcggcgctgctaccggcgcgcattccttcgaagtgcagctggttgaatcaggtggcggcctggttcaacctggcggatctctgagactgagctgtgccgccagcggctacaccttcagcgactactttatgagctgggtccgacaggcccctggcaaaggacttgaatgggtcgccaccatcagcaatggcggcacctacacttactaccccgacagcgtgaagggcagattcaccatctccagagacaacagcaagaacaccctgtacctccagatgaactccctgagagccgaggacaccgccgtgtactactgcgccagattcgacggctacatcttcgactattggggccagggcaccctggtcacagtctcttctacgcgtatccagaaccctgatcctgccgtgtaccagctgcgggatagcaagagcagcgacaagagcgtgtgtctgttcaccgacttcgacagccagaccaacgtgtcccagagcaaggactccgacgtgtacatcaccgataagtgcgtgctggacatgcggagcatggacttcaagagcaactccgccgtggcctggtccaacaagtccgatttcgcctgcgccaacgccttcaacaacagcattatccccgaggacacattcttcccaagccccgagagcagctgcgacgtgaagctggtggaaaagagcttcgagacagacaccaacctgaacttccagaacctgagcgtgatcggcttcagaatcctgctgctgaaagtggccggctttaacctgctgatgaccctgcggctgtggtccagctaa

SEQ ID NO: 32405 - DNA, 1857 bp, synthetic construct
  source 1..1857: mol_type = other DNA
atggccttaccagtgaccgccttgctcctgccgctggccttgctgctccacgccgccaggccggacatccagatgacacagagccctagcagcctgtctgccagcgtgggagacagagtgaccatcacctgtagagccagccaggacatcagcaactacctgaactggtatcagcagaagcccggcaaggcccctaagctgctgatctactacaccagcagactgcacagcggcgtgcccagcagattttctggctctggcagcggcaccgacttcaccctgacaatatctagcctccagcctgaggacttcgccacctactattgccagcagggcaacaccctgccttacacatttggacagggcaccaaggtggaaatcaagagactcgaggccgacgtgtcccccaagcctaccatcttcctgccctctatcgccgagacaaagctccagaaggccggcacctacctgtgcctgctggaaaagttcttcccagatgtgattaagatccactggcaggaaaagaagtccaacaccatcctgggcagccaggaaggcaacaccatgaagaccaacgacacctacatgaagttcagctggctgaccgtgcccgagaagtccctggacaaagaacacagatgcatcgtgcggcacgaaaacaacaagaacggcgtggaccaggaaatcatcttcccacccatcaagaccgatgtgattacaatggaccccaaggacaactgctccaaggacgccaacgataccctgctgctccagctgaccaacaccagcgcctactacatgtacttgttgctgctgctgaagtccgtggtgtacttcgccatcatcacatgctgcctgctgcggagaaccgccttctgctgcaacggcgagaagtctagggccaagcgatctggatctggagcaacaaacttctcactactcaaacaagcaggtgacgtggaggagaatcccgggcctactagtatggactggatttggcgcatccttttccttgtcggcgctgctaccggcgcgcattccttcgaagtgcagctggttgaatcaggtggcggcctggttcaacctggcggatctctgagactgagctgtgccgccagcggctacaccttcagcgactactttatgagctgggtccgacaggcccctggcaaaggacttgaatgggtcgccaccatcagcaatggcggcacctacacttactaccccgacagcgtgaagggcagattcaccatctccagagacaacagcaagaacaccctgtacctccagatgaactccctgagagccgaggacaccgccgtgtactactgcgccagattcgacggctacatcttcgactattggggccagggcaccctggtcacagtctcttctacgcgtcctcacaccaagcccagcgtgttcgtgatgaagaacggcaccaacgtggcctgcctcgtgaaagagttctaccccaaggacatcaggatcaacctggtgtccagcaagaagatcaccgagttcgaccccgccatcgtgatctcccccagcggcaagtacaacgccgtgaagctggggaagtacgaggacagcaacagcgtgacctgctccgtgcagcacgacaacaagaccgtgcacagcaccgactttgaagtgaaaaccgactccaccgaccacgtgaagcccaaagagacagagaacaccaagcagcccagcaagagctgccacaagcccaaggccatcgtgcacaccgagaaagtgaacatgatgagcctgaccgtgctgggcctgcggatgctgttcgccaaaaccgtggccgtgaacttcctgctgaccgccaagctgttcttcctctaa

SEQ ID NO: 32406 - DNA, 2838 bp, synthetic construct
  source 1..2838: mol_type = other DNA
atggccttaccagtgaccgccttgctcctgccgctggccttgctgctccacgccgccaggccggacatccagatgacacagagccctagcagcctgtctgccagcgtgggagacagagtgaccatcacctgtagagccagccaggacatcagcaactacctgaactggtatcagcagaagcccggcaaggcccctaagctgctgatctactacaccagcagactgcacagcggcgtgcccagcagattttctggctctggcagcggcaccgacttcaccctgacaatatctagcctccagcctgaggacttcgccacctactattgccagcagggcaacaccctgccttacacatttggacagggcaccaaggtggaaatcaagagactcgaggacctgaagaacgtgttcccacctgaggtggccgtgttcgagcctagcaaggccgagatcgcccacacccagaaagccaccctcgtgtgcctggctaccggcttctaccccgaccatgtggaactgtcttggtgggtcaacggcaaagaggtgcacagcggcgtgtgtaccgacccccagccactgaaagaacagcccgccctgaacgacagccggtactgcctgagcagcagactgagagtgtccgccaccttctggcagaacccccggaaccacttcagatgccaggtgcagttctacggcctgagcgagaacgacgagtggacccaggacagagccaagcccgtgacccagatcgtgtctgccgaagcctggggcagagccgattgcggatcccagagcttcggcctgctggaccccaagctgtgctacctgctggatggcatcctgttcatctacggcgtgatcctgaccgccctgttcctgagagtgaagttcagcagaagcgccgacgcccctgcctaccagcagggacagaaccaactgtacaacgagctgaacctgggcagacgggaagagtacgacgtgctggacaagcggagaggcagggaccctgagatgggcggaaagccccagcggagaaagaacccccaggaaggactgtataacgaactccagaaagacaagatggccgaagcctacagcgagatcggcatgaagggcgagcggagaagaggcaagggccacgatggcctgtaccagggcctgagcaccgccaccaaggacacctatgacgccctgcacatgcaggccctgcctccaagaagggccaagcgatctggatctggagcaacaaacttctcactactcaaacaagcaggtgacgtggaggagaatcccgggcctactagtgccaccatggactggatttggcgcatccttttccttgtcggcgctgctaccggcgcccattccgggcccgaggtgcagctggttgaatctggcggaggactggttcagcctggcggatctctgagactgtcttgtgctgcttctggcggcgattggagcgccaacttcatgtactggtacagacaggcccctggcaagcagagagagctggtcgccagaatctctggcagaggcgtggtggactacgtggaaagcgtgaagggcagattcaccatcagccgggacaacagcaagaacaccctgtacctccagatgaacagcctgagagccgaggacaccgccgtgtactattgtgccgtggcctcttattggggccagggcacactggtcacagtgtctagtggatccggcggcggaggatctggcggaggcggatctgggggcggaggctctttcgaagtgcagctggttgaatcaggtggcggcctggttcaacctggcggatctctgagactgagctgtgccgccagcggctacaccttcagcgactactttatgagctgggtccgacaggcccctggcaaaggacttgaatgggtcgccaccatcagcaatggcggcacctacacttactaccccgacagcgtgaagggcagattcaccatctccagagacaacagcaagaacaccctgtacctccagatgaactccctgagagccgaggacaccgccgtgtactactgcgccagattcgacggctacatcttcgactattggggccagggcaccctggtcacagtctcttctacgcgtatccagaaccctgatcctgccgtgtaccagctgcgggatagcaagagcagcgacaagagcgtgtgtctgttcaccgacttcgacagccagaccaacgtgtcccagagcaaggactccgacgtgtacatcaccgataagtgcgtgctggacatgcggagcatggacttcaagagcaactccgccgtggcctggtccaacaagtccgatttcgcctgcgccaacgccttcaacaacagcattatccccgaggacacattcttcccaagcagcgacgtgccctgcggtacccagagttttgggttgttggaccctaaattgtgctatctgttggacggaatcctgttcatttacggagtgatcctgaccgcattgttcctgcgggttaagttttccagatccgcagacgcacccgcttaccaacaagggcagaaccaactctacaatgaacttaatttggggcggagggaagagtacgacgttctggacaaaaggaggggacgagatcccgagatgggcggaaagcctcagcgaaggaagaatccgcaagaggggctttataacgaactccagaaagataaaatggcagaagcctatagtgagattgggatgaagggagaaaggaggaggggtaaaggtcacgatgggttgtaccaaggattgagcacagccactaaagatacctatgatgcgctccacatgcaggccctgccgccaagataa

SEQ ID NO: 32407 - DNA, 2838 bp, synthetic construct
  source 1..2838: mol_type = other DNA
atggccttaccagtgaccgccttgctcctgccgctggccttgctgctccacgccgccaggccggacatccagatgacacagagccctagcagcctgtctgccagcgtgggagacagagtgaccatcacctgtagagccagccaggacatcagcagctacctgaactggtatcagcagaagcccggcaaggcccctaagctgctgatctactacaccagcagactgcacagcggcgtgcccagcagattttctggctctggcagcggcaccgacttcaccctgacaatatctagcctccagcctgaggacttcgccacctactattgccagcagggcaacaccctgccttacacatttggacagggcaccaaggtggaaatcaagagactcgaggacctgaagaacgtgttcccacctgaggtggccgtgttcgagcctagcgaggccgagatcagccacacccagaaagccaccctcgtgtgcctggctaccggcttctaccccgaccatgtggaactgtcttggtgggtcaacggcaaagaggtgcacagcggcgtgtctaccgacccccagccactgaaagaacagcccgccctgaacgacagccggtactgcctgagcagcagactgagagtgtccgccaccttctggcagaacccccggaaccacttcagatgccaggtgcagttctacggcctgagcgagaacgacgagtggacccaggacagagccaagcccgtgacccagatcgtgtctgccgaagcctggggcagagccgattgcggatcccagagcttcggcctgctggaccccaagctgtgctacctgctggatggcatcctgttcatctacggcgtgatcctgaccgccctgttcctgagagtgaagttcagcagaagcgccgacgcccctgcctaccagcagggacagaaccaactgtacaacgagctgaacctgggcagacgggaagagtacgacgtgctggacaagcggagaggcagggaccctgagatgggcggaaagccccagcggagaaagaacccccaggaaggactgtataacgaactccagaaagacaagatggccgaagcctacagcgagatcggcatgaagggcgagcggagaagaggcaagggccacgatggcctgtaccagggcctgagcaccgccaccaaggacacctatgacgccctgcacatgcaggccctgcctccaagaagggccaagcgatctggatctggagcaacaaacttctcactactcaaacaagcaggtgacgtggaggagaatcccgggcctactagtgccaccatggactggatttggcgcatccttttccttgtcggcgctgctaccggcgcccattccgggcccgaggtgcagctggttgaatctggcggaggactggttcagcctggcggatctctgagactgtcttgtgctgcttctggcggcgattggagcgccaacttcatgtactggtacagacaggcccctggcaagcagagagagctggtcgccagaatctctggcagaggcgtggtggactacgtggaaagcgtgaagggcagattcaccatcagccgggacaacagcaagaacaccctgtacctccagatgaacagcctgagagccgaggacaccgccgtgtactattgtgccgtggcctcttattggggccagggcacactggtcacagtgtctagtggatccggcggcggaggatctggcggaggcggatctgggggcggaggctctttcgaagtgcagctggttgaatcaggtggcggcctggttcaacctggcggatctctgagactgagctgtgccgccagcggctacaccttcagcgactactttatgagctgggtccgacaggcccctggcaaaggacttgaatgggtcgccaccatcagcaatggcggcacctacacttactaccccgacagcgtgaagggcagattcaccatctccagagacaacagcaagaacaccctgtacctccagatgaactccctgagagccgaggacaccgccgtgtactactgcgccagattcgacggctacatcttcgactattggggccagggcaccctggtcacagtctcttctacgcgtatccagaaccctgatcctgccgtgtaccagctgcgggatagcaagagcagcgacaagagcgtgtgtctgttcaccgacttcgacagccagaccaacgtgtcccagagcaaggactccgacgtgtacatcaccgataagaccgtgctggacatgcggagcatggacttcaagagcaactccgccgtggcctggtccaacaagtccgatttcgcctgcgccaacgccttcaacaacagcattatccccgaggacacattcttcccaagccccgagagcagctgcggtacccagagttttgggttgttggaccctaaattgtgctatctgttggacggaatcctgttcatttacggagtgatcctgaccgcattgttcctgcgggttaagttttccagatccgcagacgcacccgcttaccaacaagggcagaaccaactctacaatgaacttaatttggggcggagggaagagtacgacgttctggacaaaaggaggggacgagatcccgagatgggcggaaagcctcagcgaaggaagaatccgcaagaggggctttataacgaactccagaaagataaaatggcagaagcctatagtgagattgggatgaagggagaaaggaggaggggtaaaggtcacgatgggttgtaccaaggattgagcacagccactaaagatacctatgatgcgctccacatgcaggccctgccgccaagataa

SEQ ID NO: 32408 - DNA, 2442 bp, synthetic construct
  source 1..2442: mol_type = other DNA
atggccttaccagtgaccgccttgctcctgccgctggccttgctgctccacgccgccaggccggacatccagatgacacagagccctagcagcctgtctgccagcgtgggagacagagtgaccatcacctgtagagccagccaggacatcagcagctacctgaactggtatcagcagaagcccggcaaggcccctaagctgctgatctactacaccagcagactgcacagcggcgtgcccagcagattttctggctctggcagcggcaccgacttcaccctgacaatatctagcctccagcctgaggacttcgccacctactattgccagcagggcaacaccctgccttacacatttggacagggcaccaaggtggaaatcaagagactcgaggacctgaagaacgtgttcccacctgaggtggccgtgttcgagcctagcgaggccgagatcagccacacccagaaagccaccctcgtgtgcctggctaccggcttctaccccgaccatgtggaactgtcttggtgggtcaacggcaaagaggtgcacagcggcgtgtctaccgacccccagccactgaaagaacagcccgccctgaacgacagccggtactgcctgagcagcagactgagagtgtccgccaccttctggcagaacccccggaaccacttcagatgccaggtgcagttctacggcctgagcgagaacgacgagtggacccaggacagagccaagcccgtgacccagatcgtgtctgccgaagcctggggcagagccgattgcggatcccagagcttcggcctgctggaccccaagctgtgctacctgctggatggcatcctgttcatctacggcgtgatcctgaccgccctgttcctgagagtgaagttcagcagaagcgccgacgcccctgcctaccagcagggacagaaccaactgtacaacgagctgaacctgggcagacgggaagagtacgacgtgctggacaagcggagaggcagggaccctgagatgggcggaaagccccagcggagaaagaacccccaggaaggactgtataacgaactccagaaagacaagatggccgaagcctacagcgagatcggcatgaagggcgagcggagaagaggcaagggccacgatggcctgtaccagggcctgagcaccgccaccaaggacacctatgacgccctgcacatgcaggccctgcctccaagaagggccaagcgatctggatctggagcaacaaacttctcactactcaaacaagcaggtgacgtggaggagaatcccgggcctactagtatggactggatttggcgcatccttttccttgtcggcgctgctaccggcgcgcattccttcgaagtgcagctggttgaatcaggtggcggcctggttcaacctggcggatctctgagactgagctgtgccgccagcggctacaccttcagcgactactttatgagctgggtccgacaggcccctggcaaaggacttgaatgggtcgccaccatcagcaatggcggcacctacacttactaccccgacagcgtgaagggcagattcaccatctccagagacaacagcaagaacaccctgtacctccagatgaactccctgagagccgaggacaccgccgtgtactactgcgccagattcgacggctacatcttcgactattggggccagggcaccctggtcacagtctcttctacgcgtatccagaaccctgatcctgccgtgtaccagctgcgggatagcaagagcagcgacaagagcgtgtgtctgttcaccgacttcgacagccagaccaacgtgtcccagagcaaggactccgacgtgtacatcaccgataagaccgtgctggacatgcggagcatggacttcaagagcaactccgccgtggcctggtccaacaagtccgatttcgcctgcgccaacgccttcaacaacagcattatccccgaggacacattcttcccaagccccgagagcagctgcggtacccagagttttgggttgttggaccctaaattgtgctatctgttggacggaatcctgttcatttacggagtgatcctgaccgcattgttcctgcgggttaagttttccagatccgcagacgcacccgcttaccaacaagggcagaaccaactctacaatgaacttaatttggggcggagggaagagtacgacgttctggacaaaaggaggggacgagatcccgagatgggcggaaagcctcagcgaaggaagaatccgcaagaggggctttataacgaactccagaaagataaaatggcagaagcctatagtgagattgggatgaagggagaaaggaggaggggtaaaggtcacgatgggttgtaccaaggattgagcacagccactaaagatacctatgatgcgctccacatgcaggccctgccgccaagataa

SEQ ID NO: 32409 - DNA, 2574 bp, synthetic construct
  source 1..2574: mol_type = other DNA
atggccttaccagtgaccgccttgctcctgccgctggccttgctgctccacgccgccaggccggacatccagatgacccagagccccagcagcctgtctgccagcgtgggcgacagagtgaccatcacctgtagagccagccaggacgtgaacaccgccgtggcctggtatcagcagaagcctggcaaggcccccaagctgctgatctacagcgccagcttcctggaaagcggcgtgcccagcagattcagcggaagcagaagcggcaccgacttcaccctgaccatcagctccctccagcccgaggacttcgccacctactactgccagcagcactacaccacccctcccaccttcggccagaccaaggtggaaatcaagagactcgaggacctgaagaacgtgttcccacctgaggtggccgtgttcgagcctagcaaggccgagatcgcccacacccagaaagccaccctcgtgtgcctggctaccggcttctaccccgaccatgtggaactgtcttggtgggtcaacggcaaagaggtgcacagcggcgtgtgtaccgacccccagccactgaaagaacagcccgccctgaacgacagccggtactgcctgagcagcagactgagagtgtccgccaccttctggcagaacccccggaaccacttcagatgccaggtgcagttctacggcctgagcgagaacgacgagtggacccaggacagagccaagcccgtgacccagatcgtgtctgccgaagcctggggcagagccgattgcggatcccagagcttcggcctgctggaccccaagctgtgctacctgctggatggcatcctgttcatctacggcgtgatcctgaccgccctgttcctgaaacggggcagaaagaaactcctgtatatattcaaacaaccatttatgagaccagtacaaactactcaagaggaagatggctgtagctgccgatttccagaagaagaagaaggaggatgtgaactgagagtgaagttcagcagaagcgccgacgcccctgcctaccagcagggacagaaccaactgtacaacgagctgaacctgggcagacgggaagagtacgacgtgctggacaagcggagaggcagggaccctgagatgggcggaaagccccagcggagaaagaacccccaggaaggactgtataacgaactccagaaagacaagatggccgaagcctacagcgagatcggcatgaagggcgagcggagaagaggcaagggccacgatggcctgtaccagggcctgagcaccgccaccaaggacacctatgacgccctgcacatgcaggccctgcctccaagaagggccaagcgatctggatctggagcaacaaacttctcactactcaaacaagcaggtgacgtggaggagaatcccgggcctactagtatggactggatttggcgcatccttttccttgtcggcgctgctaccggcgcgcattccttcgaagtgcagctggttgaatcaggtggcggcctggttcaacctggcggatctctgagactgagctgtgccgccagcggcttcaacatcaaggacacctacatccactgggtccgacaggcccctggcaaaggacttgaatgggtcgccagaatctaccccaccaacggctacaccagatacgccgactctgtgaagggcagattcaccatcagcgccgacaccagcaagaacaccgcctacctccagatgaactccctgagagccgaggacaccgccgtgtactactgtagcagatggggcggagccggagcctacgctatggatgtttggggccagggaaccctggtcaccgtgtcatctacgcgtatccagaaccctgatcctgccgtgtaccagctgcgggatagcaagagcagcgacaagagcgtgtgtctgttcaccgacttcgacagccagaccaacgtgtcccagagcaaggactccgacgtgtacatcaccgataagtgcgtgctggacatgcggagcatggacttcaagagcaactccgccgtggcctggtccaacaagtccgatttcgcctgcgccaacgccttcaacaacagcattatccccgaggacacattcttcccaagcagcgacgtgccctgcggtacccagagttttgggttgttggaccctaaattgtgctatctgttggacggaatcctgttcatttacggagtgatcctgaccgcattgttcctgcgggttaagttttccagatccgcagacgcacccgcttaccaacaagggcagaaccaactctacaatgaacttaatttggggcggagggaagagtacgacgttctggacaaaaggaggggacgagatcccgagatgggcggaaagcctcagcgaaggaagaatccgcaagaggggctttataacgaactccagaaagataaaatggcagaagcctatagtgagattgggatgaagggagaaaggaggaggggtaaaggtcacgatgggttgtaccaaggattgagcacagccactaaagatacctatgatgcgctccacatgcaggccctgccgccaagataa

SEQ ID NO: 32410 - DNA, 2700 bp, synthetic construct
  source 1..2700: mol_type = other DNA
atggccttaccagtgaccgccttgctcctgccgctggccttgctgctccacgccgccaggccggacatccagatgacccagagccccagcagcctgtctgccagcgtgggcgacagagtgaccatcacctgtagagccagccaggacgtgaacaccgccgtggcctggtatcagcagaagcctggcaaggcccccaagctgctgatctacagcgccagcttcctggaaagcggcgtgcccagcagattcagcggaagcagaagcggcaccgacttcaccctgaccatcagctccctccagcccgaggacttcgccacctactactgccagcagcactacaccacccctcccaccttcggccagaccaaggtggaaatcaagagactcgaggacctgaagaacgtgttcccacctgaggtggccgtgttcgagcctagcaaggccgagatcgcccacacccagaaagccaccctcgtgtgcctggctaccggcttctaccccgaccatgtggaactgtcttggtgggtcaacggcaaagaggtgcacagcggcgtgtgtaccgacccccagccactgaaagaacagcccgccctgaacgacagccggtactgcctgagcagcagactgagagtgtccgccaccttctggcagaacccccggaaccacttcagatgccaggtgcagttctacggcctgagcgagaacgacgagtggacccaggacagagccaagcccgtgacccagatcgtgtctgccgaagcctggggcagagccgattgcggatcccagagcttcggcctgctggaccccaagctgtgctacctgctggatggcatcctgttcatctacggcgtgatcctgaccgccctgttcctgaaacggggcagaaagaaactcctgtatatattcaaacaaccatttatgagaccagtacaaactactcaagaggaagatggctgtagctgccgatttccagaagaagaagaaggaggatgtgaactgagagtgaagttcagcagaagcgccgacgcccctgcctaccagcagggacagaaccaactgtacaacgagctgaacctgggcagacgggaagagtacgacgtgctggacaagcggagaggcagggaccctgagatgggcggaaagccccagcggagaaagaacccccaggaaggactgtataacgaactccagaaagacaagatggccgaagcctacagcgagatcggcatgaagggcgagcggagaagaggcaagggccacgatggcctgtaccagggcctgagcaccgccaccaaggacacctatgacgccctgcacatgcaggccctgcctccaagaagggccaagcgatctggatctggagcaacaaacttctcactactcaaacaagcaggtgacgtggaggagaatcccgggcctactagtatggactggatttggcgcatccttttccttgtcggcgctgctaccggcgcgcattccttcgaagtgcaactggtggaatctggcggcggactggtgcagcctggcggatctctgagactgagctgtgccgccagcggcttcaacatcaaggacacctacatccactgggtgcgccaggcccctggaaagggactggaatgggtggcccggatctaccccaccaacggctacaccagatacgccgacagcgtgaagggccggttcaccatcagcgccgacaccagcaagaataccgcctacctccagatgaacagcctgcgggccgaggataccgccgtgtactactgctcaagatggggaggcgacggcttctacgctatggacgtgtggggccagggcacccttgtgaccgtgtcatctacgcgtatccagaaccctgatcctgccgtgtaccagctgcgggatagcaagagcagcgacaagagcgtgtgtctgttcaccgacttcgacagccagaccaacgtgtcccagagcaaggactccgacgtgtacatcaccgataagtgcgtgctggacatgcggagcatggacttcaagagcaactccgccgtggcctggtccaacaagtccgatttcgcctgcgccaacgccttcaacaacagcattatccccgaggacacattcttcccaagcagcgacgtgccctgcggtacccagagttttgggttgttggaccctaaattgtgctatctgttggacggaatcctgttcatttacggagtgatcctgaccgcattgttcctgaagagaggccggaagaagctgctgtacatcttcaagcagcctttcatgcggcccgtgcagaccacccaggaagaggacggctgctcctgccggttccccgaggaagaagaaggcggctgcgagctgcgggttaagttttccagatccgcagacgcacccgcttaccaacaagggcagaaccaactctacaatgaacttaatttggggcggagggaagagtacgacgttctggacaaaaggaggggacgagatcccgagatgggcggaaagcctcagcgaaggaagaatccgcaagaggggctttataacgaactccagaaagataaaatggcagaagcctatagtgagattgggatgaagggagaaaggaggaggggtaaaggtcacgatgggttgtaccaaggattgagcacagccactaaagatacctatgatgcgctccacatgcaggccctgccgccaagataa

SEQ ID NO: 32411 - DNA, 2697 bp, synthetic construct
  source 1..2697: mol_type = other DNA
atggccttaccagtgaccgccttgctcctgccgctggccttgctgctccacgccgccaggccggacatccagatgacccagagccccagcagcctgtctgccagcgtgggcgacagagtgaccatcacctgtagagccagccaggacgtgaacaccgccgtggcctggtatcagcagaagcctggcaaggcccccaagctgctgatctacagcgccagcttcctggaaagcggcgtgcccagcagattcagcggaagcagaagcggcaccgacttcaccctgaccatcagctccctccagcccgaggacttcgccacctactactgccagcagcactacaccacccctcccaccttcggccagaccaaggtggaaatcaagagactcgaggacctgaagaacgtgttcccacctgaggtggccgtgttcgagcctagcaaggccgagatcgcccacacccagaaagccaccctcgtgtgcctggctaccggcttctaccccgaccatgtggaactgtcttggtgggtcaacggcaaagaggtgcacagcggcgtgtgtaccgacccccagccactgaaagaacagcccgccctgaacgacagccggtactgcctgagcagcagactgagagtgtccgccaccttctggcagaacccccggaaccacttcagatgccaggtgcagttctacggcctgagcgagaacgacgagtggacccaggacagagccaagcccgtgacccagatcgtgtctgccgaagcctggggcagagccgattgcggatcccagagcttcggcctgctggaccccaagctgtgctacctgctggatggcatcctgttcatctacggcgtgatcctgaccgccctgttcctgaaacggggcagaaagaaactcctgtatatattcaaacaaccatttatgagaccagtacaaactactcaagaggaagatggctgtagctgccgatttccagaagaagaagaaggaggatgtgaactgagagtgaagttcagcagaagcgccgacgcccctgcctaccagcagggacagaaccaactgtacaacgagctgaacctgggcagacgggaagagtacgacgtgctggacaagcggagaggcagggaccctgagatgggcggaaagccccagcggagaaagaacccccaggaaggactgtataacgaactccagaaagacaagatggccgaagcctacagcgagatcggcatgaagggcgagcggagaagaggcaagggccacgatggcctgtaccagggcctgagcaccgccaccaaggacacctatgacgccctgcacatgcaggccctgcctccaagaagggccaagcgatctggatctggagcaacaaacttctcactactcaaacaagcaggtgacgtggaggagaatcccgggcctactagtatggactggatttggcgcatccttttccttgtcggcgctgctaccggcgcgcattccttcgaagtgcaactggtggaatctggcggcggactggtgcagcctggcggatctctgagactgagctgtgccgccagcggcttcaacatcaaggacacctacatccactgggtgcgccaggcccctggaaagggactggaatgggtggcccggatctaccccaccaacggctacaccagatacgccgacagcgtgaagggccggttcaccatcagcgccgacaccagcaagaataccgcctacctccagatgaacagcctgcgggccgaggataccgccgtgtactactgctcaagatggggaggcgacggcttctacgctatggacgtgtggggccagggcacccttgtgaccgtgtcatctacgcgtatccagaaccctgatcctgccgtgtaccagctgcgggatagcaagagcagcgacaagagcgtgtgtctgttcaccgacttcgacagccagaccaacgtgtcccagagcaaggactccgacgtgtacatcaccgataagtgcgtgctggacatgcggagcatggacttcaagagcaactccgccgtggcctggtccaacaagtccgatttcgcctgcgccaacgccttcaacaacagcattatccccgaggacacattcttcccaagcagcgacgtgccctgcggtacccagagttttgggttgttggaccctaaattgtgctatctgttggacggaatcctgttcatttacggagtgatcctgaccgcattgttcctgaggagcaagcggtcacggctgctccacagcgattacatgaatatgacaccacgaagaccgggtcctactcgcaaacactaccaaccctacgcacctccccgcgactttgcagcgtaccgatctcgggttaagttttccagatccgcagacgcacccgcttaccaacaagggcagaaccaactctacaatgaacttaatttggggcggagggaagagtacgacgttctggacaaaaggaggggacgagatcccgagatgggcggaaagcctcagcgaaggaagaatccgcaagaggggctttataacgaactccagaaagataaaatggcagaagcctatagtgagattgggatgaagggagaaaggaggaggggtaaaggtcacgatgggttgtaccaaggattgagcacagccactaaagatacctatgatgcgctccacatgcaggccctgccgccaagataa

SEQ ID NO: 32412 - DNA, 3234 bp, synthetic construct
  source 1..3234: mol_type = other DNA
atggccttaccagtgaccgccttgctcctgccgctggccttgctgctccacgccgccaggccggacatccagatgacacagagccctagcagcctgtctgccagcgtgggagacagagtgaccatcacatgcaaggccagcgaccacatcaacaactggctggcctggtatcagcagaagcctggacaggcccctaagctgctgatctacggcgctaccacactggaaacaggcgtgcccagcagattttctggcagcggctctggcaccgactacaccctgacaatatccagcctccagcctgaggacttcgccacctactactgtcagcagagctggaacaccccttggacattcggccagggcaccaagctggaaatcaagagactcgaggacctgaagaacgtgttcccacctgaggtggccgtgttcgagcctagcgaggccgagatcagccacacccagaaagccaccctcgtgtgcctggctaccggcttctaccccgaccatgtggaactgtcttggtgggtcaacggcaaagaggtgcacagcggcgtgtctaccgacccccagccactgaaagaacagcccgccctgaacgacagccggtactgcctgagcagcagactgagagtgtccgccaccttctggcagaacccccggaaccacttcagatgccaggtgcagttctacggcctgagcgagaacgacgagtggacccaggacagagccaagcccgtgacccagatcgtgtctgccgaagcctggggcagagccgattgcggatcccagagcttcggcctgctggaccccaagctgtgctacctgctggatggcatcctgttcatctacggcgtgatcctgaccgccctgttcctgagagtgaagttcagcagaagcgccgacgcccctgcctaccagcagggacagaaccaactgtacaacgagctgaacctgggcagacgggaagagtacgacgtgctggacaagcggagaggcagggaccctgagatgggcggaaagccccagcggagaaagaacccccaggaaggactgtataacgaactccagaaagacaagatggccgaagcctacagcgagatcggcatgaagggcgagcggagaagaggcaagggccacgatggcctgtaccagggcctgagcaccgccaccaaggacacctatgacgccctgcacatgcaggccctgcctccaagaagggccaagcgatctggatctggagcaacaaacttctcactactcaaacaagcaggtgacgtggaggagaatcccgggcctactagtatggactggatttggcgcatccttttccttgtcggcgctgctaccggcgcgcattccttcgaacaagttcagcttcaacagcctggcgctgagctggtcaaacctggcgcttctgtgaagatgagctgcaaagccagcggctacgccttcagcagctactggatcaactggatgaagcagaaacccggccagggactcgaatggatcggccaaatctatcccggcgacggcgacaccaactacaacggcaagttcaagggcagagccacactgaccgccgatacctctagcagcacagcctacatgcagctgagcagcctgaccagcgaagatagcgccgtgtacttctgtgcccggtccatcacaacagtcgtgggctgcgctatggactattggggccagggaacaagcgtgaccgtgtctagtacgcgtatccagaaccctgatcctgccgtgtaccagctgcgggatagcaagagcagcgacaagagcgtgtgtctgttcaccgacttcgacagccagaccaacgtgtcccagagcaaggactccgacgtgtacatcaccgataagaccgtgctggacatgcggagcatggacttcaagagcaactccgccgtggcctggtccaacaagtccgatttcgcctgcgccaacgccttcaacaacagcattatccccgaggacacattcttcccaagccccgagagcagctgcggtacccagagttttgggttgttggaccctaaattgtgctatctgttggacggaatcctgttcatttacggagtgatcctgaccgcattgttcctgcgggttaagttttccagatccgcagacgcacccgcttaccaacaagggcagaaccaactctacaatgaacttaatttggggcggagggaagagtacgacgttctggacaaaaggaggggacgagatcccgagatgggcggaaagcctcagcgaaggaagaatccgcaagaggggctttataacgaactccagaaagataaaatggcagaagcctatagtgagattgggatgaagggagaaaggaggaggggtaaaggtcacgatgggttgtaccaaggattgagcacagccactaaagatacctatgatgcgctccacatgcaggccctgccgccaagacgcgccaagagaagcggatctggcgtgaagcagaccctgaatttcgacctgctgaagctggctggcgacgtggaatccaacccaggcccttctagaatgtaccggatgcagctgctgagctgtatcgccctgtctctggccctggtcacaaatagcgcccctaccagcagcagcaccaagaaaacccagctgcaactggaacacctcctgctggacctccagatgatcctgaacggcatcaacaactacaagaaccccaagctgacccggatgctgaccttcaagttctacatgcccaagaaggccaccgagctgaagcacctccagtgcctggaagaggaactgaagcccctggaagaagtgctgaatctggcccagagcaagaacttccacctgaggccaagggacctgatctccaacatcaacgtgatcgtgctggaactgaaaggcagcgagacaaccttcatgtgcgagtacgccgacgagacagctaccatcgtggaatttctgaatcggtggatcaccttctgccagagcatcatcagcaccctgacagcgcgtaaaattgaagttatgtatcctcctccttacctagacaatgagaagagcaatggaaccattatccatgtgaaagggaaacacctttgtccaagtcccctatttcccggaccttctaagcccttttgggtgctggtggtggttgggggagtcctggcttgctatagcttgctagtaacagtggcctttattattttctgggtgaggagtaagaggagctaa

SEQ ID NO: 32413 - DNA, 1518 bp, synthetic construct; identical to SEQ ID NO: 32316
  source 1..1518: mol_type = other DNA

SEQ ID NO: 32414 - DNA, 2457 bp, synthetic construct; identical to SEQ ID NO: 999
  source 1..2457: mol_type = other DNA

SEQ ID NO: 32415 - DNA, 2874 bp, synthetic construct
  source 1..2874: mol_type = other DNA
atggccttaccagtgaccgccttgctcctgccgctggccttgctgctccacgccgccaggccggacatccagatgacacagagccctagcagcctgtctgccagcgtgggagacagagtgaccatcacatgcaaggccagcgaccacatcaacaactggctggcctggtatcagcagaagcctggacaggcccctaagctgctgatctacggcgctaccacactggaaacaggcgtgcccagcagattttctggcagcggctctggcaccgactacaccctgacaatatccagcctccagcctgaggacttcgccacctactactgtcagcagagctggaacaccccttggacattcggccagggcaccaagctggaaatcaagagactcgaggacctgaagaacgtgttcccacctgaggtggccgtgttcgagcctagcgaggccgagatcagccacacccagaaagccaccctcgtgtgcctggctaccggcttctaccccgaccatgtggaactgtcttggtgggtcaacggcaaagaggtgcacagcggcgtgtctaccgacccccagccactgaaagaacagcccgccctgaacgacagccggtactgcctgagcagcagactgagagtgtccgccaccttctggcagaacccccggaaccacttcagatgccaggtgcagttctacggcctgagcgagaacgacgagtggacccaggacagagccaagcccgtgacccagatcgtgtctgccgaagcctggggcagagccgattgcggatcccagagcttcggcctgctggaccccaagctgtgctacctgctggatggcatcctgttcatctacggcgtgatcctgaccgccctgttcctgagagtgaagttcagcagaagcgccgacgcccctgcctaccagcagggacagaaccaactgtacaacgagctgaacctgggcagacgggaagagtacgacgtgctggacaagcggagaggcagggaccctgagatgggcggaaagccccagcggagaaagaacccccaggaaggactgtataacgaactccagaaagacaagatggccgaagcctacagcgagatcggcatgaagggcgagcggagaagaggcaagggccacgatggcctgtaccagggcctgagcaccgccaccaaggacacctatgacgccctgcacatgcaggccctgcctccaagaagggccaagcgatctggatctggagcaacaaacttctcactactcaaacaagcaggtgacgtggaggagaatcccgggcctactagtgccaccatggactggatttggcgcatccttttccttgtcggcgctgctaccggcgcccattccgggcccgaagtgcagctggttgaatctggcggaggactggttcaggctggcggatctctgagactgtcttgtgccgccagcggcagaacctttagcatgggctggtttagacaggcccctggcaaagagagagagttcgtcgccgccatcacatactctggcggcagcccttactacgccgactctgtgaagggcagattcaccatcagccgggacaacgccaagaacaccgtgtacctccagatgaacagcctgaagcctgaggacaccgccgtgtactactgcgccgccaatccaacatacggcagcgactggaacgccgagaattggggccagggaacccaagtgacagtgtctagcggatccggcggcggaggatctggcggaggcggatctgggggcggaggctctttcgaacaagttcagcttcaacagcctggcgctgagctggtcaaacctggcgcttctgtgaagatgagctgcaaagccagcggctacgccttcagcagctactggatcaactggatgaagcagaaacccggccagggactcgaatggatcggccaaatctatcccggcgacggcgacaccaactacaacggcaagttcaagggcagagccacactgaccgccgatacctctagcagcacagcctacatgcagctgagcagcctgaccagcgaagatagcgccgtgtacttctgtgcccggtccatcacaacagtcgtgggctgcgctatggactattggggccagggaacaagcgtgaccgtgtctagtacgcgtatccagaaccctgatcctgccgtgtaccagctgcgggatagcaagagcagcgacaagagcgtgtgtctgttcaccgacttcgacagccagaccaacgtgtcccagagcaaggactccgacgtgtacatcaccgataagaccgtgctggacatgcggagcatggacttcaagagcaactccgccgtggcctggtccaacaagtccgatttcgcctgcgccaacgccttcaacaacagcattatccccgaggacacattcttcccaagccccgagagcagctgcggtacccagagttttgggttgttggaccctaaattgtgctatctgttggacggaatcctgttcatttacggagtgatcctgaccgcattgttcctgcgggttaagttttccagatccgcagacgcacccgcttaccaacaagggcagaaccaactctacaatgaacttaatttggggcggagggaagagtacgacgttctggacaaaaggaggggacgagatcccgagatgggcggaaagcctcagcgaaggaagaatccgcaagaggggctttataacgaactccagaaagataaaatggcagaagcctatagtgagattgggatgaagggagaaaggaggaggggtaaaggtcacgatgggttgtaccaaggattgagcacagccactaaagatacctatgatgcgctccacatgcaggccctgccgccaagataa

SEQ ID NO: 32416 - DNA, 1473 bp, synthetic construct
  source 1..1473: mol_type = other DNA
atggccttaccagtgaccgccttgctcctgccgctggccttgctgctccacgccgccaggccggacatccagatgacacagagccctagcagcctgtctgccagcgtgggagacagagtgaccatcacatgcaaggccagcgaccacatcaacaactggctggcctggtatcagcagaagcctggacaggcccctaagctgctgatctacggcgctaccacactggaaacaggcgtgcccagcagattttctggcagcggctctggcaccgactacaccctgacaatatccagcctccagcctgaggacttcgccacctactactgtcagcagagctggaacaccccttggacattcggccagggcaccaagctggaaatcaagagaggcggaggcggaagtggaggcggaggatctggcggcggaggctctcaagttcagcttcaacagcctggcgctgagctggtcaaacctggcgcttctgtgaagatgagctgcaaagccagcggctacgccttcagcagctactggatcaactggatgaagcagaaacccggccagggactcgaatggatcggccaaatctatcccggcgacggcgacaccaactacaacggcaagttcaagggcagagccacactgaccgccgatacctctagcagcacagcctacatgcagctgagcagcctgaccagcgaagatagcgccgtgtacttctgtgcccggtccatcacaacagtcgtgggctgcgctatggactattggggccagggaacaagcgtgaccgtgtctagtacgcgtaccacgacgccagcgccgcgaccaccaacaccggcgcccaccatcgcgtcgcagcccctgtccctgcgcccagaggcgtgccggccagcggcggggggcgcagtgcacacgagggggctggacttcgcctgtgacatctacatctgggcgcccttggccgggacttgtggggtccttctcctgtcactggttatcaccctttactgcaaacggggcagaaagaaactcctgtatatattcaaacaaccatttatgagaccagtacaaactactcaagaggaagatggctgtagctgccgatttccagaagaagaagaaggaggatgtgaactgagagtgaagttcagcaggagcgcagacgcccccgcgtaccagcagggccagaaccagctctataacgagctgaatctaggacgaagagaggagtacgatgttttggacaagagacgtggccgggaccctgagatggggggaaagccgagaaggaagaaccctcaggaaggcctgtacaatgaactgcagaaagataagatggcggaggcctacagtgagattgggatgaaaggcgagcgccggaggggcaaggggcacgatggcctttaccagggtctcagtacagccaccaaggacacctacgacgcccttcacatgcaggccctgccccctcgctaa

SEQ ID NO: 32417 - DNA, 2232 bp, synthetic construct
  source 1..2232: mol_type = other DNA
atggccttaccagtgaccgccttgctcctgccgctggccttgctgctccacgccgccaggccggacatccagatgacacagagccctagcagcctgtctgccagcgtgggagacagagtgaccatcacatgcaaggccagcgaccacatcaacaactggctggcctggtatcagcagaagcctggacaggcccctaagctgctgatctacggcgctaccacactggaaacaggcgtgcccagcagattttctggcagcggctctggcaccgactacaccctgacaatatccagcctccagcctgaggacttcgccacctactactgtcagcagagctggaacaccccttggacattcggccagggcaccaagctggaaatcaagagactcgaggacctgaagaacgtgttcccacctgaggtggccgtgttcgagcctagcgaggccgagatcagccacacccagaaagccaccctcgtgtgcctggctaccggcttctaccccgaccatgtggaactgtcttggtgggtcaacggcaaagaggtgcacagcggcgtgtctaccgacccccagccactgaaagaacagcccgccctgaacgacagccggtactgcctgagcagcagactgagagtgtccgccaccttctggcagaacccccggaaccacttcagatgccaggtgcagttctacggcctgagcgagaacgacgagtggacccaggacagagccaagcccgtgacccagatcgtgtctgccgaagcctggggcagagccgattgcggatcccagagcttcggcctgctggaccccaagctgtgctacctgctggatggcatcctgttcatctacggcgtgatcctgaccgccctgttcctgagagtgaagttcagcagaagcgccgacgcccctgcctaccagcagggacagaaccaactgtacaacgagctgaacctgggcagacgggaagagtacgacgtgctggacaagcggagaggcagggaccctgagatgggcggaaagccccagcggagaaagaacccccaggaaggactgtataacgaactccagaaagacaagatggccgaagcctacagcgagatcggcatgaagggcgagcggagaagaggcaagggccacgatggcctgtaccagggcctgagcaccgccaccaaggacacctatgacgccctgcacatgcaggccctgcctccaagaagggccaagcgatctggatctggagcaacaaacttctcactactcaaacaagcaggtgacgtggaggagaatcccgggcctactagtatggactggatttggcgcatccttttccttgtcggcgctgctaccggcgcgcattccttcgaacaagttcagcttcaacagcctggcgctgagctggtcaaacctggcgcttctgtgaagatgagctgcaaagccagcggctacgccttcagcagctactggatcaactggatgaagcagaaacccggccagggactcgaatggatcggccaaatctatcccggcgacggcgacaccaactacaacggcaagttcaagggcagagccacactgaccgccgatacctctagcagcacagcctacatgcagctgagcagcctgaccagcgaagatagcgccgtgtacttctgtgcccggtccatcacaacagtcgtgggctgcgctatggactattggggccagggaacaagcgtgaccgtgtctagtacgcgtatccagaaccctgatcctgccgtgtaccagctgcgggatagcaagagcagcgacaagagcgtgtgtctgttcaccgacttcgacagccagaccaacgtgtcccagagcaaggactccgacgtgtacatcaccgataagaccgtgctggacatgcggagcatggacttcaagagcaactccgccgtggcctggtccaacaagtccgatttcgcctgcgccaacgccttcaacaacagcattatccccgaggacacattcttcccaagccccgagagcagctgcggtaccctcggagaaccacagctctgttacattctggatgctatcctgttcctctatgggatcgtcctgacactcctgtattgcagactcaaaattcaagttcgcaaagccgccattacctcttacgagaagagtgatggggtgtacacaggactgtctacccggaatcaagaaacctacgaaaccctcaaacatgagaagccacctcagtaa

SEQ ID NO: 32418 - DNA, 2232 bp, synthetic construct; identical to SEQ ID NO: 32417
  source 1..2232: mol_type = other DNA

SEQ ID NO: 32419 - DNA, 1869 bp, synthetic construct
  source 1..1869: mol_type = other DNA
atggccttaccagtgaccgccttgctcctgccgctggccttgctgctccacgccgccaggccggacatccagatgacacagagccctagcagcctgtctgccagcgtgggagacagagtgaccatcacatgcaaggccagcgaccacatcaacaactggctggcctggtatcagcagaagcctggacaggcccctaagctgctgatctacggcgctaccacactggaaacaggcgtgcccagcagattttctggcagcggctctggcaccgactacaccctgacaatatccagcctccagcctgaggacttcgccacctactactgtcagcagagctggaacaccccttggacattcggccagggcaccaagctggaaatcaagagactcgaggacctgaagaacgtgttcccacctgaggtggccgtgttcgagcctagcgaggccgagatcagccacacccagaaagccaccctcgtgtgcctggctaccggcttctaccccgaccatgtggaactgtcttggtgggtcaacggcaaagaggtgcacagcggcgtgtgtaccgacccccagccactgaaagaacagcccgccctgaacgacagccggtactgcctgagcagcagactgagagtgtccgccaccttctggcagaacccccggaaccacttcagatgccaggtgcagttctacggcctgagcgagaacgacgagtggacccaggacagagccaagcccgtgacccagatcgtgtctgccgaagcctggggcagagccgattgcggctttaccagcgagagctaccagcagggcgtgctgagcgccaccatcctgtacgagatcctgctgggcaaggccaccctgtacgccgtgctggtgtctgccctggtgctgatggctatggtcaagcggaaggacagccggggaagggccaagcgatctggatctggagcaacaaacttctcactactcaaacaagcaggtgacgtggaggagaatcccgggcctactagtatggactggatttggcgcatccttttccttgtcggcgctgctaccggcgcgcattccttcgaacaagttcagcttcaacagcctggcgctgagctggtcaaacctggcgcttctgtgaagatgagctgcaaagccagcggctacgccttcagcagctactggatcaactggatgaagcagaaacccggccagggactcgaatggatcggccaaatctatcccggcgacggcgacaccaactacaacggcaagttcaagggcagagccacactgaccgccgatacctctagcagcacagcctacatgcagctgagcagcctgaccagcgaagatagcgccgtgtacttctgtgcccggtccatcacaacagtcgtgggctgcgctatggactattggggccagggaacaagcgtgaccgtgtctagtacgcgtatccagaaccctgatcctgccgtgtaccagctgcgggatagcaagagcagcgacaagagcgtgtgtctgttcaccgacttcgacagccagaccaacgtgtcccagagcaaggactccgacgtgtacatcaccgataagtgcgtgctggacatgcggagcatggacttcaagagcaactccgccgtggcctggtccaacaagtccgatttcgcctgcgccaacgccttcaacaacagcattatccccgaggacacattcttcccaagccccgagagcagctgcgacgtgaagctggtggaaaagagcttcgagacagacaccaacctgaacttccagaacctgagcgtgatcggcttcagaatcctgctgctgaaagtggccggctttaacctgctgatgaccctgcggctgtggtccagctaa

SEQ ID NO: 32420 - DNA, 2457 bp, synthetic construct; identical to SEQ ID NO: 999
  source 1..2457: mol_type = other DNA

SEQ ID NO: 32421 - DNA, 1869 bp, synthetic construct; identical to SEQ ID NO: 32419
  source 1..1869: mol_type = other DNA

SEQ ID NO: 32422 - DNA, 2457 bp, synthetic construct; identical to SEQ ID NO: 999
  source 1..2457: mol_type = other DNA

SEQ ID NO: 32423 - DNA, 2412 bp, synthetic construct
  source 1..2412: mol_type = other DNA
atggccttaccagtgaccgccttgctcctgccgctggccttgctgctccacgccgccaggccggacatccagatgacacagagccctagcagcctgtctgccagcgtgggagacagagtgaccatcacatgcaaggccagcgaccacatcaacaactggctggcctggtatcagcagaagcctggacaggcccctaagctgctgatctacggcgctaccacactggaaacaggcgtgcccagcagattttctggcagcggctctggcaccgactacaccctgacaatatccagcctccagcctgaggacttcgccacctactactgtcagcagagctggaacaccccttggacattcggccagggcaccaagctggaaatcaagagactcgagggacagcctaaggccaatcctaccgtgacactgttccctccaagcagcgaagaactccaggccaacaaggccacacttgtgtgcctgatctccgacttctaccctggggctgtgacagtggcttggaaggccgatggatctcctgtgaaagccggcgtggaaaccaccaagccatccaagcagagcaacaacaaatacgccgccagctcctacctgagcctgacacctgagcagtggaagtcccacagatcctacagctgccaagtgacccacgaaggcagcaccgtggaaaagacagtggcccctacagagtgcagcggatcccagagcttcggcctgctggaccccaagctgtgctacctgctggatggcatcctgttcatctacggcgtgatcctgaccgccctgttcctgagagtgaagttcagcagaagcgccgacgcccctgcctaccagcagggacagaaccaactgtacaacgagctgaacctgggcagacgggaagagtacgacgtgctggacaagcggagaggcagggaccctgagatgggcggaaagccccagcggagaaagaacccccaggaaggactgtataacgaactccagaaagacaagatggccgaagcctacagcgagatcggcatgaagggcgagcggagaagaggcaagggccacgatggcctgtaccagggcctgagcaccgccaccaaggacacctatgacgccctgcacatgcaggccctgcctccaagaagggccaagcgatctggatctggagcaacaaacttctcactactcaaacaagcaggtgacgtggaggagaatcccgggcctactagtatggactggatttggcgcatccttttccttgtcggcgctgctaccggcgcgcattccttcgaacaagttcagcttcaacagcctggcgctgagctggtcaaacctggcgcttctgtgaagatgagctgcaaagccagcggctacgccttcagcagctactggatcaactggatgaagcagaaacccggccagggactcgaatggatcggccaaatctatcccggcgacggcgacaccaactacaacggcaagttcaagggcagagccacactgaccgccgatacctctagcagcacagcctacatgcagctgagcagcctgaccagcgaagatagcgccgtgtacttctgtgcccggtccatcacaacagtcgtgggctgcgctatggactattggggccagggaacaagcgtgaccgtgtctagtacgcgtgcgtccactaagggtccgtcagtcttcccgctggcgccctgttcccgcagcacgagtgaatctaccgccgcccttgggtgcttggtaaaagactattttcctgagcccgttacagtatcatggaacagcggggctctgactagcggggtgcatacgttccctgcggttctgcaatctagcggactgtattctctctccagtgttgtgaccgtgccaagctccagcctcggtactaaaacttatacatgtaatgtggatcataaaccttcaaataccaaggttgacaaaagggtagagagtaagtacggtggtacccagagttttgggttgttggaccctaaattgtgctatctgttggacggaatcctgttcatttacggagtgatcctgaccgcattgttcctgcgggttaagttttccagatccgcagacgcacccgcttaccaacaagggcagaaccaactctacaatgaacttaatttggggcggagggaagagtacgacgttctggacaaaaggaggggacgagatcccgagatgggcggaaagcctcagcgaaggaagaatccgcaagaggggctttataacgaactccagaaagataaaatggcagaagcctatagtgagattgggatgaagggagaaaggaggaggggtaaaggtcacgatgggttgtaccaaggattgagcacagccactaaagatacctatgatgcgctccacatgcaggccctgccgccaagataa

SEQ ID NO: 32424 - DNA, 2697 bp, synthetic construct; identical to SEQ ID NO: 32341
  source 1..2697: mol_type = other DNA

SEQ ID NO: 32425 - DNA, 2286 bp, synthetic construct
  source 1..2286: mol_type = other DNA
atggccttaccagtgaccgccttgctcctgccgctggccttgctgctccacgccgccaggccggacatccagatgacacagagccctagcagcctgtctgccagcgtgggagacagagtgaccatcacatgcaaggccagcgaccacatcaacaactggctggcctggtatcagcagaagcctggacaggcccctaagctgctgatctacggcgctaccacactggaaacaggcgtgcccagcagattttctggcagcggctctggcaccgactacaccctgacaatatccagcctccagcctgaggacttcgccacctactactgtcagcagagctggaacaccccttggacattcggccagggcaccaagctggaaatcaagagactcgaggacctgaagaacgtgttcccacctgaggtggccgtgttcgagcctagcgaggccgagatcagccacacccagaaagccaccctcgtgtgcctggctaccggcttctaccccgaccatgtggaactgtcttggtgggtcaacggcaaagaggtgcacagcggcgtgtgtaccgacccccagccactgaaagaacagcccgccctgaacgacagccggtactgcctgagcagcagactgagagtgtccgccaccttctggcagaacccccggaaccacttcagatgccaggtgcagttctacggcctgagcgagaacgacgagtggacccaggacagagccaagcccgtgacccagatcgtgtctgccgaagcctggggcagagccgattgcggctttaccagcgagagctaccagcagggcgtgctgagcgccaccatcctgtacgagatcctgctgggcaaggccaccctgtacgccgtgctggtgtctgccctggtgctgatggctatggtcaagcggaaggacagccggggaagggccaagcgatctggatctggagcaacaaacttctcactactcaaacaagcaggtgacgtggaggagaatcccgggcctactagtgccaccatggactggatttggcgcatccttttccttgtcggcgctgctaccggcgcccattccgggcccgaagtgcagctggttgaatctggcggaggactggttcaggctggcggatctctgagactgtcttgtgccgccagcggcagaacctttagcatgggctggtttagacaggcccctggcaaagagagagagttcgtcgccgccatcacatactctggcggcagcccttactacgccgactctgtgaagggcagattcaccatcagccgggacaacgccaagaacaccgtgtacctccagatgaacagcctgaagcctgaggacaccgccgtgtactactgcgccgccaatccaacatacggcagcgactggaacgccgagaattggggccagggaacccaagtgacagtgtctagcggatccggcggcggaggatctggcggaggcggatctgggggcggaggctctttcgaacaagttcagcttcaacagcctggcgctgagctggtcaaacctggcgcttctgtgaagatgagctgcaaagccagcggctacgccttcagcagctactggatcaactggatgaagcagaaacccggccagggactcgaatggatcggccaaatctatcccggcgacggcgacaccaactacaacggcaagttcaagggcagagccacactgaccgccgatacctctagcagcacagcctacatgcagctgagcagcctgaccagcgaagatagcgccgtgtacttctgtgcccggtccatcacaacagtcgtgggctgcgctatggactattggggccagggaacaagcgtgaccgtgtctagtacgcgtatccagaaccctgatcctgccgtgtaccagctgcgggatagcaagagcagcgacaagagcgtgtgtctgttcaccgacttcgacagccagaccaacgtgtcccagagcaaggactccgacgtgtacatcaccgataagtgcgtgctggacatgcggagcatggacttcaagagcaactccgccgtggcctggtccaacaagtccgatttcgcctgcgccaacgccttcaacaacagcattatccccgaggacacattcttcccaagccccgagagcagctgcgacgtgaagctggtggaaaagagcttcgagacagacaccaacctgaacttccagaacctgagcgtgatcggcttcagaatcctgctgctgaaagtggccggctttaacctgctgatgaccctgcggctgtggtccagctaa

SEQ ID NO: 32426 - DNA, 1863 bp, synthetic construct
  source 1..1863: mol_type = other DNA
atggccttaccagtgaccgccttgctcctgccgctggccttgctgctccacgccgccaggccggacatcgtgatgacacagagccctgatagcctggccgtgtctctgggagagagagccaccattaactgcaaggccagccagagcgtggactacgacggcgacagcttcctgaactggtatcagcagaagcccggccagcctcctaagctgctgatctacgccgccagcaatctggaaagcggcgtgccaagcagattttccggctctggcagcggcaccgatttcaccctgacaatatccagcctccagcctgaggacgtggccgtgtactactgccagcagagcaacgacgaccctctgacctttggacagggcaccaaggtggaaatcaaactcgaggacctgaagaacgtgttcccacctgaggtggccgtgttcgagcctagcgaggccgagatcagccacacccagaaagccaccctcgtgtgcctggctaccggcttctaccccgaccatgtggaactgtcttggtgggtcaacggcaaagaggtgcacagcggcgtgtgtaccgacccccagccactgaaagaacagcccgccctgaacgacagccggtactgcctgagcagcagactgagagtgtccgccaccttctggcagaacccccggaaccacttcagatgccaggtgcagttctacggcctgagcgagaacgacgagtggacccaggacagagccaagcccgtgacccagatcgtgtctgccgaagcctggggcagagccgattgcggctttaccagcgagagctaccagcagggcgtgctgagcgccaccatcctgtacgagatcctgctgggcaaggccaccctgtacgccgtgctggtgtctgccctggtgctgatggctatggtcaagcggaaggacagccggggaagggccaagcgatctggatctggagcaacaaacttctcactactcaaacaagcaggtgacgtggaggagaatcccgggcctactagtatggactggatttggcgcatccttttccttgtcggcgctgctaccggcgcgcattccttcgaagaagtccaacttgtggagtctggagggggcctggtgcagcccggcggctctctcagactgtcttgtgcggcaagcggctacaccttcacctcttactggatagaatgggtgaggcaggcacctggaaagggactggagtggattggagagattctgccaggagggggagatacaaattacaatgaaatcttcaaggggcgggccaccttttcagcggataccagcaagaatacagcttacctgcagatgaatagcctccgggcagaagataccgctgtttattattgcacgagacgggtgccaataagactggactattgggggcaagggactcttgtcaccgtcagttcaacgcgtatccagaaccctgatcctgccgtgtaccagctgcgggatagcaagagcagcgacaagagcgtgtgtctgttcaccgacttcgacagccagaccaacgtgtcccagagcaaggactccgacgtgtacatcaccgataagtgcgtgctggacatgcggagcatggacttcaagagcaactccgccgtggcctggtccaacaagtccgatttcgcctgcgccaacgccttcaacaacagcattatccccgaggacacattcttcccaagccccgagagcagctgcgacgtgaagctggtggaaaagagcttcgagacagacaccaacctgaacttccagaacctgagcgtgatcggcttcagaatcctgctgctgaaagtggccggctttaacctgctgatgaccctgcggctgtggtccagc

SEQ ID NO: 32427 - DNA, 1866 bp, synthetic construct
  source 1..1866: mol_type = other DNA
atggccttaccagtgaccgccttgctcctgccgctggccttgctgctccacgccgccaggccggacatcgtgatgacacagagccctgatagcctggccgtgtctctgggagagagagccaccattaactgcaaggccagccagagcgtggactacgacggcgacagcttcctgaactggtatcagcagaagcccggccagcctcctaagctgctgatctacgccgccagcaatctggaaagcggcgtgccaagcagattttccggctctggcagcggcaccgatttcaccctgacaatatccagcctccagcctgaggacgtggccgtgtactactgccagcagagcaacgacgaccctctgacctttggacagggcaccaaggtggaaatcaaactcgaggacctgaagaacgtgttcccacctgaggtggccgtgttcgagcctagcgaggccgagatcagccacacccagaaagccaccctcgtgtgcctggctaccggcttctaccccgaccatgtggaactgtcttggtgggtcaacggcaaagaggtgcacagcggcgtgtgtaccgacccccagccactgaaagaacagcccgccctgaacgacagccggtactgcctgagcagcagactgagagtgtccgccaccttctggcagaacccccggaaccacttcagatgccaggtgcagttctacggcctgagcgagaacgacgagtggacccaggacagagccaagcccgtgacccagatcgtgtctgccgaagcctggggcagagccgattgcggctttaccagcgagagctaccagcagggcgtgctgagcgccaccatcctgtacgagatcctgctgggcaaggccaccctgtacgccgtgctggtgtctgccctggtgctgatggctatggtcaagcggaaggacagccggggaagggccaagcgatctggatctggagcaacaaacttctcactactcaaacaagcaggtgacgtggaggagaatcccgggcctactagtatggactggatttggcgcatccttttccttgtcggcgctgctaccggcgcgcattccttcgaagaagtccaacttgtggagtctggagggggcctggtgcagcccggcggctctctcagactgtcttgtgcggcaagcggctacaccttcagctcttactggatagaatgggtgaggcaggcacctggaaagggactggagtggattggagagattctgccaggagggggagatacaaattacaatgaaatcttcaaggggcgggccaccttttcagcggataccagcaagaatacagcttacctgcagatgaatagcctccgggcagaagataccgctgtttattattgcacgagacgggtgccaataagactggactattgggggcaagggactcttgtcaccgtcagttcaacgcgtatccagaaccctgatcctgccgtgtaccagctgcgggatagcaagagcagcgacaagagcgtgtgtctgttcaccgacttcgacagccagaccaacgtgtcccagagcaaggactccgacgtgtacatcaccgataagtgcgtgctggacatgcggagcatggacttcaagagcaactccgccgtggcctggtccaacaagtccgatttcgcctgcgccaacgccttcaacaacagcattatccccgaggacacattcttcccaagccccgagagcagctgcgacgtgaagctggtggaaaagagcttcgagacagacaccaacctgaacttccagaacctgagcgtgatcggcttcagaatcctgctgctgaaagtggccggctttaacctgctgatgaccctgcggctgtggtccagctaa

SEQ ID NO: 32428 - DNA, 1962 bp, synthetic construct
  source 1..1962: mol_type = other DNA
atggccttaccagtgaccgccttgctcctgccgctggccttgctgctccacgccgccaggccgctcgagcagaaactgatctcggaagaggatctgggctccggcgatcgccctgatcctgccgtgtaccagctgcgggatagcaagagcagcgacaagagcgtgtgtctgttcaccgacttcgacagccagaccaacgtgtcccagagcaaggactccgacgtgtacatcaccgataagtgcgtgctggacatgcggagcatggacttcaagagcaactccgccgtggcctggtccaacaagtccgatttcgcctgcgccaacgccttcaacaacagcattatccccgaggacacattcttcccaagccccgagagcagctgcgacgtgaagctggtggaaaagagcttcgagacagacaccaacctgaacttccagaacctgagcgtgatcggcttcagaatcctgctgctgaaagtggccggctttaacctgctgatgaccctgcggctgtggtccagctctagtcgcgccaagagaagcggatctggcgtgaagcagaccctgaatttcgacctgctgaagctggctggcgacgtggaatccaacccaggccccactagcaccatggccttaccagtgaccgccttgctcctgccgctggccttgctgctccacgccgccaggccgcaagtgaagctggaagagtctggcggaggactggtgcaggctggaagaagcctgagactgtcttgtgccgccagcgagcacacctttagctctcacgtgatgggctggttcagacaggcccctggcaaagaaagggaaagcgtggccgttatcggctggcgggatattagcaccagctacgccgatagcgtgaagggcagattcaccatcagccgggacaacgccaagaaaaccctgtacctccagatgaacagcctgaagccagaggacaccgccgtgtactactgcgccgccagaagaattgacgccgccgactttgattcttggggccagggaacccaagtgaccgtttctagcggaggaggaggatctgaagtgcaactggttgaatccggtggcggcctggtgcaagcaggcggatctctcagacttagctgtgccgcctccggcagaaccttcacaatgggatggtttaggcaggctccagggaaagagagagagttcgtcgccgccatctctctgtctcccacactggcctactacgccgagtctgtgaaaggccggttcaccatctccagagataatgccaagaacaccgtggtgctgcaaatgaactctctgaaacccgaggatacagccctgtactattgtgccgctgaccggaagtccgtgatgagcatcagacccgattactggggacagggcacacaagtcacagtgtcctctacgcgtgaggacctgaagaacgtgttcccacctgaggtggccgtgttcgagcctagcgaggccgagatcagccacacccagaaagccaccctcgtgtgcctggctaccggcttctaccccgaccatgtggaactgtcttggtgggtcaacggcaaagaggtgcacagcggcgtgtgtaccgacccccagccactgaaagaacagcccgccctgaacgacagccggtactgcctgagcagcagactgagagtgtccgccaccttctggcagaacccccggaaccacttcagatgccaggtgcagttctacggcctgagcgagaacgacgagtggacccaggacagagccaagcccgtgacccagatcgtgtctgccgaagcctggggcagagccgattgcggctttaccagcgagagctaccagcagggcgtgctgagcgccaccatcctgtacgagatcctgctgggcaaggccaccctgtacgccgtgctggtgtctgccctggtgctgatggctatggtcaagcggaaggacagccggggataa

SEQ ID NO: 32429 - DNA, 1971 bp, synthetic construct
  source 1..1971: mol_type = other DNA
atggccttaccagtgaccgccttgctcctgccgctggccttgctgctccacgccgccaggccgctcgagcagaaactgatctcggaagaggatctgggctccggcgatcgccctgatcctgccgtgtaccagctgcgggatagcaagagcagcgacaagagcgtgtgtctgttcaccgacttcgacagccagaccaacgtgtcccagagcaaggactccgacgtgtacatcaccgataagtgcgtgctggacatgcggagcatggacttcaagagcaactccgccgtggcctggtccaacaagtccgatttcgcctgcgccaacgccttcaacaacagcattatccccgaggacacattcttcccaagccccgagagcagctgcgacgtgaagctggtggaaaagagcttcgagacagacaccaacctgaacttccagaacctgagcgtgatcggcttcagaatcctgctgctgaaagtggccggctttaacctgctgatgaccctgcggctgtggtccagctctagtcgcgccaagagaagcggatctggcgtgaagcagaccctgaatttcgacctgctgaagctggctggcgacgtggaatccaacccaggccccactagcaccatggccttaccagtgaccgccttgctcctgccgctggccttgctgctccacgccgccaggccgagctacgtgctgacacagcctccatccgtgtctgtggctccaggacagaccgccagaatcacatgcggcggcaacaacatcggcagcaagagcgtgcactggtatcagcagccacctggacaggctccagtggtggtggtgtacgacgacagcgatagacctagcggcatccccgagagattcagcggcagcaattccggcaataccgccacactgaccatcagcagagtggaagctggcgacgaggccgtgtactactgccaagtgtgggacagcagcagcgatcacgtggtgtttggcggcggaacaaagctgacagtgcttggcggaggcggatctggcggcggaggtagcggtggcggaggatctcaactccagctgcaagagtctggccctggcctggtcaagcctagcgaaacactgagcctgacctgtaccgtgtctggcggctctatcagctccggcagctatttctggggctggatcagacaacctcctggcaaaggactggaatggatcggctccatctactacagcggcatcacctactacaaccccagcctgaagtccagagtgaccatctccgtggacaccagcaagaaccagttctccctgaagctgagcagcgtgacagccgccgataccgccgtgtattattgtgccagacatgacggcgctgtggccggcctgtttgattattggggacagggcaccctggtcaccgtgtcatctgctacgcgtgaggacctgaagaacgtgttcccacctgaggtggccgtgttcgagcctagcgaggccgagatcagccacacccagaaagccaccctcgtgtgcctggctaccggcttctaccccgaccatgtggaactgtcttggtgggtcaacggcaaagaggtgcacagcggcgtgtgtaccgacccccagccactgaaagaacagcccgccctgaacgacagccggtactgcctgagcagcagactgagagtgtccgccaccttctggcagaacccccggaaccacttcagatgccaggtgcagttctacggcctgagcgagaacgacgagtggacccaggacagagccaagcccgtgacccagatcgtgtctgccgaagcctggggcagagccgattgcggctttaccagcgagagctaccagcagggcgtgctgagcgccaccatcctgtacgagatcctgctgggcaaggccaccctgtacgccgtgctggtgtctgccctggtgctgatggctatggtcaagcggaaggacagccggggataa

SEQ ID NO: 32430 - DNA, 1968 bp, synthetic construct
  source 1..1968: mol_type = other DNA
atggccttaccagtgaccgccttgctcctgccgctggccttgctgctccacgccgccaggccgctcgagcagaaactgatctcggaagaggatctgggctccggcgatcgccctgatcctgccgtgtaccagctgcgggatagcaagagcagcgacaagagcgtgtgtctgttcaccgacttcgacagccagaccaacgtgtcccagagcaaggactccgacgtgtacatcaccgataagtgcgtgctggacatgcggagcatggacttcaagagcaactccgccgtggcctggtccaacaagtccgatttcgcctgcgccaacgccttcaacaacagcattatccccgaggacacattcttcccaagccccgagagcagctgcgacgtgaagctggtggaaaagagcttcgagacagacaccaacctgaacttccagaacctgagcgtgatcggcttcagaatcctgctgctgaaagtggccggctttaacctgctgatgaccctgcggctgtggtccagctctagtcgcgccaagagaagcggatctggcgtgaagcagaccctgaatttcgacctgctgaagctggctggcgacgtggaatccaacccaggccccactagcaccatggccttaccagtgaccgccttgctcctgccgctggccttgctgctccacgccgccaggccggacatcgtgctgacacagagccctgccaccctgtctctgagccctggcgatagagccaccatcagctgtagagccagcgagagcgtgaccatcctgggcagccacctgatctactggtatcagcagaagcccggccagccccccagactgctgattcagctggcctccaatgtgcagaccggcgtgccagccagattttccggcagcggcagcagaaccgacttcaccctgaccatcagcagcgtggaacccgaggacttcgccgtgtactactgcctccagagccggaccatccccagaacattcggccagggcaccaagctggaaatcaagagaggcggaggcggaagtggaggcggaggatctggcggcggaggctctcaggtgcagctggtgcagtctggccccgaagtgaagaaacccggcgagtccgtgaagatcagctgcaaggccagcggctacaccttccggcactacagcatgaactgggtcaagcaggccccaggccagggcctgaagtggatgggcagaatcaacaccgagagcggcgtgcccatctacgccgacgacttcaagggccggttcagcttcaccgtggacaccagcgccagcaccgcctacctggaaatctccagcctgaccagcgaggataccgccgtgtatttctgctccaacgactacctgtacagcctggatttctggggccagggaaccaccctgacagtgtcctctacgcgtgaggacctgaagaacgtgttcccacctgaggtggccgtgttcgagcctagcgaggccgagatcagccacacccagaaagccaccctcgtgtgcctggctaccggcttctaccccgaccatgtggaactgtcttggtgggtcaacggcaaagaggtgcacagcggcgtgtgtaccgacccccagccactgaaagaacagcccgccctgaacgacagccggtactgcctgagcagcagactgagagtgtccgccaccttctggcagaacccccggaaccacttcagatgccaggtgcagttctacggcctgagcgagaacgacgagtggacccaggacagagccaagcccgtgacccagatcgtgtctgccgaagcctggggcagagccgattgcggctttaccagcgagagctaccagcagggcgtgctgagcgccaccatcctgtacgagatcctgctgggcaaggccaccctgtacgccgtgctggtgtctgccctggtgctgatggctatggtcaagcggaaggacagccggggataa

SEQ ID NO: 32431 - DNA, 1965 bp, synthetic construct
  source 1..1965: mol_type = other DNA
atggccttaccagtgaccgccttgctcctgccgctggccttgctgctccacgccgccaggccgctcgagcagaaactgatctcggaagaggatctgggctccggcgatcgccctgatcctgccgtgtaccagctgcgggatagcaagagcagcgacaagagcgtgtgtctgttcaccgacttcgacagccagaccaacgtgtcccagagcaaggactccgacgtgtacatcaccgataagtgcgtgctggacatgcggagcatggacttcaagagcaactccgccgtggcctggtccaacaagtccgatttcgcctgcgccaacgccttcaacaacagcattatccccgaggacacattcttcccaagccccgagagcagctgcgacgtgaagctggtggaaaagagcttcgagacagacaccaacctgaacttccagaacctgagcgtgatcggcttcagaatcctgctgctgaaagtggccggctttaacctgctgatgaccctgcggctgtggtccagctctagtcgcgccaagagaagcggatctggcgtgaagcagaccctgaatttcgacctgctgaagctggctggcgacgtggaatccaacccaggccccactagcatggccttaccagtgaccgccttgctcctgccgctggccttgctgctccacgccgccaggccggacatccagatgacccagagccctagctcactgagcgccagcgtgggcgacagggtgaccattacctgctccgccagccaggacatcagcaactacctgaactggtaccagcagaagcccggcaaggcccccaagctgctgatctactacacctccaacctgcactccggcgtgcccagcaggttcagcggaagcggcagcggcaccgatttcaccctgaccatctccagcctgcagcccgaggacttcgccacctactactgccagcagtacaggaagctcccctggactttcggccagggcaccaaactggagatcaagcgtggcggaggcggaagtggaggcggaggatctggcggcggaggctctcaggtgcagctggtccagagcggcgccgaagtgaagaagcccggcagctccgtgaaagtgagctgcaaggccagcggcggcaccttcagcaactactggatgcactgggtgaggcaggcccccggacagggcctggagtggatgggcgccacctacaggggccacagcgacacctactacaaccagaagttcaagggccgggtgaccatcaccgccgacaagagcaccagcaccgcctacatggaactgagcagcctcaggagcgaggacaccgctgtgtattactgcgccaggggcgccatctacgacggctacgacgtgctggacaactggggccagggcacactggtgaccgtgtccagcacgcgtgaggacctgaagaacgtgttcccacctgaggtggccgtgttcgagcctagcgaggccgagatcagccacacccagaaagccaccctcgtgtgcctggctaccggcttctaccccgaccatgtggaactgtcttggtgggtcaacggcaaagaggtgcacagcggcgtgtgtaccgacccccagccactgaaagaacagcccgccctgaacgacagccggtactgcctgagcagcagactgagagtgtccgccaccttctggcagaacccccggaaccacttcagatgccaggtgcagttctacggcctgagcgagaacgacgagtggacccaggacagagccaagcccgtgacccagatcgtgtctgccgaagcctggggcagagccgattgcggctttaccagcgagagctaccagcagggcgtgctgagcgccaccatcctgtacgagatcctgctgggcaaggccaccctgtacgccgtgctggtgtctgccctggtgctgatggctatggtcaagcggaaggacagccggggataa

SEQ ID NO: 32432 - DNA, 1935 bp, synthetic construct
  source 1..1935: mol_type = other DNA
atggccttaccagtgaccgccttgctcctgccgctggccttgctgctccacgccgccaggccgctcgagatccagaaccctgatcctgccgtgtaccagctgcgggatagcaagagcagcgacaagagcgtgtgtctgttcaccgacttcgacagccagaccaacgtgtcccagagcaaggactccgacgtgtacatcaccgataagtgcgtgctggacatgcggagcatggacttcaagagcaactccgccgtggcctggtccaacaagtccgatttcgcctgcgccaacgccttcaacaacagcattatccccgaggacacattcttcccaagccccgagagcagctgcgacgtgaagctggtggaaaagagcttcgagacagacaccaacctgaacttccagaacctgagcgtgatcggcttcagaatcctgctgctgaaagtggccggctttaacctgctgatgaccctgcggctgtggtccagctctagtcgcgccaagagaagcggatctggcgtgaagcagaccctgaatttcgacctgctgaagctggctggcgacgtggaatccaacccaggccctactagtatggactggatttggcgcatccttttccttgtcggcgctgctaccggcgcgcattccttcgaaagctacgtgctgacacagcctccatccgtgtctgtggctccaggacagaccgccagaatcacatgcggcggcaacaacatcggcagcaagagcgtgcactggtatcagcagccacctggacaggctccagtggtggtggtgtacgacgacagcgatagacctagcggcatccccgagagattcagcggcagcaattccggcaataccgccacactgaccatcagcagagtggaagctggcgacgaggccgtgtactactgccaagtgtgggacagcagcagcgatcacgtggtgtttggcggcggaacaaagctgacagtgcttggcggaggcggatctggcggcggaggtagcggtggcggaggatctcaactccagctgcaagagtctggccctggcctggtcaagcctagcgaaacactgagcctgacctgtaccgtgtctggcggctctatcagctccggcagctatttctggggctggatcagacaacctcctggcaaaggactggaatggatcggctccatctactacagcggcatcacctactacaaccccagcctgaagtccagagtgaccatctccgtggacaccagcaagaaccagttctccctgaagctgagcagcgtgacagccgccgataccgccgtgtattattgtgccagacatgacggcgctgtggccggcctgtttgattattggggacagggcaccctggtcaccgtgtcatctgctacgcgtgaggacctgaagaacgtgttcccacctgaggtggccgtgttcgagcctagcgaggccgagatcagccacacccagaaagccaccctcgtgtgcctggctaccggcttctaccccgaccatgtggaactgtcttggtgggtcaacggcaaagaggtgcacagcggcgtgtgtaccgacccccagccactgaaagaacagcccgccctgaacgacagccggtactgcctgagcagcagactgagagtgtccgccaccttctggcagaacccccggaaccacttcagatgccaggtgcagttctacggcctgagcgagaacgacgagtggacccaggacagagccaagcccgtgacccagatcgtgtctgccgaagcctggggcagagccgattgcggctttaccagcgagagctaccagcagggcgtgctgagcgccaccatcctgtacgagatcctgctgggcaaggccaccctgtacgccgtgctggtgtctgccctggtgctgatggctatggtcaagcggaaggacagccggggataa

SEQ ID NO: 32433 - DNA, 1869 bp, synthetic construct
  source 1..1869: mol_type = other DNA
atggccctgcctgtgacagctctgctgctgcctctggcactgctgctgcacgccgccagacctgacatcgtgctgacacagagccctgccaccctgtctctgagccctggcgatagagccaccatcagctgtagagccagcgagagcgtgaccatcctgggcagccacctgatccactggtatcagcagaagcccggccagccccccagactgctgattcagctggcctccaatgtgcagaccggcgtgccagccagattttccggcagcggcagcagaaccgacttcaccctgaccatcagcagcgtggaacccgaggacttcgccgtgtactactgcctccagagccggaccatccccagaacattcggccagggcaccaagctggaaatcaagagactcgaggacctgaagaacgtgttcccacctgaggtggccgtgttcgagcctagcgaggccgagatcagccacacccagaaagccaccctcgtgtgcctggctaccggcttctaccccgaccatgtggaactgtcttggtgggtcaacggcaaagaggtgcacagcggcgtgtgtaccgacccccagccactgaaagaacagcccgccctgaacgacagccggtactgcctgagcagcagactgagagtgtccgccaccttctggcagaacccccggaaccacttcagatgccaggtgcagttctacggcctgagcgagaacgacgagtggacccaggacagagccaagcccgtgacccagatcgtgtctgccgaagcctggggcagagccgattgcggctttaccagcgagagctaccagcagggcgtgctgagcgccaccatcctgtacgagatcctgctgggcaaggccaccctgtacgccgtgctggtgtctgccctggtgctgatggctatggtcaagcggaaggacagccggggaagggccaagcgatctggatctggagcaacaaacttctcactactcaaacaagcaggtgacgtggaggagaatcccgggcctactagtatggactggatttggcgcatccttttccttgtcggcgctgctaccggcgcgcattccttcgaacaggtgcagctggtgcagtctggccccgaagtgaagaaacccggcgagtccgtgaagatcagctgcaaggccagcggctacaccttccggcactacagcatgaactgggtcaagcaggccccaggccagggcctgaagtggatgggcagaatcaacaccgagagcggcgtgcccatctacgccgacgacttcaagggccggttcagcttcaccgtggacaccagcgccagcaccgcctacctggaaatctccagcctgaccagcgaggataccgccgtgtatttctgctccaacgactacctgtacagcctggatttctggggccagggaaccaccctgacagtgtcctctacgcgtatccagaaccctgatcctgccgtgtaccagctgcgggatagcaagagcagcgacaagagcgtgtgtctgttcaccgacttcgacagccagaccaacgtgtcccagagcaaggactccgacgtgtacatcaccgataagtgcgtgctggacatgcggagcatggacttcaagagcaactccgccgtggcctggtccaacaagtccgatttcgcctgcgccaacgccttcaacaacagcattatccccgaggacacattcttcccaagccccgagagcagctgcgacgtgaagctggtggaaaagagcttcgagacagacaccaacctgaacttccagaacctgagcgtgatcggcttcagaatcctgctgctgaaagtggccggctttaacctgctgatgaccctgcggctgtggtccagctaa

SEQ ID NO: 32434 - DNA, 2196 bp, synthetic construct
  source 1..2196: mol_type = other DNA
atggccttaccagtgaccgccttgctcctgccgctggccttgctgctccacgccgccaggccgatgctgcccgctcctaagaatctggtggtgtccagaatcaccgaggacagcgccagactgtcttggacagctcctgatgccgccttcgacagcttccccatccggtacatcgagacactgatctggggcgaagccatctggctggatgtgcctggaagcgagagaagctacgacctgaccggactgaagcctggcacagagtatgccgtggtcatcaccggcgtgaaaggcggcagattctctagccctctggtggcctctttcaccaccggtaccggcggaggcggatctggcggcggaggtagcggtggcggaggatctgaattcgacatcgtgctgacacagagccctgccaccctgtctctgagccctggcgatagagccaccatcagctgtagagccagcgagagcgtgaccatcctgggcagccacctgatccactggtatcagcagaagcccggccagccccccagactgctgattcagctggcctccaatgtgcagaccggcgtgccagccagattttccggcagcggcagcagaaccgacttcaccctgaccatcagcagcgtggaacccgaggacttcgccgtgtactactgcctccagagccggaccatccccagaacattcggccagggcaccaagctggaaatcaagagactcgaggacctgaagaacgtgttcccacctgaggtggccgtgttcgagcctagcgaggccgagatcagccacacccagaaagccaccctcgtgtgcctggctaccggcttctaccccgaccatgtggaactgtcttggtgggtcaacggcaaagaggtgcacagcggcgtgtgtaccgacccccagccactgaaagaacagcccgccctgaacgacagccggtactgcctgagcagcagactgagagtgtccgccaccttctggcagaacccccggaaccacttcagatgccaggtgcagttctacggcctgagcgagaacgacgagtggacccaggacagagccaagcccgtgacccagatcgtgtctgccgaagcctggggcagagccgattgcggctttaccagcgagagctaccagcagggcgtgctgagcgccaccatcctgtacgagatcctgctgggcaaggccaccctgtacgccgtgctggtgtctgccctggtgctgatggctatggtcaagcggaaggacagccggggaagggccaagcgatctggatctggagcaacaaacttctcactactcaaacaagcaggtgacgtggaggagaatcccgggcctactagtatggactggatttggcgcatccttttccttgtcggcgctgctaccggcgcgcattccttcgaacaggtgcagctggtgcagtctggccccgaagtgaagaaacccggcgagtccgtgaagatcagctgcaaggccagcggctacaccttccggcactacagcatgaactgggtcaagcaggccccaggccagggcctgaagtggatgggcagaatcaacaccgagagcggcgtgcccatctacgccgacgacttcaagggccggttcagcttcaccgtggacaccagcgccagcaccgcctacctggaaatctccagcctgaccagcgaggataccgccgtgtatttctgctccaacgactacctgtacagcctggatttctggggccagggaaccaccctgacagtgtcctctacgcgtatccagaaccctgatcctgccgtgtaccagctgcgggatagcaagagcagcgacaagagcgtgtgtctgttcaccgacttcgacagccagaccaacgtgtcccagagcaaggactccgacgtgtacatcaccgataagtgcgtgctggacatgcggagcatggacttcaagagcaactccgccgtggcctggtccaacaagtccgatttcgcctgcgccaacgccttcaacaacagcattatccccgaggacacattcttcccaagccccgagagcagctgcgacgtgaagctggtggaaaagagcttcgagacagacaccaacctgaacttccagaacctgagcgtgatcggcttcagaatcctgctgctgaaagtggccggctttaacctgctgatgaccctgcggctgtggtccagctaa

SEQ ID NO: 32435 - DNA, 1911 bp, synthetic construct
  source 1..1911: mol_type = other DNA
atggccttaccagtgaccgccttgctcctgccgctggccttgctgctccacgccgccaggccgctcgaggacctgaagaacgtgttcccacctgaggtggccgtgttcgagcctagcgaggccgagatcagccacacccagaaagccaccctcgtgtgcctggctaccggcttctaccccgaccatgtggaactgtcttggtgggtcaacggcaaagaggtgcacagcggcgtgtgtaccgacccccagccactgaaagaacagcccgccctgaacgacagccggtactgcctgagcagcagactgagagtgtccgccaccttctggcagaacccccggaaccacttcagatgccaggtgcagttctacggcctgagcgagaacgacgagtggacccaggacagagccaagcccgtgacccagatcgtgtctgccgaagcctggggcagagccgattgcgacgtgaagctggtggaaaagagcttcgagacagacaccaacctgaacttccagaacctgagcgtgatcggcttcagaatcctgctgctgaaagtggccggctttaacctgctgatgaccctgcggctgtggtccagcagggccaagcgatctggatctggagcaacaaacttctcactactcaaacaagcaggtgacgtggaggagaatcccgggcctactagcaccatggccttaccagtgaccgccttgctcctgccgctggccttgctgctccacgccgccaggccgcaagtgaagctggaagagtctggcggaggactggtgcaggctggaagaagcctgagactgtcttgtgccgccagcgagcacacctttagctctcacgtgatgggctggttcagacaggcccctggcaaagaaagggaaagcgtggccgttatcggctggcgggatattagcaccagctacgccgatagcgtgaagggcagattcaccatcagccgggacaacgccaagaaaaccctgtacctccagatgaacagcctgaagccagaggacaccgccgtgtactactgcgccgccagaagaattgacgccgccgactttgattcttggggccagggaacccaagtgaccgtttctagcggaggaggaggatctgaagtgcaactggttgaatccggtggcggcctggtgcaagcaggcggatctctcagacttagctgtgccgcctccggcagaaccttcacaatgggatggtttaggcaggctccagggaaagagagagagttcgtcgccgccatctctctgtctcccacactggcctactacgccgagtctgtgaaaggccggttcaccatctccagagataatgccaagaacaccgtggtgctgcaaatgaactctctgaaacccgaggatacagccctgtactattgtgccgctgaccggaagtccgtgatgagcatcagacccgattactggggacagggcacacaagtcacagtgtcctctacgcgtatccagaaccctgatcctgccgtgtaccagctgcgggatagcaagagcagcgacaagagcgtgtgtctgttcaccgacttcgacagccagaccaacgtgtcccagagcaaggactccgacgtgtacatcaccgataagtgcgtgctggacatgcggagcatggacttcaagagcaactccgccgtggcctggtccaacaagtccgatttcgcctgcgccaacgccttcaacaacagcattatccccgaggacacattcttcccaagccccgagagcagctgcggctttaccagcgagagctaccagcagggcgtgctgagcgccaccatcctgtacgagatcctgctgggcaaggccaccctgtacgccgtgctggtgtctgccctggtgctgatggctatggtcaagcggaaggacagccggggataa

SEQ ID NO: 32436 - DNA, 1917 bp, synthetic construct
  source 1..1917: mol_type = other DNA
atggccttaccagtgaccgccttgctcctgccgctggccttgctgctccacgccgccaggccgctcgaggacctgaagaacgtgttcccacctgaggtggccgtgttcgagcctagcgaggccgagatcagccacacccagaaagccaccctcgtgtgcctggctaccggcttctaccccgaccatgtggaactgtcttggtgggtcaacggcaaagaggtgcacagcggcgtgtgtaccgacccccagccactgaaagaacagcccgccctgaacgacagccggtactgcctgagcagcagactgagagtgtccgccaccttctggcagaacccccggaaccacttcagatgccaggtgcagttctacggcctgagcgagaacgacgagtggacccaggacagagccaagcccgtgacccagatcgtgtctgccgaagcctggggcagagccgattgcgacgtgaagctggtggaaaagagcttcgagacagacaccaacctgaacttccagaacctgagcgtgatcggcttcagaatcctgctgctgaaagtggccggctttaacctgctgatgaccctgcggctgtggtccagcagggccaagcgatctggatctggagcaacaaacttctcactactcaaacaagcaggtgacgtggaggagaatcccgggcctactagcaccatggccttaccagtgaccgccttgctcctgccgctggccttgctgctccacgccgccaggccggacatcgtgctgacacagtctcccgccacactgtcactgagccctggcgatagagccacactgagctgtagagccagcgagagcgtgacaatcctgggcagccacctgatctactggtatcagcagaagcccggacaggcccctagactgctgattcagctcgccagcaatgtgcagacaggcatccctgccagattttccggcagcggcagcagaaccgatttcaccctgaccataagcagcctggaacctgaggacttcgccgtgtactactgcctccagagccggacaatccccagaacctttggacagggcaccaagctggaaatcaagagaggcggaggcggaagtggaggcggaggatctggcggcggaggctctcaagttcaactggtgcagagcggctccgagctgaagaaacctggcgagtccgtgaagattagctgcaaggccagcggctacaccttcacacactacagcatgaactgggtccgacaggctccaggccaaggacttgaatggatgggcagaatcaacaccgagacaggcgagcccctgtacgccgacgatttcaagggcagattcgtgttcagcctggacaccagcgccagcacagcctatctccagatcagctctctgaaggccgaggacaccgccgtgtattattgcagcaacgactacctgtactccctggactattggggccagggcacactggtcacagtgtctagtacgcgtatccagaaccctgatcctgccgtgtaccagctgcgggatagcaagagcagcgacaagagcgtgtgtctgttcaccgacttcgacagccagaccaacgtgtcccagagcaaggactccgacgtgtacatcaccgataagtgcgtgctggacatgcggagcatggacttcaagagcaactccgccgtggcctggtccaacaagtccgatttcgcctgcgccaacgccttcaacaacagcattatccccgaggacacattcttcccaagccccgagagcagctgcggctttaccagcgagagctaccagcagggcgtgctgagcgccaccatcctgtacgagatcctgctgggcaaggccaccctgtacgccgtgctggtgtctgccctggtgctgatggctatggtcaagcggaaggacagccggggataa

SEQ ID NO: 32437 - DNA, 2289 bp, synthetic construct; identical to SEQ ID NO: 32366
  source 1..2289: mol_type = other DNA

SEQ ID NO: 32438 - DNA, 1914 bp, synthetic construct
  source 1..1914: mol_type = other DNA
atggactggatttggcgcatccttttccttgtcggcgctgctaccggcgcgcattccttcgaaggactcgaggacctgaagaacgtgttcccacctgaggtggccgtgttcgagcctagcgaggccgagatcagccacacccagaaagccaccctcgtgtgcctggctaccggcttctaccccgaccatgtggaactgtcttggtgggtcaacggcaaagaggtgcacagcggcgtgtgtaccgacccccagccactgaaagaacagcccgccctgaacgacagccggtactgcctgagcagcagactgagagtgtccgccaccttctggcagaacccccggaaccacttcagatgccaggtgcagttctacggcctgagcgagaacgacgagtggacccaggacagagccaagcccgtgacccagatcgtgtctgccgaagcctggggcagagccgattgcggctttaccagcgagagctaccagcagggcgtgctgagcgccaccatcctgtacgagatcctgctgggcaaggccaccctgtacgccgtgctggtgtctgccctggtgctgatggctatggtcaagcggaaggacagccggggaagggccaagcgatctggatctggagcaacaaacttctcactactcaaacaagcaggtgacgtggaggagaatcccgggcctactagcaccatggccttaccagtgaccgccttgctcctgccgctggccttgctgctccacgccgccaggccgcaagtgaagctggaagagtctggcggaggactggtgcaggctggaagaagcctgagactgtcttgtgccgccagcgagcacacctttagctctcacgtgatgggctggttcagacaggcccctggcaaagaaagggaaagcgtggccgttatcggctggcgggatattagcaccagctacgccgatagcgtgaagggcagattcaccatcagccgggacaacgccaagaaaaccctgtacctccagatgaacagcctgaagccagaggacaccgccgtgtactactgcgccgccagaagaattgacgccgccgactttgattcttggggccagggaacccaagtgaccgtttctagcggaggaggaggatctgaagtgcaactggttgaatccggtggcggcctggtgcaagcaggcggatctctcagacttagctgtgccgcctccggcagaaccttcacaatgggatggtttaggcaggctccagggaaagagagagagttcgtcgccgccatctctctgtctcccacactggcctactacgccgagtctgtgaaaggccggttcaccatctccagagataatgccaagaacaccgtggtgctgcaaatgaactctctgaaacccgaggatacagccctgtactattgtgccgctgaccggaagtccgtgatgagcatcagacccgattactggggacagggcacacaagtcacagtgtcctctacgcgtatccagaaccctgatcctgccgtgtaccagctgcgggatagcaagagcagcgacaagagcgtgtgtctgttcaccgacttcgacagccagaccaacgtgtcccagagcaaggactccgacgtgtacatcaccgataagtgcgtgctggacatgcggagcatggacttcaagagcaactccgccgtggcctggtccaacaagtccgatttcgcctgcgccaacgccttcaacaacagcattatccccgaggacacattcttcccaagccccgagagcagctgcgacgtgaagctggtggaaaagagcttcgagacagacaccaacctgaacttccagaacctgagcgtgatcggcttcagaatcctgctgctgaaagtggccggctttaacctgctgatgaccctgcggctgtggtccagctaa

SEQ ID NO: 32439 - DNA, 2289 bp, synthetic construct
  source 1..2289: mol_type = other DNA
atggccttaccagtgaccgccttgctcctgccgctggccttgctgctccacgccgccaggccgagctacgtgctgacacagcctccatccgtgtctgtggctccaggacagaccgccagaatcacatgcggcggcaacaacatcggcggcaagagcgtgcactggtatcagcagccacctggacaggctccagtggtggtggtgtacgacgacagcgatagacctagcggcatccccgagagattcagcggcagcaattccggcaataccgccacactgaccatcagcagagtggaagctggcgacgaggccgtgtactactgccaagtgtgggacagcagcagcgatcacgtggtgtttggcggcggaacaaagctgacagtgcttctcgaggacctgaagaacgtgttcccacctgaggtggccgtgttcgagcctagcgaggccgagatcagccacacccagaaagccaccctcgtgtgcctggctaccggcttctaccccgaccatgtggaactgtcttggtgggtcaacggcaaagaggtgcacagcggcgtgtgtaccgacccccagccactgaaagaacagcccgccctgaacgacagccggtactgcctgagcagcagactgagagtgtccgccaccttctggcagaacccccggaaccacttcagatgccaggtgcagttctacggcctgagcgagaacgacgagtggacccaggacagagccaagcccgtgacccagatcgtgtctgccgaagcctggggcagagccgattgcggctttaccagcgagagctaccagcagggcgtgctgagcgccaccatcctgtacgagatcctgctgggcaaggccaccctgtacgccgtgctggtgtctgccctggtgctgatggctatggtcaagcggaaggacagccggggaagggccaagcgatctggatctggagcaacaaacttctcactactcaaacaagcaggtgacgtggaggagaatcccgggcctactagtgccaccatggactggatttggcgcatccttttccttgtcggcgctgctaccggcgcccattccgggcccgaagtgcaactggttgaatccggtggcggcctggtgcaagcaggcggatctctcagacttagctgtgccgcctccggcagaaccttcacaatgggatggtttaggcaggctccagggaaagagagagagttcgtcgccgccatctctctgtctcccacactggcctactacgccgactctgtgaaaggccggttcaccatctccagagataatgccaagaacaccgtggtgctgcaaatgaactctctgaaacccgaggatacagccctgtactattgtgccgctgaccggaagtccgtgatgagcatcagacccgattactggggacagggcacacaagtcacagtgtcctctggatccggcggcggaggatctggcggaggcggatctgggggcggaggctctttcgaacaactccagctgcaagagtctggccctggcctggtcaagcctagcgaaacactgagcctgacctgtaccgtgtctggcggctctatcagctccagcagctatttctggggctggatcagacaacctcctggcaaaggactggaatggatcggctccatctactacagcggcatcacctactacaaccccagcctgaagtccagagtgaccatctccgtggacaccagcaagaaccagttctccctgaagctgagcagcgtgacagccgccgataccgccgtgtattattgtgccagacatgacggcgctgtggccggcctgtttgattattggggacagggcaccctggtcaccgtgtcatctgctacgcgtatccagaaccctgatcctgccgtgtaccagctgcgggatagcaagagcagcgacaagagcgtgtgtctgttcaccgacttcgacagccagaccaacgtgtcccagagcaaggactccgacgtgtacatcaccgataagtgcgtgctggacatgcggagcatggacttcaagagcaactccgccgtggcctggtccaacaagtccgatttcgcctgcgccaacgccttcaacaacagcattatccccgaggacacattcttcccaagcagcgacgtgccctgcgacgtgaagctggtggaaaagagcttcgagacagacaccaacctgaacttccagaacctgagcgtgatcggcttcagaatcctgctgctgaaagtggccggctttaacctgctgatgaccctgcggctgtggtccagctaa

SEQ ID NO: 32440 - DNA, 2601 bp, synthetic construct
  source 1..2601: mol_type = other DNA
atggccttaccagtgaccgccttgctcctgccgctggccttgctgctccacgccgccaggccgcaggtgcagctggttgaatctggcggaggactggttcagcctggcggatctctgagactgtcttgtgccgccagcggcttcaccttcaccaatcacgccatgagctgggtccgacaggcccctggaaaaggactggaactggtgtctagcatcagcggcaacggcagaaccacctactacgccgatagcgtgaagggcagattcaccatcagccgggacatcagcaagaacaccctggacctccagatgaacagcctgagagccgaggataccgccgtgtactactgtgccaaggatggcggagagacactggtggatagcagaggccagggcacactggtcacagtgtcatctctcgagggacagcctaaggccaatcctaccgtgacactgttccctccaagcagcgaagaactccaggccaacaaggccacacttgtgtgcctgatctccgacttctaccctggggctgtgacagtggcttggaaggccgatggatctcctgtgaaagccggcgtggaaaccaccaagccatccaagcagagcaacaacaaatacgccgccagctcctacctgagcctgacacctgagcagtggaagtcccacagatcctacagctgccaagtgacccacgaaggcagcaccgtggaaaagacagtggcccctacagagtgcagcggcagagccgattgcggctttaccagcgagagctaccagcagggcgtgctgagcgccaccatcctgtacgagatcctgctgggcaaggccaccctgtacgccgtgctggtgtctgccctggtgctgatggctatggtcaagcggaaggacagccggggaagggccaagcgatctggatctggagcaacaaacttctcactactcaaacaagcaggtgacgtggaggagaatcccgggcctactagtatggactggatttggcgcatccttttccttgtcggcgctgctaccggcgcgcattccttcgaacaagtgcaactggttgaatccggtggcggcctggtgcaacccggcggatctctcagacttagctgtgccgcctccggcagaaccttcacaatgggatggtacaggcaggctccagggaaagggctcgagttcgtcagcgccatctctctgtctcccacactggcctactacgccgactctgtgaaaggccggttcaccatctccagagataatagcaagaacaccgtggtgctgcaaatgaactctctgagagccgaggatacagccctgtactattgtgccgctgaccggaagtccgtgatgagcatcagacccgattactggggacagggcacactggtcacagtgtctagtacgcgtgcctctacaaagggaccctccgtgtttcctctggctcccagcagcaagtctacaagcggaggaacagccgctctgggctgcctggtcaaggattactttcccgagcctgtgaccgtgtcctggaatagcggagcactgacaagcggcgtgcacacctttccagccgtgctgcaaagcagcggcctgtactctctgagcagcgtggtcacagtgcctagctctagcctgggcacccagacctacatctgcaatgtgaaccacaagcctagcaacaccaaggtggacaagagagtggaacccaagagctgtatccccgaggacacattcttcccaagccccgagagcagctgcgacgtgaagctggtggaaaagagcttcgagacagacaccaacctgaacttccagaacctgagcgtgatcggcttcagaatcctgctgctgaaagtggccggctttaacctgctgatgaccctgcggctgtggtccagccgcgccaagagaagcggatctggcgtgaagcagaccctgaatttcgacctgctgaagctggctggcgacgtggaatccaacccaggcccttctagaggccatatgaccgagtacaagcccacggtgcgcctcgccacccgcgacgacgtccccagggccgtacgcaccctcgccgccgcgttcgccgactaccccgccacgcgccacaccgtcgatccggaccgccacatcgagcgggtcaccgagctgcaagaactcttcctcacgcgcgtcgggctcgacatcggcaaggtgtgggtcgcggacgacggcgccgcggtggcggtctggaccacgccggagagcgtcgaagcgggggcggtgttcgccgagatcggcccgcgcatggccgagttgagcggttcccggctggccgcgcagcaacagatggaaggcctcctggcgccgcaccggcccaaggagcccgcgtggttcctggccaccgtcggcgtctcgcccgaccaccagggcaagggtctgggcagcgccgtcgtgctccccggagtggaggcggccgagcgcgccggggtgcccgccttcctggagacctccgcgccccgcaacctccccttctacgagcggctcggcttcaccgtcaccgccgacgtcgaggtgcccgaaggaccgcgcacctggtgcatgacccgcaagcccggtgcctga

SEQ ID NO: 32441 - DNA, 2700 bp, synthetic construct; identical to SEQ ID NO: 32313
  source 1..2700: mol_type = other DNA

SEQ ID NO: 32442 - DNA, 2928 bp, synthetic construct
  source 1..2928: mol_type = other DNA
atggccttaccagtgaccgccttgctcctgccgctggccttgctgctccacgccgccaggccgagctacgtgctgacacagcctccatccgtgtctgtggctccaggacagaccgccagaatcacatgcggcggcaacaacatcggcggcaagagcgtgcactggtatcagcagccacctggacaggctccagtggtggtggtgtacgacgacagcgatagacctagcggcatccccgagagattcagcggcagcaattccggcaataccgccacactgaccatcagcagagtggaagctggcgacgaggccgtgtactactgccaagtgtgggacagcagcagcgatcacgtggtgtttggcggcggaacaaagctgacagtgcttctcgaggacctgaagaacgtgttcccacctgaggtggccgtgttcgagcctagcgaggccgagatcagccacacccagaaagccaccctcgtgtgcctggctaccggcttctaccccgaccatgtggaactgtcttggtgggtcaacggcaaagaggtgcacagcggcgtgtctaccgacccccagccactgaaagaacagcccgccctgaacgacagccggtactgcctgagcagcagactgagagtgtccgccaccttctggcagaacccccggaaccacttcagatgccaggtgcagttctacggcctgagcgagaacgacgagtggacccaggacagagccaagcccgtgacccagatcgtgtctgccgaagcctggggcagagccgattgcggatcccagagcttcggcctgctggaccccaagctgtgctacctgctggatggcatcctgttcatctacggcgtgatcctgaccgccctgttcctgagagtgaagttcagcagaagcgccgacgcccctgcctaccagcagggacagaaccaactgtacaacgagctgaacctgggcagacgggaagagtacgacgtgctggacaagcggagaggcagggaccctgagatgggcggaaagccccggagaaagaacccccaggaaggactgtataacgaactccagaaagacaagatggccgaagcctacagcgagatcggcatgaagggcgagcggagaagaggcaagggccacgatggcctgtaccagggcctgagcaccgccaccaaggacacctatgacgccctgcacatgcaggccctgcctccaagaagggccaagcgatctggatctggagcaacaaacttctcactactcaaacaagcaggtgacgtggaggagaatcccgggcctactagtatggactggatttggcgcatccttttccttgtcggcgctgctaccggcgcgcattccttcgaacaactccagctgcaagagtctggccctggcctggtcaagcctagcgaaacactgagcctgacctgtaccgtgtctggcggctctatcagctccagcagctatttctggggctggatcagacaacctcctggcaaaggactggaatggatcggctccatctactacagcggcatcacctactacaaccccagcctgaagtccagagtgaccatctccgtggacaccagcaagaaccagttctccctgaagctgagcagcgtgacagccgccgataccgccgtgtattattgtgccagacatgacggcgctgtggccggcctgtttgattattggggacagggcaccctggtcaccgtgtcatctgctacgcgtatccagaaccctgatcctgccgtgtaccagctgcgggatagcaagagcagcgacaagagcgtgtgtctgttcaccgacttcgacagccagaccaacgtgtcccagagcaaggactccgacgtgtacatcaccgataagaccgtgctggacatgcggagcatggacttcaagagcaactccgccgtggcctggtccaacaagtccgatttcgcctgcgccaacgccttcaacaacagcattatccccgaggacacattcttcccaagccccgagagcagctgcggtaccatcactcaaggtttggcagtgtcaaccatctcatcattctttccacctggctaccaagtgtccttctgcctggtcatggtgctgctgttcgccgtggataccggcctgtacttcagcgtcaagaccaacatccggtccagcaccagagactggaaggaccacaagttcaagtggcggaaggaccctcaggacaagagggccaagcgatctggatctggagcaacaaacttctcactactcaaacaagcaggtgacgtggaggagaatcccgggccttctagaatgtaccggatgcagctgctgagctgtatcgccctgtctctggccctggtcacaaatagcaactgggttaacgtgatctccgacctgaagaagatcgaggacctgatccagtccatgcacatcgacgccacactgtacaccgagagcgacgtgcaccctagctgtaaagtgaccgccatgaagtgctttctgctggaactgcaagtgatctccctggaaagcggcgacgccagcatccacgacaccgtgaagaacctgattatcctggctaacaacagcctgagcagcaacggcaacgtgaccgagtccggctgtaaagagtgcgaggaactggaagagaagaatatcaaagagttcctccagagcttcgtgcacatcgtgcagatgttcatcaacaccagcaagatcgaagtgatgtaccctcctccttacctggacaacgagaagtccaacggcaccatcatccacgtgaagggcaagcacctgtgtccttctccactgttccccggacctagcaagcctttctgggtgctcgttgttgttggcggcgtgctggcctgttacagcctgctggttaccgtggccttcatcatcttttgggtccgaagcaagcggagctaa

SEQ ID NO: 32443 - DNA, 3405 bp, synthetic construct
  source 1..3405: mol_type = other DNA
atggccttaccagtgaccgccttgctcctgccgctggccttgctgctccacgccgccaggccgagctacgtgctgacacagcctccatccgtgtctgtggctccaggacagaccgccagaatcacatgcggcggcaacaacatcggcagcaagagcgtgcactggtatcagcagccacctggacaggctccagtggtggtggtgtacgacgacagcgatagacctagcggcatccccgagagattcagcggcagcaattccggcaataccgccacactgaccatcagcagagtggaagctggcgacgaggccgtgtactactgccaagtgtgggacagcagcagcgatcacgtggtgtttggcggcggaacaaagctgacagtgcttctcgaggacctgaagaacgtgttcccacctgaggtggccgtgttcgagcctagcgaggccgagatcagccacacccagaaagccaccctcgtgtgcctggctaccggcttctaccccgaccatgtggaactgtcttggtgggtcaacggcaaagaggtgcacagcggcgtgtctaccgacccccagccactgaaagaacagcccgccctgaacgacagccggtactgcctgagcagcagactgagagtgtccgccaccttctggcagaacccccggaaccacttcagatgccaggtgcagttctacggcctgagcgagaacgacgagtggacccaggacagagccaagcccgtgacccagatcgtgtctgccgaagcctggggcagagccgattgcggatcccagagcttcggcctgctggaccccaagctgtgctacctgctggatggcatcctgttcatctacggcgtgatcctgaccgccctgttcctgaggagtaagaggagcaggctcctgcacagtgactacatgaacatgactccacgccgccccggacccacccgcaagcattaccagccctatgccccaccacgcgacttcgcagcctatcgctccagagtgaagttcagcagaagcgccgacgcccctgcctaccagcagggacagaaccaactgtacaacgagctgaacctgggcagacgggaagagtacgacgtgctggacaagcggagaggcagggaccctgagatgggcggaaagccccggagaaagaacccccaggaaggactgtataacgaactccagaaagacaagatggccgaagcctacagcgagatcggcatgaagggcgagcggagaagaggcaagggccacgatggcctgtaccagggcctgagcaccgccaccaaggacacctatgacgccctgcacatgcaggccctgcctccaagaagggccaagcgatctggatctggagcaacaaacttctcactactcaaacaagcaggtgacgtggaggagaatcccgggcctactagtatggactggatttggcgcatccttttccttgtcggcgctgctaccggcgcgcattccttcgaacaactccagctgcaagagtctggccctggcctggtcaagcctagcgaaacactgagcctgacctgtaccgtgtctggcggctctatcagctccggcagctatttctggggctggatcagacaacctcctggcaaaggactggaatggatcggctccatctactacagcggcatcacctactacaaccccagcctgaagtccagagtgaccatctccgtggacaccagcaagaaccagttctccctgaagctgagcagcgtgacagccgccgataccgccgtgtattattgtgccagacatgacggcgctgtggccggcctgtttgattattggggacagggcaccctggtcaccgtgtcatctgctacgcgtatccagaaccctgatcctgccgtgtaccagctgcgggatagcaagagcagcgacaagagcgtgtgtctgttcaccgacttcgacagccagaccaacgtgtcccagagcaaggactccgacgtgtacatcaccgataagaccgtgctggacatgcggagcatggacttcaagagcaactccgccgtggcctggtccaacaagtccgatttcgcctgcgccaacgccttcaacaacagcattatccccgaggacacattcttcccaagccccgagagcagctgcggtaccatcactcaaggtttggcagtgtcaaccatctcatcattctttccacctggctaccaagtgtccttctgcctggtcatggtgctgctgttcgccgtggataccggcctgtacttcagcgtcaagaccaacatccggtccagcaccagagactggaaggaccacaagttcaagtggcggaaggaccctcaggacaagtggcgacgcaagcgcaaagaaaagcaaagcgagacaagcccaaaagaatttctcactatatacgaggacgtgaaagatttgaagacgaggcggaatcatgagcaagagcagacatttcctggcgggggctctactatctactcaatgattcaatcccaaagctccgctccgacttcccaagagcccgcttacactctctactcactgatacagccttcaagaaaatcaggctctcggaaacggaatcattccccatccttcaatagtaccatctatgaagtaatcggtaagagtcaacctaaagctcaaaaccccgctcgcttgagccgcaaggagctggaaaacttcgatgtatatagccgcgccaagagaagcggatctggcgtgaagcagaccctgaatttcgacctgctgaagctggctggcgacgtggaatccaacccaggcccttctagaggccatatgaccgagtacaagcccacggtgcgcctcgccacccgcgacgacgtccccagggccgtacgcaccctcgccgccgcgttcgccgactaccccgccacgcgccacaccgtcgatccggaccgccacatcgagcgggtcaccgagctgcaagaactcttcctcacgcgcgtcgggctcgacatcggcaaggtgtgggtcgcggacgacggcgccgcggtggcggtctggaccacgccggagagcgtcgaagcgggggcggtgttcgccgagatcggcccgcgcatggccgagttgagcggttcccggctggccgcgcagcaacagatggaaggcctcctggcgccgcaccggcccaaggagcccgcgtggttcctggccaccgtcggcgtctcgcccgaccaccagggcaagggtctgggcagcgccgtcgtgctccccggagtggaggcggccgagcgcgccggggtgcccgccttcctggagacctccgcgccccgcaacctccccttctacgagcggctcggcttcaccgtcaccgccgacgtcgaggtgcccgaaggaccgcgcacctggtgcatgacccgcaagcccggtgcctga

SEQ ID NO: 32444 - DNA, 3048 bp, synthetic construct
  source 1..3048: mol_type = other DNA
atggccttaccagtgaccgccttgctcctgccgctggccttgctgctccacgccgccaggccgagctacgtgctgacacagcctccatccgtgtctgtggctccaggacagaccgccagaatcacatgcggcggcaacaacatcggcagcaagagcgtgcactggtatcagcagccacctggacaggctccagtggtggtggtgtacgacgacagcgatagacctagcggcatccccgagagattcagcggcagcaattccggcaataccgccacactgaccatcagcagagtggaagctggcgacgaggccgtgtactactgccaagtgtgggacagcagcagcgatcacgtggtgtttggcggcggaacaaagctgacagtgcttctcgaggacctgaagaacgtgttcccacctgaggtggccgtgttcgagcctagcgaggccgagatcagccacacccagaaagccaccctcgtgtgcctggctaccggcttctaccccgaccatgtggaactgtcttggtgggtcaacggcaaagaggtgcacagcggcgtgtctaccgacccccagccactgaaagaacagcccgccctgaacgacagccggtactgcctgagcagcagactgagagtgtccgccaccttctggcagaacccccggaaccacttcagatgccaggtgcagttctacggcctgagcgagaacgacgagtggacccaggacagagccaagcccgtgacccagatcgtgtctgccgaagcctggggcagagccgattgcggatcccagagcttcggcctgctggaccccaagctgtgctacctgctggatggcatcctgttcatctacggcgtgatcctgaccgccctgttcctgagagtgaagttcagcagaagcgccgacgcccctgcctaccagcagggacagaaccaactgtacaacgagctgaacctgggcagacgggaagagtacgacgtgctggacaagcggagaggcagggaccctgagatgggcggaaagccccggagaaagaacccccaggaaggactgtataacgaactccagaaagacaagatggccgaagcctacagcgagatcggcatgaagggcgagcggagaagaggcaagggccacgatggcctgtaccagggcctgagcaccgccaccaaggacacctatgacgccctgcacatgcaggccctgcctccaagaagggccaagcgatctggatctggagcaacaaacttctcactactcaaacaagcaggtgacgtggaggagaatcccgggcctactagtatggactggatttggcgcatccttttccttgtcggcgctgctaccggcgcgcattccttcgaacaactccagctgcaagagtctggccctggcctggtcaagcctagcgaaacactgagcctgacctgtaccgtgtctggcggctctatcagctccggcagctatttctggggctggatcagacaacctcctggcaaaggactggaatggatcggctccatctactacagcggcatcacctactacaaccccagcctgaagtccagagtgaccatctccgtggacaccagcaagaaccagttctccctgaagctgagcagcgtgacagccgccgataccgccgtgtattattgtgccagacatgacggcgctgtggccggcctgtttgattattggggacagggcaccctggtcaccgtgtcatctgctacgcgtatccagaaccctgatcctgccgtgtaccagctgcgggatagcaagagcagcgacaagagcgtgtgtctgttcaccgacttcgacagccagaccaacgtgtcccagagcaaggactccgacgtgtacatcaccgataagaccgtgctggacatgcggagcatggacttcaagagcaactccgccgtggcctggtccaacaagtccgatttcgcctgcgccaacgccttcaacaacagcattatccccgaggacacattcttcccaagccccgagagcagctgcggtaccatcactcaaggtttggcagtgtcaaccatctcatcattctttccacctggctaccaagtgtccttctgcctggtcatggtgctgctgttcgccgtggataccggcctgtacttcagcgtcaagaccaacatccggtccagcaccagagactggaaggaccacaagttcaagtggcggaaggaccctcaggacaagaagagaggccggaagaagctgctgtacatcttcaagcagcctttcatgcggcccgtgcagaccacccaggaagaggacggctgctcctgccggttccccgaggaagaagaaggcggctgcgagctgcgcgccaagagaagcggatctggcgtgaagcagaccctgaatttcgacctgctgaagctggctggcgacgtggaatccaacccaggcccttctagaggccatatgaccgagtacaagcccacggtgcgcctcgccacccgcgacgacgtccccagggccgtacgcaccctcgccgccgcgttcgccgactaccccgccacgcgccacaccgtcgatccggaccgccacatcgagcgggtcaccgagctgcaagaactcttcctcacgcgcgtcgggctcgacatcggcaaggtgtgggtcgcggacgacggcgccgcggtggcggtctggaccacgccggagagcgtcgaagcgggggcggtgttcgccgagatcggcccgcgcatggccgagttgagcggttcccggctggccgcgcagcaacagatggaaggcctcctggcgccgcaccggcccaaggagcccgcgtggttcctggccaccgtcggcgtctcgcccgaccaccagggcaagggtctgggcagcgccgtcgtgctccccggagtggaggcggccgagcgcgccggggtgcccgccttcctggagacctccgcgccccgcaacctccccttctacgagcggctcggcttcaccgtcaccgccgacgtcgaggtgcccgaaggaccgcgcacctggtgcatgacccgcaagcccggtgcctga

SEQ ID NO: 32445 - DNA, 3282 bp, synthetic construct
  source 1..3282: mol_type = other DNA
atggccttaccagtgaccgccttgctcctgccgctggccttgctgctccacgccgccaggccgagctacgtgctgacacagcctccatccgtgtctgtggctccaggacagaccgccagaatcacatgcggcggcaacaacatcggcagcaagagcgtgcactggtatcagcagccacctggacaggctccagtggtggtggtgtacgacgacagcgatagacctagcggcatccccgagagattcagcggcagcaattccggcaataccgccacactgaccatcagcagagtggaagctggcgacgaggccgtgtactactgccaagtgtgggacagcagcagcgatcacgtggtgtttggcggcggaacaaagctgacagtgcttctcgaggacctgaagaacgtgttcccacctgaggtggccgtgttcgagcctagcgaggccgagatcagccacacccagaaagccaccctcgtgtgcctggctaccggcttctaccccgaccatgtggaactgtcttggtgggtcaacggcaaagaggtgcacagcggcgtgtctaccgacccccagccactgaaagaacagcccgccctgaacgacagccggtactgcctgagcagcagactgagagtgtccgccaccttctggcagaacccccggaaccacttcagatgccaggtgcagttctacggcctgagcgagaacgacgagtggacccaggacagagccaagcccgtgacccagatcgtgtctgccgaagcctggggcagagccgattgcggatcccagagcttcggcctgctggaccccaagctgtgctacctgctggatggcatcctgttcatctacggcgtgatcctgaccgccctgttcctgagagtgaagttcagcagaagcgccgacgcccctgcctaccagcagggacagaaccaactgtacaacgagctgaacctgggcagacgggaagagtacgacgtgctggacaagcggagaggcagggaccctgagatgggcggaaagccccggagaaagaacccccaggaaggactgtataacgaactccagaaagacaagatggccgaagcctacagcgagatcggcatgaagggcgagcggagaagaggcaagggccacgatggcctgtaccagggcctgagcaccgccaccaaggacacctatgacgccctgcacatgcaggccctgcctccaagaagggccaagcgatctggatctggagcaacaaacttctcactactcaaacaagcaggtgacgtggaggagaatcccgggcctactagtatggactggatttggcgcatccttttccttgtcggcgctgctaccggcgcgcattccttcgaacaactccagctgcaagagtctggccctggcctggtcaagcctagcgaaacactgagcctgacctgtaccgtgtctggcggctctatcagctccggcagctatttctggggctggatcagacaacctcctggcaaaggactggaatggatcggctccatctactacagcggcatcacctactacaaccccagcctgaagtccagagtgaccatctccgtggacaccagcaagaaccagttctccctgaagctgagcagcgtgacagccgccgataccgccgtgtattattgtgccagacatgacggcgctgtggccggcctgtttgattattggggacagggcaccctggtcaccgtgtcatctgctacgcgtatccagaaccctgatcctgccgtgtaccagctgcgggatagcaagagcagcgacaagagcgtgtgtctgttcaccgacttcgacagccagaccaacgtgtcccagagcaaggactccgacgtgtacatcaccgataagaccgtgctggacatgcggagcatggacttcaagagcaactccgccgtggcctggtccaacaagtccgatttcgcctgcgccaacgccttcaacaacagcattatccccgaggacacattcttcccaagccccgagagcagctgcggtaccatcactcaaggtttggcagtgtcaaccatctcatcattctttccacctggctaccaagtgtccttctgcctggtcatggtgctgctgttcgccgtggataccggcctgtacttcagcgtcaagaccaacatccggtccagcaccagagactggaaggaccacaagttcaagtggcggaaggaccctcaggacaagtggcgacgcaagcgcaaagaaaagcaaagcgagacaagcccaaaagaatttctcactatatacgaggacgtgaaagatttgaagacgaggcggaatcatgagcaagagcagacatttcctggcgggggctctactatctactcaatgattcaatcccaaagctccgctccgacttcccaagagcccgcttacactctctactcactgatacagccttcaagaaaatcaggctctcggaaacggaatcattccccatccttcaatagtaccatctatgaagtaatcggtaagagtcaacctaaagctcaaaaccccgctcgcttgagccgcaaggagctggaaaacttcgatgtatatagccgcgccaagagaagcggatctggcgtgaagcagaccctgaatttcgacctgctgaagctggctggcgacgtggaatccaacccaggcccttctagaggccatatgaccgagtacaagcccacggtgcgcctcgccacccgcgacgacgtccccagggccgtacgcaccctcgccgccgcgttcgccgactaccccgccacgcgccacaccgtcgatccggaccgccacatcgagcgggtcaccgagctgcaagaactcttcctcacgcgcgtcgggctcgacatcggcaaggtgtgggtcgcggacgacggcgccgcggtggcggtctggaccacgccggagagcgtcgaagcgggggcggtgttcgccgagatcggcccgcgcatggccgagttgagcggttcccggctggccgcgcagcaacagatggaaggcctcctggcgccgcaccggcccaaggagcccgcgtggttcctggccaccgtcggcgtctcgcccgaccaccagggcaagggtctgggcagcgccgtcgtgctccccggagtggaggcggccgagcgcgccggggtgcccgccttcctggagacctccgcgccccgcaacctccccttctacgagcggctcggcttcaccgtcaccgccgacgtcgaggtgcccgaaggaccgcgcacctggtgcatgacccgcaagcccggtgcctga

SEQ ID NO: 32446 - DNA, 2580 bp, synthetic construct
  source 1..2580: mol_type = other DNA
atggccttaccagtgaccgccttgctcctgccgctggccttgctgctccacgccgccaggccgagctacgtgctgacacagcctccatccgtgtctgtggctccaggacagaccgccagaatcacatgcggcggcaacaacatcggcggcaagagcgtgcactggtatcagcagccacctggacaggctccagtggtggtggtgtacgacgacagcgatagacctagcggcatccccgagagattcagcggcagcaattccggcaataccgccacactgaccatcagcagagtggaagctggcgacgaggccgtgtactactgccaagtgtgggacagcagcagcgatcacgtggtgtttggcggcggaacaaagctgacagtgcttctcgaggccgacgtgtcccccaagcctaccatcttcctgccctctatcgccgagacaaagctccagaaggccggcacctacctgtgcctgctggaaaagttcttcccagatgtgattaagatccactggcaggaaaagaagtccaacaccatcctgggcagccaggaaggcaacaccatgaagaccaacgacacctacatgaagttcagctggctgaccgtgcccgagaagtccctggacaaagaacacagatgcatcgtgcggcacgaaaacaacaagaacggcgtggaccaggaaatcatcttcccacccatcaagaccgatgtgattacaatggaccccaaggacaactgctccaaggacgccaacgataccctgctgctccagctgaccaacaccagcgcctactacatgtacttgttgctgctgctgaagtccgtggtgtacttcgccatcatcacatgctgcctgctgcggagaaccgccttctgctgcaacggcgagaagtctagggccaagcgatctggatctggagcaacaaacttctcactactcaaacaagcaggtgacgtggaggagaatcccgggcctactagtatggactggatttggcgcatccttttccttgtcggcgctgctaccggcgcgcattccttcgaacaactccagctgcaagagtctggccctggcctggtcaagcctagcgaaacactgagcctgacctgtaccgtgtctggcggctctatcagctccagcagctatttctggggctggatcagacaacctcctggcaaaggactggaatggatcggctccatctactacagcggcatcacctactacaaccccagcctgaagtccagagtgaccatctccgtggacaccagcaagaaccagttctccctgaagctgagcagcgtgacagccgccgataccgccgtgtattattgtgccagacatgacggcgctgtggccggcctgtttgattattggggacagggcaccctggtcaccgtgtcatctgctacgcgtagccagcctcacaccaagcccagcgtgttcgtgatgaagaacggcaccaacgtggcctgcctcgtgaaagagttctaccccaaggacatcaggatcaacctggtgtccagcaagaagatcaccgagttcgaccccgccatcgtgatctcccccagcggcaagtacaacgccgtgaagctggggaagtacgaggacagcaacagcgtgacctgctccgtgcagcacgacaacaagaccgtgcacagcaccgactttgaagtgaaaaccgactccaccgaccacgtgaagcccaaagagacagagaacaccaagcagcccagcaagagctgccacaagcccaaggccatcgtgcacaccgagaaagtgaacatgatgagcctgaccgtgatcggcttcagaatcctgctgctgaaagtggccggctttaacctgctgatgaccctgcggctgtggtccagccgcgccaagagaagcggatctggcgtgaagcagaccctgaatttcgacctgctgaagctggctggcgacgtggaatccaacccaggcccttctagaggccatatgaccgagtacaagcccacggtgcgcctcgccacccgcgacgacgtccccagggccgtacgcaccctcgccgccgcgttcgccgactaccccgccacgcgccacaccgtcgatccggaccgccacatcgagcgggtcaccgagctgcaagaactcttcctcacgcgcgtcgggctcgacatcggcaaggtgtgggtcgcggacgacggcgccgcggtggcggtctggaccacgccggagagcgtcgaagcgggggcggtgttcgccgagatcggcccgcgcatggccgagttgagcggttcccggctggccgcgcagcaacagatggaaggcctcctggcgccgcaccggcccaaggagcccgcgtggttcctggccaccgtcggcgtctcgcccgaccaccagggcaagggtctgggcagcgccgtcgtgctccccggagtggaggcggccgagcgcgccggggtgcccgccttcctggagacctccgcgccccgcaacctccccttctacgagcggctcggcttcaccgtcaccgccgacgtcgaggtgcccgaaggaccgcgcacctggtgcatgacccgcaagcccggtgcctga

SEQ ID NO: 32447 - DNA, 1743 bp, synthetic construct
  source 1..1743: mol_type = other DNA
atggccttaccagtgaccgccttgctcctgccgctggccttgctgctccacgccgccaggccggcatgcgaagtgcagctgcttgaaagtggcggcggactgattcagcctggcggatctctgagactgagctgtgccgccagcggcttcaccttttctagccacgccatgacctgggtccgacaggcacctggaaaagggcttgaatgggtgtccgccatcagcggctctggcgattacacacactacgccgacagcgtgaagggcagattcaccatcagcagagacaacagcaagaacaccgtgtacctccagatgaacagcctgagagccgaggacagcgccgtgtattattgcgccaaggatgaggatggcggcagcctgcttggacacagaggacaaggcaccctggtcaccgtttcttccggtaccggcggaggcggatctggcggcggaggtagcggtggcggaggatctgaattcctccagcagacccctgcctacatcaaggtgcagaccaacaagatggtcatgctgagctgcgaggccaaaatcagcctgagcaacatgcggatctactggctgcggcagagacaggcccctagcagcgatagccaccacgaatttctggccctgtgggatagcgccaagggcacaattcacggcgaggaagtggaacaagagaagatcgccgtgttccgggacgccagcagattcatcctgaacctgaccagcgtgaagcccgaggacagcggcatctatttctgcatgatcgtgggcagccccgagctgacatttggcaagggaacacagctgagcgtggtggacttcctgcctactacagcccagcctaccaagaagtctaccctgaagaaaagagtgtgcaggctgcccagacctgagacacagaaaggccctctgtgcagccctatcacactgggattgctggtggctggcgtgctggtgctgctggtttctctgggagttgccatccacctgtgctgtagaagaaggcgggccagactgcggtttatgaagcagttctacaagagagcaaagcgaagtggtagcggagcaaccaacttttctctgctcaagcaagccggtgacgtggaagagaaccctggtcctactagaggccatatgaccgagtacaagcccacggtgcgcctcgccacccgcgacgacgtccccagggccgtacgcaccctcgccgccgcgttcgccgactaccccgccacgcgccacaccgtcgatccggaccgccacatcgagcgggtcaccgagctgcaagaactcttcctcacgcgcgtcgggctcgacatcggcaaggtgtgggtcgcggacgacggcgccgcggtggcggtctggaccacgccggagagcgtcgaagcgggggcggtgttcgccgagatcggcccgcgcatggccgagttgagcggttcccggctggccgcgcagcaacagatggaaggcctcctggcgccgcaccggcccaaggagcccgcgtggttcctggccaccgtcggcgtctcgcccgaccaccagggcaagggtctgggcagcgccgtcgtgctccccggagtggaggcggccgagcgcgccggggtgcccgccttcctggagacctccgcgccccgcaacctccccttctacgagcggctcggcttcaccgtcaccgccgacgtcgaggtgcccgaaggaccgcgcacctggtgcatgacccgcaagcccggtgcctga

SEQ ID NO: 32448 - DNA, 1869 bp, synthetic construct; identical to SEQ ID NO: 32419
  source 1..1869: mol_type = other DNA

SEQ ID NO: 32449 - DNA, 1932 bp, synthetic construct
  source 1..1932: mol_type = other DNA
atggccttaccagtgaccgccttgctcctgccgctggccttgctgctccacgccgccaggccgctcgagatccagaaccctgatcctgccgtgtaccagctgcgggatagcaagagcagcgacaagagcgtgtgtctgttcaccgacttcgacagccagaccaacgtgtcccagagcaaggactccgacgtgtacatcaccgataagtgcgtgctggacatgcggagcatggacttcaagagcaactccgccgtggcctggtccaacaagtccgatttcgcctgcgccaacgccttcaacaacagcattatccccgaggacacattcttcccaagccccgagagcagctgcgacgtgaagctggtggaaaagagcttcgagacagacaccaacctgaacttccagaacctgagcgtgatcggcttcagaatcctgctgctgaaagtggccggctttaacctgctgatgaccctgcggctgtggtccagctctagtcgcgccaagagaagcggatctggcgtgaagcagaccctgaatttcgacctgctgaagctggctggcgacgtggaatccaacccaggccctactagtatggactggatttggcgcatccttttccttgtcggcgctgctaccggcgcgcattccttcgaagacatccagatgacacagagccctagcagcctgtctgccagcgtgggagacagagtgaccatcacatgcaaggccagcgaccacatcaacaactggctggcctggtatcagcagaagcctggacaggcccctaagctgctgatctacggcgctaccacactggaaacaggcgtgcccagcagattttctggcagcggctctggcaccgactacaccctgacaatatccagcctccagcctgaggacttcgccacctactactgtcagcagagctggaacaccccttggacattcggccagggcaccaagctggaaatcaagagaggcggaggcggaagtggaggcggaggatctggcggcggaggctctcaagttcagcttcaacagcctggcgctgagctggtcaaacctggcgcttctgtgaagatgagctgcaaagccagcggctacgccttcagcagctactggatcaactggatgaagcagaaacccggccagggactcgaatggatcggccaaatctatcccggcgacggcgacaccaactacaacggcaagttcaagggcagagccacactgaccgccgatacctctagcagcacagcctacatgcagctgagcagcctgaccagcgaagatagcgccgtgtacttctgtgcccggtccatcacaacagtcgtgggctgcgctatggactattggggccagggaacaagcgtgaccgtgtctagtacgcgtgaggacctgaagaacgtgttcccacctgaggtggccgtgttcgagcctagcgaggccgagatcagccacacccagaaagccaccctcgtgtgcctggctaccggcttctaccccgaccatgtggaactgtcttggtgggtcaacggcaaagaggtgcacagcggcgtgtgtaccgacccccagccactgaaagaacagcccgccctgaacgacagccggtactgcctgagcagcagactgagagtgtccgccaccttctggcagaacccccggaaccacttcagatgccaggtgcagttctacggcctgagcgagaacgacgagtggacccaggacagagccaagcccgtgacccagatcgtgtctgccgaagcctggggcagagccgattgcggctttaccagcgagagctaccagcagggcgtgctgagcgccaccatcctgtacgagatcctgctgggcaaggccaccctgtacgccgtgctggtgtctgccctggtgctgatggctatggtcaagcggaaggacagccggggataa

SEQ ID NO: 32450 - DNA, 2568 bp, synthetic construct
  source 1..2568: mol_type = other DNA
atggccttaccagtgaccgccttgctcctgccgctggccttgctgctccacgccgccaggccggacatccagatgacacagagccctagcagcctgtctgccagcgtgggagacagagtgaccatcacatgcaaggccagcgaccacatcaacaactggctggcctggtatcagcagaagcctggacaggcccctaagctgctgatctacggcgctaccacactggaaacaggcgtgcccagcagattttctggcagcggctctggcaccgactacaccctgacaatatccagcctccagcctgaggacttcgccacctactactgtcagcagagctggaacaccccttggacattcggccagggcaccaagctggaaatcaagagactcgaggacctgaagaacgtgttcccacctgaggtggccgtgttcgagcctagcgaggccgagatcagccacacccagaaagccaccctcgtgtgcctggctaccggcttctaccccgaccatgtggaactgtcttggtgggtcaacggcaaagaggtgcacagcggcgtgtgtaccgacccccagccactgaaagaacagcccgccctgaacgacagccggtactgcctgagcagcagactgagagtgtccgccaccttctggcagaacccccggaaccacttcagatgccaggtgcagttctacggcctgagcgagaacgacgagtggacccaggacagagccaagcccgtgacccagatcgtgtctgccgaagcctggggcagagccgattgcggctttaccagcgagagctaccagcagggcgtgctgagcgccaccatcctgtacgagatcctgctgggcaaggccaccctgtacgccgtgctggtgtctgccctggtgctgatggctatggtcaagcggaaggacagccggggaagggccaagcgatctggatctggagcaacaaacttctcactactcaaacaagcaggtgacgtggaggagaatcccgggcctactagtatggactggatttggcgcatccttttccttgtcggcgctgctaccggcgcgcattccttcgaacaagttcagcttcaacagcctggcgctgagctggtcaaacctggcgcttctgtgaagatgagctgcaaagccagcggctacgccttcagcagctactggatcaactggatgaagcagaaacccggccagggactcgaatggatcggccaaatctatcccggcgacggcgacaccaactacaacggcaagttcaagggcagagccacactgaccgccgatacctctagcagcacagcctacatgcagctgagcagcctgaccagcgaagatagcgccgtgtacttctgtgcccggtccatcacaacagtcgtgggctgcgctatggactattggggccagggaacaagcgtgaccgtgtctagtacgcgtatccagaaccctgatcctgccgtgtaccagctgcgggatagcaagagcagcgacaagagcgtgtgtctgttcaccgacttcgacagccagaccaacgtgtcccagagcaaggactccgacgtgtacatcaccgataagtgcgtgctggacatgcggagcatggacttcaagagcaactccgccgtggcctggtccaacaagtccgatttcgcctgcgccaacgccttcaacaacagcattatccccgaggacacattcttcccaagccccgagagcagctgcgacgtgaagctggtggaaaagagcttcgagacagacaccaacctgaacttccagaacctgagcgtgatcggcttcagaatcctgctgctgaaagtggccggctttaacctgctgatgaccctgcggctgtggtccagccgcgccaagagaagcggatctggcgtgaagcagaccctgaatttcgacctgctgaagctggctggcgacgtggaatccaacccaggcccttctagaggccatatgaccgagtacaagcccacggtgcgcctcgccacccgcgacgacgtccccagggccgtacgcaccctcgccgccgcgttcgccgactaccccgccacgcgccacaccgtcgatccggaccgccacatcgagcgggtcaccgagctgcaagaactcttcctcacgcgcgtcgggctcgacatcggcaaggtgtgggtcgcggacgacggcgccgcggtggcggtctggaccacgccggagagcgtcgaagcgggggcggtgttcgccgagatcggcccgcgcatggccgagttgagcggttcccggctggccgcgcagcaacagatggaaggcctcctggcgccgcaccggcccaaggagcccgcgtggttcctggccaccgtcggcgtctcgcccgaccaccagggcaagggtctgggcagcgccgtcgtgctccccggagtggaggcggccgagcgcgccggggtgcccgccttcctggagacctccgcgccccgcaacctccccttctacgagcggctcggcttcaccgtcaccgccgacgtcgaggtgcccgaaggaccgcgcacctggtgcatgacccgcaagcccggtgcctga

SEQ ID NO: 32451 - DNA, 2568 bp, synthetic construct; identical to SEQ ID NO: 32450
  source 1..2568: mol_type = other DNA

SEQ ID NO: 32452 - DNA, 3012 bp, synthetic construct
  source 1..3012: mol_type = other DNA
atggccttaccagtgaccgccttgctcctgccgctggccttgctgctccacgccgccaggccggacatccagatgacacagactacatcctccctgtctgcctctctgggagacagagtcaccatcagttgcagggcaagtcaggacattagtaagtacctgaactggtatcagcagaaaccagatggaactgttaaactcctgatctaccatacatcaagattacactcaggagtcccatcaaggttcagtggcagtgggtctggaacagattattctctcaccattagcaacctggagcaagaagatattgccacttacttttgccaacagggtaatacgcttccgtacacgttcggaggggggaccaagctggagatcacactcgaggacctgaagaacgtgttcccacctgaggtggccgtgttcgagcctagcgaggccgagatcagccacacccagaaagccaccctcgtgtgcctggctaccggcttctaccccgaccatgtggaactgtcttggtgggtcaacggcaaagaggtgcacagcggcgtgtgtaccgacccccagccactgaaagaacagcccgccctgaacgacagccggtactgcctgagcagcagactgagagtgtccgccaccttctggcagaacccccggaaccacttcagatgccaggtgcagttctacggcctgagcgagaacgacgagtggacccaggacagagccaagcccgtgacccagatcgtgtctgccgaagcctggggcagagccgattgcggctttaccagcgagagctaccagcagggcgtgctgagcgccaccatcctgtacgagatcctgctgggcaaggccaccctgtacgccgtgctggtgtctgccctggtgctgatggctatggtcaagcggaaggacagccggggaagggccaagcgatctggatctggagcaacaaacttctcactactcaaacaagcaggtgacgtggaggagaatcccgggcctactagtatggactggatttggcgcatccttttccttgtcggcgctgctaccggcgcgcattccttcgaagtgaaactgcaggagtcaggacctggcctggtggcgccctcacagagcctgtccgtcacatgcactgtctcaggggtctcattacccgactatggtgtaagctggattcgccagcctccacgaaagggtctggagtggctgggagtaatatggggtagtgaaaccacatactataattcagctctcaaatccagactgaccatcatcaaggacaactccaagagccaagttttcttaaaaatgaacagtctgcaaactgatgacacagccatttactactgtgccaaacattattactacggtggtagctatgctatggactactggggccaaggaacctcagtcaccgtctcctcaacgcgtatccagaaccctgatcctgccgtgtaccagctgcgggatagcaagagcagcgacaagagcgtgtgtctgttcaccgacttcgacagccagaccaacgtgtcccagagcaaggactccgacgtgtacatcaccgataagtgcgtgctggacatgcggagcatggacttcaagagcaactccgccgtggcctggtccaacaagtccgatttcgcctgcgccaacgccttcaacaacagcattatccccgaggacacattcttcccaagccccgagagcagctgcgacgtgaagctggtggaaaagagcttcgagacagacaccaacctgaacttccagaacctgagcgtgatcggcttcagaatcctgctgctgaaagtggccggctttaacctgctgatgaccctgcggctgtggtccagctctagtatggctgctggtggacctggtgctggatctgctgcccctgtgtctagcacatctagcctgcctctggccgctctgaacatgagagtcagaagaaggctgagcctgttcctgaacgtgcggactcaggtggccgctgattggacagctctggccgaggaaatggacttcgagtacctggaaatccggcagctggaaacccaggccgatcctacaggcagactgctggatgcttggcaaggcagacctggcgcttctgtggggagactgcttgagctgctgacaaagctgggcagagatgacgtgctgctggaactgggacccagcatcgaggaagattgccagaagtacatcctgaagcagcagcaagaggaagccgagaagcctctgcaagtggccgccgtggatagcagcgttccaagaacagctgagctggccggcatcaccacactggatgatcctcttggaagagcaaagcgaagtggtagcggagcaaccaacttttctctgctcaagcaagccggtgacgtggaagagaaccctggtcctcatatgaccgagcacaagcccacggtgcgcctcgccacccgcgacgacgtccccagggccgtacgcaccctcgccgccgcgttcgccgactaccccgccacgcgccacaccgtcgatccggaccgccacatcgagcgggtcaccgagctgcaagaactcttcctcacgcgcgtcgggctcgacatcggcaaggtgtgggtcgcggacgacggcgccgcggtggcggtctggaccacgccggagagcgtcgaagcgggggcggtgttcgccgagatcggcccgcgcatggccgagttgagcggttcccggctggccgcgcagcaacagatggaaggcctcctggcgccgcaccggcccaaggagcccgcgtggttcctggccaccgtcggcgtctcgcccgaccaccagggcaagggtctgggcagcgccgtcgtgctccccggagtggaggcggccgagcgcgccggggtgcccgccttcctggagacctccgcgccccgcaacctccccttctacgagcggctcggcttcaccgtcaccgccgacgtcgaggtgcccgaaggaccgcgcacctggtgcatgacccgcaagcccggtgcctga

SEQ ID NO: 32453 - DNA, 2568 bp, synthetic construct
  source 1..2568: mol_type = other DNA
atggccttaccagtgaccgccttgctcctgccgctggccttgctgctccacgccgccaggccggacatccagatgacacagagccctagcagcctgtctgccagcgtgggagacagagtgaccatcacatgcaaggccagcgaccacatcaacaactggctggcctggtatcagcagaagcctggacaggcccctaagctgctgatctacggcgctaccacactggaaacaggcgtgcccagcagattttctggcagcggctctggcaccgactacaccctgacaatatccagcctccagcctgaggacttcgccacctactactgtcagcagagctggaacaccccttggacattcggccagggcaccaagctggaaatcaagagactcgaggacctgaagaacgtgttcccacctgaggtggccgtgttcgagcctagcgaggccgagatcagccacacccagaaagccaccctcgtgtgcctggctaccggcttctaccccgaccatgtggaactgtcttggtgggtcaacggcaaagaggtgcacagcggcgtgtgtaccgacccccagccactgaaagaacagcccgccctgaacgacagccggtactgcctgagcagcagactgagagtgtccgccaccttctggcagaacccccggaaccacttcagatgccaggtgcagttctacggcctgagcgagaacgacgagtggacccaggacagagccaagcccgtgacccagatcgtgtctgccgaagcctggggcagagccgattgcggctttaccagcgagagctaccagcagggcgtgctgagcgccaccatcctgtacgagatcctgctgggcaaggccaccctgtacgccgtgctggtgtctgccctggtgctgatggctatggtcaagcggaaggacagccggggaagggccaagcgatctggatctggagcaacaaacttctcactactcaaacaagcaggtgacgtggaggagaatcccgggcctactagtatggactggatttggcgcatccttttccttgtcggcgctgctaccggcgcgcattccttcgaacaagttcagcttcaacagcctggcgctgagctggtcaaacctggcgcttctgtgaagatgagctgcaaagccagcggctacgccttcagcagctcttggatcaactggatgaagcagaaacccggccagggactcgaatggatcggccaaatctatcccggcgacggcgacaccaactacaacggcaagttcaagggcagagccacactgaccgccgatacctctagcagcacagcctacatgcagctgagcagcctgaccagcgaagatagcgccgtgtacttctgtgcccggtccatcacaacagtcgtgggctgcgctatggactattggggccagggaacaagcgtgaccgtgtctagtacgcgtatccagaaccctgatcctgccgtgtaccagctgcgggatagcaagagcagcgacaagagcgtgtgtctgttcaccgacttcgacagccagaccaacgtgtcccagagcaaggactccgacgtgtacatcaccgataagtgcgtgctggacatgcggagcatggacttcaagagcaactccgccgtggcctggtccaacaagtccgatttcgcctgcgccaacgccttcaacaacagcattatccccgaggacacattcttcccaagccccgagagcagctgcgacgtgaagctggtggaaaagagcttcgagacagacaccaacctgaacttccagaacctgagcgtgatcggcttcagaatcctgctgctgaaagtggccggctttaacctgctgatgaccctgcggctgtggtccagccgcgccaagagaagcggatctggcgtgaagcagaccctgaatttcgacctgctgaagctggctggcgacgtggaatccaacccaggcccttctagaggccatatgaccgagtacaagcccacggtgcgcctcgccacccgcgacgacgtccccagggccgtacgcaccctcgccgccgcgttcgccgactaccccgccacgcgccacaccgtcgatccggaccgccacatcgagcgggtcaccgagctgcaagaactcttcctcacgcgcgtcgggctcgacatcggcaaggtgtgggtcgcggacgacggcgccgcggtggcggtctggaccacgccggagagcgtcgaagcgggggcggtgttcgccgagatcggcccgcgcatggccgagttgagcggttcccggctggccgcgcagcaacagatggaaggcctcctggcgccgcaccggcccaaggagcccgcgtggttcctggccaccgtcggcgtctcgcccgaccaccagggcaagggtctgggcagcgccgtcgtgctccccggagtggaggcggccgagcgcgccggggtgcccgccttcctggagacctccgcgccccgcaacctccccttctacgagcggctcggcttcaccgtcaccgccgacgtcgaggtgcccgaaggaccgcgcacctggtgcatgacccgcaagcccggtgcctga

SEQ ID NO: 32454 - DNA, 2568 bp, synthetic construct
  source 1..2568: mol_type = other DNA
atggccttaccagtgaccgccttgctcctgccgctggccttgctgctccacgccgccaggccggacatccagatgacacagagccctagcagcctgtctgccagcgtgggagacagagtgaccatcacatgcaaggccagcgaccacatcaacaactggctggcctggtatcagcagaagcctggacaggcccctaagctgctgatctacggcgctaccacactggaaacaggcgtgcccagcagattttctggcagcggctctggcaccgactacaccctgacaatatccagcctccagcctgaggacttcgccacctactactgtcagcagagctggaacaccccttggacattcggccagggcaccaagctggaaatcaagagactcgaggacctgaagaacgtgttcccacctgaggtggccgtgttcgagcctagcgaggccgagatcagccacacccagaaagccaccctcgtgtgcctggctaccggcttctaccccgaccatgtggaactgtcttggtgggtcaacggcaaagaggtgcacagcggcgtgtgtaccgacccccagccactgaaagaacagcccgccctgaacgacagccggtactgcctgagcagcagactgagagtgtccgccaccttctggcagaacccccggaaccacttcagatgccaggtgcagttctacggcctgagcgagaacgacgagtggacccaggacagagccaagcccgtgacccagatcgtgtctgccgaagcctggggcagagccgattgcggctttaccagcgagagctaccagcagggcgtgctgagcgccaccatcctgtacgagatcctgctgggcaaggccaccctgtacgccgtgctggtgtctgccctggtgctgatggctatggtcaagcggaaggacagccggggaagggccaagcgatctggatctggagcaacaaacttctcactactcaaacaagcaggtgacgtggaggagaatcccgggcctactagtatggactggatttggcgcatccttttccttgtcggcgctgctaccggcgcgcattccttcgaacaagttcagcttcaacagcctggcgctgagctggtcaaacctggcgcttctgtgaagatgagctgcaaagccagcggctacgccttcaacagctactggatcaactggatgaagcagaaacccggccagggactcgaatggatcggccaaatctatcccggcgacggcgacaccaactacaacggcaagttcaagggcagagccacactgaccgccgatacctctagcagcacagcctacatgcagctgagcagcctgaccagcgaagatagcgccgtgtacttctgtgcccggtccatcacaacagtcgtgggctgcgctatggactattggggccagggaacaagcgtgaccgtgtctagtacgcgtatccagaaccctgatcctgccgtgtaccagctgcgggatagcaagagcagcgacaagagcgtgtgtctgttcaccgacttcgacagccagaccaacgtgtcccagagcaaggactccgacgtgtacatcaccgataagtgcgtgctggacatgcggagcatggacttcaagagcaactccgccgtggcctggtccaacaagtccgatttcgcctgcgccaacgccttcaacaacagcattatccccgaggacacattcttcccaagccccgagagcagctgcgacgtgaagctggtggaaaagagcttcgagacagacaccaacctgaacttccagaacctgagcgtgatcggcttcagaatcctgctgctgaaagtggccggctttaacctgctgatgaccctgcggctgtggtccagccgcgccaagagaagcggatctggcgtgaagcagaccctgaatttcgacctgctgaagctggctggcgacgtggaatccaacccaggcccttctagaggccatatgaccgagtacaagcccacggtgcgcctcgccacccgcgacgacgtccccagggccgtacgcaccctcgccgccgcgttcgccgactaccccgccacgcgccacaccgtcgatccggaccgccacatcgagcgggtcaccgagctgcaagaactcttcctcacgcgcgtcgggctcgacatcggcaaggtgtgggtcgcggacgacggcgccgcggtggcggtctggaccacgccggagagcgtcgaagcgggggcggtgttcgccgagatcggcccgcgcatggccgagttgagcggttcccggctggccgcgcagcaacagatggaaggcctcctggcgccgcaccggcccaaggagcccgcgtggttcctggccaccgtcggcgtctcgcccgaccaccagggcaagggtctgggcagcgccgtcgtgctccccggagtggaggcggccgagcgcgccggggtgcccgccttcctggagacctccgcgccccgcaacctccccttctacgagcggctcggcttcaccgtcaccgccgacgtcgaggtgcccgaaggaccgcgcacctggtgcatgacccgcaagcccggtgcctga

SEQ ID NO: 32455 - DNA, 2568 bp, synthetic construct
  source 1..2568: mol_type = other DNA
atggccttaccagtgaccgccttgctcctgccgctggccttgctgctccacgccgccaggccggacatccagatgacacagagccctagcagcctgtctgccagcgtgggagacagagtgaccatcacatgcaaggccagcgaccacatcaacaactggctggcctggtatcagcagaagcctggacaggcccctaagctgctgatctacggcgctaccacactggaaacaggcgtgcccagcagattttctggcagcggctctggcaccgactacaccctgacaatatccagcctccagcctgaggacttcgccacctactactgtcagcagagctggaacaccccttggacattcggccagggcaccaagctggaaatcaagagactcgaggacctgaagaacgtgttcccacctgaggtggccgtgttcgagcctagcgaggccgagatcagccacacccagaaagccaccctcgtgtgcctggctaccggcttctaccccgaccatgtggaactgtcttggtgggtcaacggcaaagaggtgcacagcggcgtgtgtaccgacccccagccactgaaagaacagcccgccctgaacgacagccggtactgcctgagcagcagactgagagtgtccgccaccttctggcagaacccccggaaccacttcagatgccaggtgcagttctacggcctgagcgagaacgacgagtggacccaggacagagccaagcccgtgacccagatcgtgtctgccgaagcctggggcagagccgattgcggctttaccagcgagagctaccagcagggcgtgctgagcgccaccatcctgtacgagatcctgctgggcaaggccaccctgtacgccgtgctggtgtctgccctggtgctgatggctatggtcaagcggaaggacagccggggaagggccaagcgatctggatctggagcaacaaacttctcactactcaaacaagcaggtgacgtggaggagaatcccgggcctactagtatggactggatttggcgcatccttttccttgtcggcgctgctaccggcgcgcattccttcgaacaagttcagcttcaacagcctggcgctgagctggtcaaacctggcgcttctgtgaagatgagctgcaaagccagcggctacaccttcagcagctactggatcaactggatgaagcagaaacccggccagggactcgaatggatcggccaaatctatcccggcgacggcgacaccaactacaacggcaagttcaagggcagagccacactgaccgccgatacctctagcagcacagcctacatgcagctgagcagcctgaccagcgaagatagcgccgtgtacttctgtgcccggtccatcacaacagtcgtgggctgcgctatggactattggggccagggaacaagcgtgaccgtgtctagtacgcgtatccagaaccctgatcctgccgtgtaccagctgcgggatagcaagagcagcgacaagagcgtgtgtctgttcaccgacttcgacagccagaccaacgtgtcccagagcaaggactccgacgtgtacatcaccgataagtgcgtgctggacatgcggagcatggacttcaagagcaactccgccgtggcctggtccaacaagtccgatttcgcctgcgccaacgccttcaacaacagcattatccccgaggacacattcttcccaagccccgagagcagctgcgacgtgaagctggtggaaaagagcttcgagacagacaccaacctgaacttccagaacctgagcgtgatcggcttcagaatcctgctgctgaaagtggccggctttaacctgctgatgaccctgcggctgtggtccagccgcgccaagagaagcggatctggcgtgaagcagaccctgaatttcgacctgctgaagctggctggcgacgtggaatccaacccaggcccttctagaggccatatgaccgagtacaagcccacggtgcgcctcgccacccgcgacgacgtccccagggccgtacgcaccctcgccgccgcgttcgccgactaccccgccacgcgccacaccgtcgatccggaccgccacatcgagcgggtcaccgagctgcaagaactcttcctcacgcgcgtcgggctcgacatcggcaaggtgtgggtcgcggacgacggcgccgcggtggcggtctggaccacgccggagagcgtcgaagcgggggcggtgttcgccgagatcggcccgcgcatggccgagttgagcggttcccggctggccgcgcagcaacagatggaaggcctcctggcgccgcaccggcccaaggagcccgcgtggttcctggccaccgtcggcgtctcgcccgaccaccagggcaagggtctgggcagcgccgtcgtgctccccggagtggaggcggccgagcgcgccggggtgcccgccttcctggagacctccgcgccccgcaacctccccttctacgagcggctcggcttcaccgtcaccgccgacgtcgaggtgcccgaaggaccgcgcacctggtgcatgacccgcaagcccggtgcctga

SEQ ID NO: 32456 - DNA, 2568 bp, synthetic construct; identical to SEQ ID NO: 32453
  source 1..2568: mol_type = other DNA

SEQ ID NO: 32457 - DNA, 2568 bp, synthetic construct; identical to SEQ ID NO: 32454
  source 1..2568: mol_type = other DNA

SEQ ID NO: 32458 - DNA, 1869 bp, synthetic construct
  source 1..1869: mol_type = other DNA
atggccttaccagtgaccgccttgctcctgccgctggccttgctgctccacgccgccaggccggacatccagatgacacagagccctagcagcctgtctgccagcgtgggagacagagtgaccatcacatgcaaggccagcgaccacatcaacaactggctggcctggtatcagcagaagcctggacaggcccctaagctgctgatctacggcgctaccacactggaaacaggcgtgcccagcagattttctggcagcggctctggcaccgactacaccctgacaatatccagcctccagcctgaggacttcgccacctactactgtcagcagagctggaacaccccttggacattcggccagggcaccaagctggaaatcaagagactcgaggacctgaagaacgtgttcccacctgaggtggccgtgttcgagcctagcgaggccgagatcagccacacccagaaagccaccctcgtgtgcctggctaccggcttctaccccgaccatgtggaactgtcttggtgggtcaacggcaaagaggtgcacagcggcgtgtgtaccgacccccagccactgaaagaacagcccgccctgaacgacagccggtactgcctgagcagcagactgagagtgtccgccaccttctggcagaacccccggaaccacttcagatgccaggtgcagttctacggcctgagcgagaacgacgagtggacccaggacagagccaagcccgtgacccagatcgtgtctgccgaagcctggggcagagccgattgcggctttaccagcgagagctaccagcagggcgtgctgagcgccaccatcctgtacgagatcctgctgggcaaggccaccctgtacgccgtgctggtgtctgccctggtgctgatggctatggtcaagcggaaggacagccggggaagggccaagcgatctggatctggagcaacaaacttctcactactcaaacaagcaggtgacgtggaggagaatcccgggcctactagtatggactggatttggcgcatccttttccttgtcggcgctgctaccggcgcgcattccttcgaacaagttcagcttcaacagcctggcgctgagctggtcaaacctggcgcttctgtgaagatgagctgcaaagccagcggctacaccttcagcagctactggatcaactggatgaagcagaaacccggccagggactcgaatggatcggccaaatctatcccggcgacggcgacaccaactacaacggcaagttcaagggcagagccacactgaccgccgatacctctagcagcacagcctacatgcagctgagcagcctgaccagcgaagatagcgccgtgtacttctgtgcccggtccatcacaacagtcgtgggctgcgctatggactattggggccagggaacaagcgtgaccgtgtctagtacgcgtatccagaaccctgatcctgccgtgtaccagctgcgggatagcaagagcagcgacaagagcgtgtgtctgttcaccgacttcgacagccagaccaacgtgtcccagagcaaggactccgacgtgtacatcaccgataagtgcgtgctggacatgcggagcatggacttcaagagcaactccgccgtggcctggtccaacaagtccgatttcgcctgcgccaacgccttcaacaacagcattatccccgaggacacattcttcccaagccccgagagcagctgcgacgtgaagctggtggaaaagagcttcgagacagacaccaacctgaacttccagaacctgagcgtgatcggcttcagaatcctgctgctgaaagtggccggctttaacctgctgatgaccctgcggctgtggtccagctaa

SEQ ID NO: 32459 - DNA, 1869 bp, synthetic construct
  source 1..1869: mol_type = other DNA
atggccttaccagtgaccgccttgctcctgccgctggccttgctgctccacgccgccaggccggacatccagatgacacagagccctagcagcctgtctgccagcgtgggagacagagtgaccatcacatgcaaggccagcgaccacatcaacaactggctggcctggtatcagcagaagcctggacaggcccctaagctgctgatctacggcgctaccacactggaaacaggcgtgcccagcagattttctggcagcggctctggcaccgactacaccctgacaatatccagcctccagcctgaggacttcgccacctactactgtcagcagagctggaacaccccttggacattcggccagggcaccaagctggaaatcaagagactcgaggacctgaagaacgtgttcccacctgaggtggccgtgttcgagcctagcgaggccgagatcagccacacccagaaagccaccctcgtgtgcctggctaccggcttctaccccgaccatgtggaactgtcttggtgggtcaacggcaaagaggtgcacagcggcgtgtgtaccgacccccagccactgaaagaacagcccgccctgaacgacagccggtactgcctgagcagcagactgagagtgtccgccaccttctggcagaacccccggaaccacttcagatgccaggtgcagttctacggcctgagcgagaacgacgagtggacccaggacagagccaagcccgtgacccagatcgtgtctgccgaagcctggggcagagccgattgcggctttaccagcgagagctaccagcagggcgtgctgagcgccaccatcctgtacgagatcctgctgggcaaggccaccctgtacgccgtgctggtgtctgccctggtgctgatggctatggtcaagcggaaggacagccggggaagggccaagcgatctggatctggagcaacaaacttctcactactcaaacaagcaggtgacgtggaggagaatcccgggcctactagtatggactggatttggcgcatccttttccttgtcggcgctgctaccggcgcgcattccttcgaacaagttcagcttcaacagcctggcgctgagctggtcaaacctggcgcttctgtgaagatgagctgcaaagccagcggctacgccttcagcagctcttggatcaactggatgaagcagaaacccggccagggactcgaatggatcggccaaatctatcccggcgacggcgacaccaactacaacggcaagttcaagggcagagccacactgaccgccgatacctctagcagcacagcctacatgcagctgagcagcctgaccagcgaagatagcgccgtgtacttctgtgcccggtccatcacaacagtcgtgggctgcgctatggactattggggccagggaacaagcgtgaccgtgtctagtacgcgtatccagaaccctgatcctgccgtgtaccagctgcgggatagcaagagcagcgacaagagcgtgtgtctgttcaccgacttcgacagccagaccaacgtgtcccagagcaaggactccgacgtgtacatcaccgataagtgcgtgctggacatgcggagcatggacttcaagagcaactccgccgtggcctggtccaacaagtccgatttcgcctgcgccaacgccttcaacaacagcattatccccgaggacacattcttcccaagccccgagagcagctgcgacgtgaagctggtggaaaagagcttcgagacagacaccaacctgaacttccagaacctgagcgtgatcggcttcagaatcctgctgctgaaagtggccggctttaacctgctgatgaccctgcggctgtggtccagctaa

SEQ ID NO: 32460 - DNA, 1869 bp, synthetic construct
  source 1..1869: mol_type = other DNA
atggccttaccagtgaccgccttgctcctgccgctggccttgctgctccacgccgccaggccggacatccagatgacacagagccctagcagcctgtctgccagcgtgggagacagagtgaccatcacatgcaaggccagcgaccacatcaacaactggctggcctggtatcagcagaagcctggacaggcccctaagctgctgatctacggcgctaccacactggaaacaggcgtgcccagcagattttctggcagcggctctggcaccgactacaccctgacaatatccagcctccagcctgaggacttcgccacctactactgtcagcagagctggaacaccccttggacattcggccagggcaccaagctggaaatcaagagactcgaggacctgaagaacgtgttcccacctgaggtggccgtgttcgagcctagcgaggccgagatcagccacacccagaaagccaccctcgtgtgcctggctaccggcttctaccccgaccatgtggaactgtcttggtgggtcaacggcaaagaggtgcacagcggcgtgtgtaccgacccccagccactgaaagaacagcccgccctgaacgacagccggtactgcctgagcagcagactgagagtgtccgccaccttctggcagaacccccggaaccacttcagatgccaggtgcagttctacggcctgagcgagaacgacgagtggacccaggacagagccaagcccgtgacccagatcgtgtctgccgaagcctggggcagagccgattgcggctttaccagcgagagctaccagcagggcgtgctgagcgccaccatcctgtacgagatcctgctgggcaaggccaccctgtacgccgtgctggtgtctgccctggtgctgatggctatggtcaagcggaaggacagccggggaagggccaagcgatctggatctggagcaacaaacttctcactactcaaacaagcaggtgacgtggaggagaatcccgggcctactagtatggactggatttggcgcatccttttccttgtcggcgctgctaccggcgcgcattccttcgaacaagttcagcttcaacagcctggcgctgagctggtcaaacctggcgcttctgtgaagatgagctgcaaagccagcggctacgccttcaacagctactggatcaactggatgaagcagaaacccggccagggactcgaatggatcggccaaatctatcccggcgacggcgacaccaactacaacggcaagttcaagggcagagccacactgaccgccgatacctctagcagcacagcctacatgcagctgagcagcctgaccagcgaagatagcgccgtgtacttctgtgcccggtccatcacaacagtcgtgggctgcgctatggactattggggccagggaacaagcgtgaccgtgtctagtacgcgtatccagaaccctgatcctgccgtgtaccagctgcgggatagcaagagcagcgacaagagcgtgtgtctgttcaccgacttcgacagccagaccaacgtgtcccagagcaaggactccgacgtgtacatcaccgataagtgcgtgctggacatgcggagcatggacttcaagagcaactccgccgtggcctggtccaacaagtccgatttcgcctgcgccaacgccttcaacaacagcattatccccgaggacacattcttcccaagccccgagagcagctgcgacgtgaagctggtggaaaagagcttcgagacagacaccaacctgaacttccagaacctgagcgtgatcggcttcagaatcctgctgctgaaagtggccggctttaacctgctgatgaccctgcggctgtggtccagctaa

SEQ ID NO: 32461 - DNA, 2592 bp, synthetic construct
  source 1..2592: mol_type = other DNA
atggccttaccagtgaccgccttgctcctgccgctggccttgctgctccacgccgccaggccggacatccagatgacacagagccctagcagcctgtctgccagcgtgggagacagagtgaccatcacatgcaaggccagcgaccacatcaacaactggctggcctggtatcagcagaagcctggacaggcccctaagctgctgatctacggcgctaccacactggaaacaggcgtgcccagcagattttctggcagcggctctggcaccgactacaccctgacaatatccagcctccagcctgaggacttcgccacctactactgtcagcagagctggaacaccccttggacattcggccagggcaccaagctggaaatcaagagactcgaggacaagcagctggacgccgacgtgtcccccaagcctaccatcttcctgccctctatcgccgagacaaagctccagaaggccggcacctacctgtgcctgctggaaaagttcttcccagatgtgattaagatccactggcaggaaaagaagtccaacaccatcctgggcagccaggaaggcaacaccatgaagaccaacgacacctacatgaagttcagctggctgaccgtgcccgagaagtccctggacaaagaacacagatgcatcgtgcggcacgaaaacaacaagaacggcgtggaccaggaaatcatcttcccagaagtgaaaaccgactccaccgaccacgtgaagcccaaagagacagagaacaccaagcagcccagcaagagctgccacaagcccaaggccatcgtgcacaccgagaaagtgaacatgatgagcctgaccgtgctgggcctgcggatgctgttcgccaaaaccgtggccgtgaacttcctgctgaccgccaagctgttcttcctccgcgccaagagaagcggatctggcgtgaagcagaccctgaatttcgacctgctgaagctggctggcgacgtggaatccaacccaggccctactagtatggactggatttggcgcatccttttccttgtcggcgctgctaccggcgcgcattccttcgaacaagttcagcttcaacagcctggcgctgagctggtcaaacctggcgcttctgtgaagatgagctgcaaagccagcggctacgccttcagcagctactggatcaactggatgaagcagaaacccggccagggactcgaatggatcggccaaatctatcccggcgacggcgacaccaactacaacggcaagttcaagggcagagccacactgaccgccgatacctctagcagcacagcctacatgcagctgagcagcctgaccagcgaagatagcgccgtgtacttctgtgcccggtccatcacaacagtcgtgggctgcgctatggactattggggccagggaacaagcgtgaccgtgtctagtacgcgtagccagcctcacaccaagcccagcgtgttcgtgatgaagaacggcaccaacgtggcctgcctcgtgaaagagttctaccccaaggacatcaggatcaacctggtgtccagcaagaagatcaccgagttcgaccccgccatcgtgatctcccccagcggcaagtacaacgccgtgaagctggggaagtacgaggacagcaacagcgtgacctgctccgtgcagcacgacaacaagaccgtgcacagcaccgactttcccatcaagaccgatgtgattacaatggaccccaaggacaactgctccaaggacgccaacgataccctgctgctccagctgaccaacaccagcgcctactacatgtacttgttgctgctgctgaagtccgtggtgtacttcgccatcatcacatgctgcctgctgcggagaaccgccttctgctgcaacggcgagaagtctagggccaagcgatctggatctggagcaacaaacttctcactactcaaacaagcaggtgacgtggaggagaatcccgggccttctagaggccatatgaccgagtacaagcccacggtgcgcctcgccacccgcgacgacgtccccagggccgtacgcaccctcgccgccgcgttcgccgactaccccgccacgcgccacaccgtcgatccggaccgccacatcgagcgggtcaccgagctgcaagaactcttcctcacgcgcgtcgggctcgacatcggcaaggtgtgggtcgcggacgacggcgccgcggtggcggtctggaccacgccggagagcgtcgaagcgggggcggtgttcgccgagatcggcccgcgcatggccgagttgagcggttcccggctggccgcgcagcaacagatggaaggcctcctggcgccgcaccggcccaaggagcccgcgtggttcctggccaccgtcggcgtctcgcccgaccaccagggcaagggtctgggcagcgccgtcgtgctccccggagtggaggcggccgagcgcgccggggtgcccgccttcctggagacctccgcgccccgcaacctccccttctacgagcggctcggcttcaccgtcaccgccgacgtcgaggtgcccgaaggaccgcgcacctggtgcatgacccgcaagcccggtgcctga

SEQ ID NO: 32462 - DNA, 2577 bp, synthetic construct
  source 1..2577: mol_type = other DNA
atggccttaccagtgaccgccttgctcctgccgctggccttgctgctccacgccgccaggccggacatccagatgacacagagccctagcagcctgtctgccagcgtgggagacagagtgaccatcacatgcaaggccagcgaccacatcaacaactggctggcctggtatcagcagaagcctggacaggcccctaagctgctgatctacggcgctaccacactggaaacaggcgtgcccagcagattttctggcagcggctctggcaccgactacaccctgacaatatccagcctccagcctgaggacttcgccacctactactgtcagcagagctggaacaccccttggacattcggccagggcaccaagctggaaatcaagagactcgaggccgacgtgtcccccaagcctaccatcttcctgccctctatcgccgagacaaagctccagaaggccggcacctacctgtgcctgctggaaaagttcttcccagatgtgattaagatccactggcaggaaaagaagtccaacaccatcctgggcagccaggaaggcaacaccatgaagaccaacgacacctacatgaagttcagctggctgaccgtgcccgagaagtccctggacaaagaacacagatgcatcgtgcggcacgaaaacaacaagaacggcgtggaccaggaaatcatcttcccagaagtgaaaaccgactccaccgaccacgtgaagcccaaagagacagagaacaccaagcagcccagcaagagctgccacaagcccaaggccatcgtgcacaccgagaaagtgaacatgatgagcctgaccgtgctgggcctgcggatgctgttcgccaaaaccgtggccgtgaacttcctgctgaccgccaagctgttcttcctccgcgccaagagaagcggatctggcgtgaagcagaccctgaatttcgacctgctgaagctggctggcgacgtggaatccaacccaggccctactagtatggactggatttggcgcatccttttccttgtcggcgctgctaccggcgcgcattccttcgaacaagttcagcttcaacagcctggcgctgagctggtcaaacctggcgcttctgtgaagatgagctgcaaagccagcggctacgccttcagcagctactggatcaactggatgaagcagaaacccggccagggactcgaatggatcggccaaatctatcccggcgacggcgacaccaactacaacggcaagttcaagggcagagccacactgaccgccgatacctctagcagcacagcctacatgcagctgagcagcctgaccagcgaagatagcgccgtgtacttctgtgcccggtccatcacaacagtcgtgggctgcgctatggactattggggccagggaacaagcgtgaccgtgtctagtacgcgtagccagcctcacaccaagcccagcgtgttcgtgatgaagaacggcaccaacgtggcctgcctcgtgaaagagttctaccccaaggacatcaggatcaacctggtgtccagcaagaagatcaccgagttcgaccccgccatcgtgatctcccccagcggcaagtacaacgccgtgaagctggggaagtacgaggacagcaacagcgtgacctgctccgtgcagcacgacaacaagaccgtgcacagcaccgactttcccatcaagaccgatgtgattacaatggaccccaaggacaactgctccaaggacgccaacgataccctgctgctccagctgaccaacaccagcgcctactacatgtacttgttgctgctgctgaagtccgtggtgtacttcgccatcatcacatgctgcctgctgcggagaaccgccttctgctgcaacggcgagaagtctagggccaagcgatctggatctggagcaacaaacttctcactactcaaacaagcaggtgacgtggaggagaatcccgggccttctagaggccatatgaccgagtacaagcccacggtgcgcctcgccacccgcgacgacgtccccagggccgtacgcaccctcgccgccgcgttcgccgactaccccgccacgcgccacaccgtcgatccggaccgccacatcgagcgggtcaccgagctgcaagaactcttcctcacgcgcgtcgggctcgacatcggcaaggtgtgggtcgcggacgacggcgccgcggtggcggtctggaccacgccggagagcgtcgaagcgggggcggtgttcgccgagatcggcccgcgcatggccgagttgagcggttcccggctggccgcgcagcaacagatggaaggcctcctggcgccgcaccggcccaaggagcccgcgtggttcctggccaccgtcggcgtctcgcccgaccaccagggcaagggtctgggcagcgccgtcgtgctccccggagtggaggcggccgagcgcgccggggtgcccgccttcctggagacctccgcgccccgcaacctccccttctacgagcggctcggcttcaccgtcaccgccgacgtcgaggtgcccgaaggaccgcgcacctggtgcatgacccgcaagcccggtgcctga

SEQ ID NO: 32463 - DNA, 2010 bp, synthetic construct
  source 1..2010: mol_type = other DNA
atggccttaccagtgaccgccttgctcctgccgctggccttgctgctccacgccgccaggccggacatccagatgacacagagccctagcagcctgtctgccagcgtgggagacagagtgaccatcacatgcaaggccagcgaccacatcaacaactggctggcctggtatcagcagaagcctggacaggcccctaagctgctgatctacggcgctaccacactggaaacaggcgtgcccagcagattttctggcagcggctctggcaccgactacaccctgacaatatccagcctccagcctgaggacttcgccacctactactgtcagcagagctggaacaccccttggacattcggccagggcaccaagctggaaatcaagagactcgagggacagcctaaggccaatcctaccgtgacactgttccctccaagcagcgaagaactccaggccaacaaggccacacttgtgtgcctgatctccgacttctaccctggggctgtgacagtggcttggaaggccgatggatctcctgtgaaagccggcgtggaaaccaccaagccatccaagcagagcaacaacaaatacgccgccagctcctacctgagcctgacacctgagcagtggaagtcccacagatcctacagctgccaagtgacccacgaaggcagcaccgtggaaaagacagtggcccctacagagtgcagcggatcctccaaggacgccaacgataccctgctgctccagctgaccaacaccagcgcctactacatgtacttgttgctgctgctgaagtccgtggtgtacttcgccatcatcacatgctgcctgctgcggagaaccgccttctgctgcaacggcgagaagtctagggccaagcgatctggatctggagcaacaaacttctcactactcaaacaagcaggtgacgtggaggagaatcccgggcctactagtatggactggatttggcgcatccttttccttgtcggcgctgctaccggcgcgcattccttcgaacaagttcagcttcaacagcctggcgctgagctggtcaaacctggcgcttctgtgaagatgagctgcaaagccagcggctacgccttcagcagctactggatcaactggatgaagcagaaacccggccagggactcgaatggatcggccaaatctatcccggcgacggcgacaccaactacaacggcaagttcaagggcagagccacactgaccgccgatacctctagcagcacagcctacatgcagctgagcagcctgaccagcgaagatagcgccgtgtacttctgtgcccggtccatcacaacagtcgtgggctgcgctatggactattggggccagggaacaagcgtgaccgtgtctagtacgcgtgcgtccactaagggtccgtcagtcttcccgctggcgccctgttcccgcagcacgagtgaatctaccgccgcccttgggtgcttggtaaaagactattttcctgagcccgttacagtatcatggaacagcggggctctgactagcggggtgcatacgttccctgcggttctgcaatctagcggactgtattctctctccagtgttgtgaccgtgccaagctccagcctcggtactaaaacttatacatgtaatgtggatcataaaccttcaaataccaaggttgacaaaagggtagagagtaagtacggtggtaccgaagtgaaaaccgactccaccgaccacgtgaagcccaaagagacagagaacaccaagcagcccagcaagagctgccacaagcccaaggccatcgtgcacaccgagaaagtgaacatgatgagcctgaccgtgctgggcctgcggatgctgttcgccaaaaccgtggccgtgaacttcctgctgaccgccaagctgttcttcctccgcgccaagagaagcggatctggcgtgaagcagaccctgaatttcgacctgctgaagctggctggcgacgtggaatccaacccaggcccttctagataa

SEQ ID NO: 32464 - DNA, 3225 bp, synthetic construct
  source 1..3225: mol_type = other DNA
atggccttaccagtgaccgccttgctcctgccgctggccttgctgctccacgccgccaggccggacatccagatgacacagagccctagcagcctgtctgccagcgtgggagacagagtgaccatcacatgcaaggccagcgaccacatcaacaactggctggcctggtatcagcagaagcctggacaggcccctaagctgctgatctacggcgctaccacactggaaacaggcgtgcccagcagattttctggcagcggctctggcaccgactacaccctgacaatatccagcctccagcctgaggacttcgccacctactactgtcagcagagctggaacaccccttggacattcggccagggcaccaagctggaaatcaagagactcgaggccgacgtgtcccccaagcctaccatcttcctgccctctatcgccgagacaaagctccagaaggccggcacctacctgtgcctgctggaaaagttcttcccagatgtgattaagatccactggcaggaaaagaagtccaacaccatcctgggcagccaggaaggcaacaccatgaagaccaacgacacctacatgaagttcagctggctgaccgtgcccgagaagtccctggacaaagaacacagatgcatcgtgcggcacgaaaacaacaagaacggcgtggaccaggaaatcatcttcccacccatcaagaccgatgtgattacaatggaccccaaggacaactgctccaaggacgccaacgataccctgctgctccagctgaccaacaccagcgcctactacatgtacttgttgctgctgctgaagtccgtggtgtacttcgccatcatcacatgctgcctgctgcggagaaccgccttctgctgcaacggcgagaagtctggatccaaacggggcagaaagaaactcctgtatatattcaaacaaccatttatgagaccagtacaaactactcaagaggaagatggctgtagctgccgatttccagaagaagaagaaggaggatgtgaactgcggctgaagatccaagtgcggaaggccgccatcaccagctacgagaaatccgacggcgtgtacaccggcctgagcaccagaaatcaagagacatacgagacactgaagcacgaaaagcctccacaaagggccaagcgatctggatctggagcaacaaacttctcactactcaaacaagcaggtgacgtggaggagaatcccgggcctactagtatggactggatttggcgcatccttttccttgtcggcgctgctaccggcgcgcattccttcgaacaagttcagcttcaacagcctggcgctgagctggtcaaacctggcgcttctgtgaagatgagctgcaaagccagcggctacgccttcagcagctactggatcaactggatgaagcagaaacccggccagggactcgaatggatcggccaaatctatcccggcgacggcgacaccaactacaacggcaagttcaagggcagagccacactgaccgccgatacctctagcagcacagcctacatgcagctgagcagcctgaccagcgaagatagcgccgtgtacttctgtgcccggtccatcacaacagtcgtgggctgcgctatggactattggggccagggaacaagcgtgaccgtgtctagtacgcgtgcctctacaaagggaccctccgtgtttcctctggctcccagcagcaagtctacaagcggaggaacagccgctctgggctgcctggtcaaggattactttcccgagcctgtgaccgtgtcctggaatagcggagcactgacaagcggcgtgcacacctttccagccgtgctgcaaagcagcggcctgtactctctgagcagcgtggtcacagtgcctagctctagcctgggcacccagacctacatctgcaatgtgaaccacaagcctagcaacaccaaggtggacaagagagtggaacccaagagctgtgaagtgaaaaccgactccaccgaccacgtgaagcccaaagagacagagaacaccaagcagcccagcaagagctgccacaagcccaaggccatcgtgcacaccgagaaagtgaacatgatgagcctgaccgtgctgggcctgcggatgctgttcgccaaaaccgtggccgtgaacttcctgctgaccgccaagctgttcttcctcggtaccctcggagaaccacagctctgttacattctggatgctatcctgttcctctatgggatcgtcctgacactcctgtattgcaagagaggccggaagaagctgctgtacatcttcaagcagcctttcatgcggcccgtgcagaccacccaggaagaggacggctgctcctgccggttccccgaggaagaagaaggcggctgcgagctgagactcaaaattcaagttcgcaaagccgccattacctcttacgagaagagtgatggggtgtacacaggactgtctacccggaatcaagaaacctacgaaaccctcaaacatgagaagccacctcagcgcgccaagagaagcggatctggcgtgaagcagaccctgaatttcgacctgctgaagctggctggcgacgtggaatccaacccaggcccttctagaggccatatgaccgagtacaagcccacggtgcgcctcgccacccgcgacgacgtccccagggccgtacgcaccctcgccgccgcgttcgccgactaccccgccacgcgccacaccgtcgatccggaccgccacatcgagcgggtcaccgagctgcaagaactcttcctcacgcgcgtcgggctcgacatcggcaaggtgtgggtcgcggacgacggcgccgcggtggcggtctggaccacgccggagagcgtcgaagcgggggcggtgttcgccgagatcggcccgcgcatggccgagttgagcggttcccggctggccgcgcagcaacagatggaaggcctcctggcgccgcaccggcccaaggagcccgcgtggttcctggccaccgtcggcgtctcgcccgaccaccagggcaagggtctgggcagcgccgtcgtgctccccggagtggaggcggccgagcgcgccggggtgcccgccttcctggagacctccgcgccccgcaacctccccttctacgagcggctcggcttcaccgtcaccgccgacgtcgaggtgcccgaaggaccgcgcacctggtgcatgacccgcaagcccggtgcctga

SEQ ID NO: 32465 - DNA, 3087 bp, synthetic construct
  source 1..3087: mol_type = other DNA
atggccttaccagtgaccgccttgctcctgccgctggccttgctgctccacgccgccaggccggacatccagatgacacagagccctagcagcctgtctgccagcgtgggagacagagtgaccatcacatgcaaggccagcgaccacatcaacaactggctggcctggtatcagcagaagcctggacaggcccctaagctgctgatctacggcgctaccacactggaaacaggcgtgcccagcagattttctggcagcggctctggcaccgactacaccctgacaatatccagcctccagcctgaggacttcgccacctactactgtcagcagagctggaacaccccttggacattcggccagggcaccaagctggaaatcaagagactcgaggccgacgtgtcccccaagcctaccatcttcctgccctctatcgccgagacaaagctccagaaggccggcacctacctgtgcctgctggaaaagttcttcccagatgtgattaagatccactggcaggaaaagaagtccaacaccatcctgggcagccaggaaggcaacaccatgaagaccaacgacacctacatgaagttcagctggctgaccgtgcccgagaagtccctggacaaagaacacagatgcatcgtgcggcacgaaaacaacaagaacggcgtggaccaggaaatcatcttcccacccatcaagaccgatgtgattacaatggaccccaaggacaactgctccaaggacgccaacgataccctgctgctccagctgaccaacaccagcgcctactacatgtacttgttgctgctgctgaagtccgtggtgtacttcgccatcatcacatgctgcctgctgcggagaaccgccttctgctgcaacggcgagaagtctggatccaaacggggcagaaagaaactcctgtatatattcaaacaaccatttatgagaccagtacaaactactcaagaggaagatggctgtagctgccgatttccagaagaagaagaaggaggatgtgaactgcggctgaagatccaagtgcggaaggccgccatcaccagctacgagaaatccgacggcgtgtacaccggcctgagcaccagaaatcaagagacatacgagacactgaagcacgaaaagcctccacaaagggccaagcgatctggatctggagcaacaaacttctcactactcaaacaagcaggtgacgtggaggagaatcccgggcctactagtatggactggatttggcgcatccttttccttgtcggcgctgctaccggcgcgcattccttcgaacaagttcagcttcaacagcctggcgctgagctggtcaaacctggcgcttctgtgaagatgagctgcaaagccagcggctacgccttcagcagctactggatcaactggatgaagcagaaacccggccagggactcgaatggatcggccaaatctatcccggcgacggcgacaccaactacaacggcaagttcaagggcagagccacactgaccgccgatacctctagcagcacagcctacatgcagctgagcagcctgaccagcgaagatagcgccgtgtacttctgtgcccggtccatcacaacagtcgtgggctgcgctatggactattggggccagggaacaagcgtgaccgtgtctagtacgcgtcctcacaccaagcccagcgtgttcgtgatgaagaacggcaccaacgtggcctgcctcgtgaaagagttctaccccaaggacatcaggatcaacctggtgtccagcaagaagatcaccgagttcgaccccgccatcgtgatctcccccagcggcaagtacaacgccgtgaagctggggaagtacgaggacagcaacagcgtgacctgctccgtgcagcacgacaacaagaccgtgcacagcaccgactttgaagtgaaaaccgactccaccgaccacgtgaagcccaaagagacagagaacaccaagcagcccagcaagagctgccacaagcccaaggccatcgtgcacaccgagaaagtgaacatgatgagcctgaccgtgctgggcctgcggatgctgttcgccaaaaccgtggccgtgaacttcctgctgaccgccaagctgttcttcctcggtaccaagagaggccggaagaagctgctgtacatcttcaagcagcctttcatgcggcccgtgcagaccacccaggaagaggacggctgctcctgccggttccccgaggaagaagaaggcggctgcgagctgagactcaaaattcaagttcgcaaagccgccattacctcttacgagaagagtgatggggtgtacacaggactgtctacccggaatcaagaaacctacgaaaccctcaaacatgagaagccacctcagcgcgccaagagaagcggatctggcgtgaagcagaccctgaatttcgacctgctgaagctggctggcgacgtggaatccaacccaggcccttctagaggccatatgaccgagtacaagcccacggtgcgcctcgccacccgcgacgacgtccccagggccgtacgcaccctcgccgccgcgttcgccgactaccccgccacgcgccacaccgtcgatccggaccgccacatcgagcgggtcaccgagctgcaagaactcttcctcacgcgcgtcgggctcgacatcggcaaggtgtgggtcgcggacgacggcgccgcggtggcggtctggaccacgccggagagcgtcgaagcgggggcggtgttcgccgagatcggcccgcgcatggccgagttgagcggttcccggctggccgcgcagcaacagatggaaggcctcctggcgccgcaccggcccaaggagcccgcgtggttcctggccaccgtcggcgtctcgcccgaccaccagggcaagggtctgggcagcgccgtcgtgctccccggagtggaggcggccgagcgcgccggggtgcccgccttcctggagacctccgcgccccgcaacctccccttctacgagcggctcggcttcaccgtcaccgccgacgtcgaggtgcccgaaggaccgcgcacctggtgcatgacccgcaagcccggtgcctga

SEQ ID NO: 32466 - DNA, 3510 bp, synthetic construct
  source 1..3510: mol_type = other DNA
atggccttaccagtgaccgccttgctcctgccgctggccttgctgctccacgccgccaggccggacatccagatgacacagagccctagcagcctgtctgccagcgtgggagacagagtgaccatcacatgcaaggccagcgaccacatcaacaactggctggcctggtatcagcagaagcctggacaggcccctaagctgctgatctacggcgctaccacactggaaacaggcgtgcccagcagattttctggcagcggctctggcaccgactacaccctgacaatatccagcctccagcctgaggacttcgccacctactactgtcagcagagctggaacaccccttggacattcggccagggcaccaagctggaaatcaagagactcgaggccgacgtgtcccccaagcctaccatcttcctgccctctatcgccgagacaaagctccagaaggccggcacctacctgtgcctgctggaaaagttcttcccagatgtgattaagatccactggcaggaaaagaagtccaacaccatcctgggcagccaggaaggcaacaccatgaagaccaacgacacctacatgaagttcagctggctgaccgtgcccgagaagtccctggacaaagaacacagatgcatcgtgcggcacgaaaacaacaagaacggcgtggaccaggaaatcatcttcccacccatcaagaccgatgtgattacaatggaccccaaggacaactgctccaaggacgccaacgataccctgctgctccagctgaccaacaccagcgcctactacatgtacttgttgctgctgctgaagtccgtggtgtacttcgccatcatcacatgctgcctgctgcggagaaccgccttctgctgcaacggcgagaagtctggatccaaacggggcagaaagaaactcctgtatatattcaaacaaccatttatgagaccagtacaaactactcaagaggaagatggctgtagctgccgatttccagaagaagaagaaggaggatgtgaactgagagtgaagttcagcagaagcgccgacgcccctgcctaccagcagggacagaaccaactgtacaacgagctgaacctgggcagacgggaagagtacgacgtgctggacaagcggagaggcagggaccctgagatgggcggaaagccccagcggagaaagaacccccaggaaggactgtataacgaactccagaaagacaagatggccgaagcctacagcgagatcggcatgaagggcgagcggagaagaggcaagggccacgatggcctgtaccagggcctgagcaccgccaccaaggacacctatgacgccctgcacatgcaggccctgcctccaagaagggccaagcgatctggatctggagcaacaaacttctcactactcaaacaagcaggtgacgtggaggagaatcccgggcctactagtatggactggatttggcgcatccttttccttgtcggcgctgctaccggcgcgcattccttcgaacaagttcagcttcaacagcctggcgctgagctggtcaaacctggcgcttctgtgaagatgagctgcaaagccagcggctacgccttcagcagctactggatcaactggatgaagcagaaacccggccagggactcgaatggatcggccaaatctatcccggcgacggcgacaccaactacaacggcaagttcaagggcagagccacactgaccgccgatacctctagcagcacagcctacatgcagctgagcagcctgaccagcgaagatagcgccgtgtacttctgtgcccggtccatcacaacagtcgtgggctgcgctatggactattggggccagggaacaagcgtgaccgtgtctagtacgcgtcctcacaccaagcccagcgtgttcgtgatgaagaacggcaccaacgtggcctgcctcgtgaaagagttctaccccaaggacatcaggatcaacctggtgtccagcaagaagatcaccgagttcgaccccgccatcgtgatctcccccagcggcaagtacaacgccgtgaagctggggaagtacgaggacagcaacagcgtgacctgctccgtgcagcacgacaacaagaccgtgcacagcaccgactttgaagtgaaaaccgactccaccgaccacgtgaagcccaaagagacagagaacaccaagcagcccagcaagagctgccacaagcccaaggccatcgtgcacaccgagaaagtgaacatgatgagcctgaccgtgctgggcctgcggatgctgttcgccaaaaccgtggccgtgaacttcctgctgaccgccaagctgttcttcctcggtaccaagagaggccggaagaagctgctgtacatcttcaagcagcctttcatgcggcccgtgcagaccacccaggaagaggacggctgctcctgccggttccccgaggaagaagaaggcggctgcgagctgcgggttaagttttccagatccgcagacgcacccgcttaccaacaagggcagaaccaactctacaatgaacttaatttggggcggagggaagagtacgacgttctggacaaaaggaggggacgagatcccgagatgggcggaaagcctcgaaggaagaatccgcaagaggggctttataacgaactccagaaagataaaatggcagaagcctatagtgagattgggatgaagggagaaaggaggaggggtaaaggtcacgatgggttgtaccaaggattgagcacagccactaaagatacctatgatgcgctccacatgcaggccctgccgccaagacgcgccaagagaagcggatctggcgtgaagcagaccctgaatttcgacctgctgaagctggctggcgacgtggaatccaacccaggcccttctagaggccatatgaccgagtacaagcccacggtgcgcctcgccacccgcgacgacgtccccagggccgtacgcaccctcgccgccgcgttcgccgactaccccgccacgcgccacaccgtcgatccggaccgccacatcgagcgggtcaccgagctgcaagaactcttcctcacgcgcgtcgggctcgacatcggcaaggtgtgggtcgcggacgacggcgccgcggtggcggtctggaccacgccggagagcgtcgaagcgggggcggtgttcgccgagatcggcccgcgcatggccgagttgagcggttcccggctggccgcgcagcaacagatggaaggcctcctggcgccgcaccggcccaaggagcccgcgtggttcctggccaccgtcggcgtctcgcccgaccaccagggcaagggtctgggcagcgccgtcgtgctccccggagtggaggcggccgagcgcgccggggtgcccgccttcctggagacctccgcgccccgcaacctccccttctacgagcggctcggcttcaccgtcaccgccgacgtcgaggtgcccgaaggaccgcgcacctggtgcatgacccgcaagcccggtgcctga

SEQ ID NO: 32467 - DNA, 3588 bp, synthetic construct
  source 1..3588: mol_type = other DNA
atggccttaccagtgaccgccttgctcctgccgctggccttgctgctccacgccgccaggccggacatccagatgacacagagccctagcagcctgtctgccagcgtgggagacagagtgaccatcacatgcaaggccagcgaccacatcaacaactggctggcctggtatcagcagaagcctggacaggcccctaagctgctgatctacggcgctaccacactggaaacaggcgtgcccagcagattttctggcagcggctctggcaccgactacaccctgacaatatccagcctccagcctgaggacttcgccacctactactgtcagcagagctggaacaccccttggacattcggccagggcaccaagctggaaatcaagagactcgagggacagcctaaggccaatcctaccgtgacactgttccctccaagcagcgaagaactccaggccaacaaggccacacttgtgtgcctgatctccgacttctaccctggggctgtgacagtggcttggaaggccgatggatctcctgtgaaagccggcgtggaaaccaccaagccatccaagcagagcaacaacaaatacgccgccagctcctacctgagcctgacacctgagcagtggaagtcccacagatcctacagctgccaagtgacccacgaaggcagcaccgtggaaaagacagtggcccctacagagtgcagccccatcaagaccgatgtgattacaatggaccccaaggacaactgctccaaggacgccaacgataccctgctgctccagctgaccaacaccagcgcctactacatgtacttgttgctgctgctgaagtccgtggtgtacttcgccatcatcacatgctgcctgctgcggagaaccgccttctgctgcaacggcgagaagtctggatccaaacggggcagaaagaaactcctgtatatattcaaacaaccatttatgagaccagtacaaactactcaagaggaagatggctgtagctgccgatttccagaagaagaagaaggaggatgtgaactgagagtgaagttcagcagaagcgccgacgcccctgcctaccagcagggacagaaccaactgtacaacgagctgaacctgggcagacgggaagagtacgacgtgctggacaagcggagaggcagggaccctgagatgggcggaaagccccagcggagaaagaacccccaggaaggactgtataacgaactccagaaagacaagatggccgaagcctacagcgagatcggcatgaagggcgagcggagaagaggcaagggccacgatggcctgtaccagggcctgagcaccgccaccaaggacacctatgacgccctgcacatgcaggccctgcctccaagaagggccaagcgatctggatctggagcaacaaacttctcactactcaaacaagcaggtgacgtggaggagaatcccgggcctactagtatggactggatttggcgcatccttttccttgtcggcgctgctaccggcgcgcattccttcgaacaagttcagcttcaacagcctggcgctgagctggtcaaacctggcgcttctgtgaagatgagctgcaaagccagcggctacgccttcagcagctactggatcaactggatgaagcagaaacccggccagggactcgaatggatcggccaaatctatcccggcgacggcgacaccaactacaacggcaagttcaagggcagagccacactgaccgccgatacctctagcagcacagcctacatgcagctgagcagcctgaccagcgaagatagcgccgtgtacttctgtgcccggtccatcacaacagtcgtgggctgcgctatggactattggggccagggaacaagcgtgaccgtgtctagtacgcgtgcctctacaaagggaccctccgtgtttcctctggctcccagcagcaagtctacaagcggaggaacagccgctctgggctgcctggtcaaggattactttcccgagcctgtgaccgtgtcctggaatagcggagcactgacaagcggcgtgcacacctttccagccgtgctgcaaagcagcggcctgtactctctgagcagcgtggtcacagtgcctagctctagcctgggcacccagacctacatctgcaatgtgaaccacaagcctagcaacaccaaggtggacaagagagtggaacccaagagctgtgaagtgaaaaccgactccaccgaccacgtgaagcccaaagagacagagaacaccaagcagcccagcaagagctgccacaagcccaaggccatcgtgcacaccgagaaagtgaacatgatgagcctgaccgtgctgggcctgcggatgctgttcgccaaaaccgtggccgtgaacttcctgctgaccgccaagctgttcttcctcggtaccaagagaggccggaagaagctgctgtacatcttcaagcagcctttcatgcggcccgtgcagaccacccaggaagaggacggctgctcctgccggttccccgaggaagaagaaggcggctgcgagctgcgggttaagttttccagatccgcagacgcacccgcttaccaacaagggcagaaccaactctacaatgaacttaatttggggcggagggaagagtacgacgttctggacaaaaggaggggacgagatcccgagatgggcggaaagcctcagcgaaggaagaatccgcaagaggggctttataacgaactccagaaagataaaatggcagaagcctatagtgagattgggatgaagggagaaaggaggaggggtaaaggtcacgatgggttgtaccaaggattgagcacagccactaaagatacctatgatgcgctccacatgcaggccctgccgccaagacgcgccaagagaagcggatctggcgtgaagcagaccctgaatttcgacctgctgaagctggctggcgacgtggaatccaacccaggcccttctagaggccatatgaccgagtacaagcccacggtgcgcctcgccacccgcgacgacgtccccagggccgtacgcaccctcgccgccgcgttcgccgactaccccgccacgcgccacaccgtcgatccggaccgccacatcgagcgggtcaccgagctgcaagaactcttcctcacgcgcgtcgggctcgacatcggcaaggtgtgggtcgcggacgacggcgccgcggtggcggtctggaccacgccggagagcgtcgaagcgggggcggtgttcgccgagatcggcccgcgcatggccgagttgagcggttcccggctggccgcgcagcaacagatggaaggcctcctggcgccgcaccggcccaaggagcccgcgtggttcctggccaccgtcggcgtctcgcccgaccaccagggcaagggtctgggcagcgccgtcgtgctccccggagtggaggcggccgagcgcgccggggtgcccgccttcctggagacctccgcgccccgcaacctccccttctacgagcggctcggcttcaccgtcaccgccgacgtcgaggtgcccgaaggaccgcgcacctggtgcatgacccgcaagcccggtgcctga

SEQ ID NO: 32468 - DNA, 3162 bp, synthetic construct
  source 1..3162: mol_type = other DNA
atggccttaccagtgaccgccttgctcctgccgctggccttgctgctccacgccgccaggccggacatccagatgacacagagccctagcagcctgtctgccagcgtgggagacagagtgaccatcacatgcaaggccagcgaccacatcaacaactggctggcctggtatcagcagaagcctggacaggcccctaagctgctgatctacggcgctaccacactggaaacaggcgtgcccagcagattttctggcagcggctctggcaccgactacaccctgacaatatccagcctccagcctgaggacttcgccacctactactgtcagcagagctggaacaccccttggacattcggccagggcaccaagctggaaatcaagagactcgagggacagcctaaggccaatcctaccgtgacactgttccctccaagcagcgaagaactccaggccaacaaggccacacttgtgtgcctgatctccgacttctaccctggggctgtgacagtggcttggaaggccgatggatctcctgtgaaagccggcgtggaaaccaccaagccatccaagcagagcaacaacaaatacgccgccagctcctacctgagcctgacacctgagcagtggaagtcccacagatcctacagctgccaagtgacccacgaaggcagcaccgtggaaaagacagtggcccctacagagtgcagccccatcaagaccgatgtgattacaatggaccccaaggacaactgctccaaggacgccaacgataccctgctgctccagctgaccaacaccagcgcctactacatgtacttgttgctgctgctgaagtccgtggtgtacttcgccatcatcacatgctgcctgctgcggagaaccgccttctgctgcaacggcgagaagtctggatccaaacggggcagaaagaaactcctgtatatattcaaacaaccatttatgagaccagtacaaactactcaagaggaagatggctgtagctgccgatttccagaagaagaagaaggaggatgtgaactgcggctgaagatccaagtgcggaaggccgccatcaccagctacgagaaatccgacggcgtgtacaccggcctgagcaccagaaatcaagagacatacgagacactgaagcacgaaaagcctccacaaagggccaagcgatctggatctggagcaacaaacttctcactactcaaacaagcaggtgacgtggaggagaatcccgggcctactagtatggactggatttggcgcatccttttccttgtcggcgctgctaccggcgcgcattccttcgaacaagttcagcttcaacagcctggcgctgagctggtcaaacctggcgcttctgtgaagatgagctgcaaagccagcggctacgccttcagcagctactggatcaactggatgaagcagaaacccggccagggactcgaatggatcggccaaatctatcccggcgacggcgacaccaactacaacggcaagttcaagggcagagccacactgaccgccgatacctctagcagcacagcctacatgcagctgagcagcctgaccagcgaagatagcgccgtgtacttctgtgcccggtccatcacaacagtcgtgggctgcgctatggactattggggccagggaacaagcgtgaccgtgtctagtacgcgtgcctctacaaagggaccctccgtgtttcctctggctcccagcagcaagtctacaagcggaggaacagccgctctgggctgcctggtcaaggattactttcccgagcctgtgaccgtgtcctggaatagcggagcactgacaagcggcgtgcacacctttccagccgtgctgcaaagcagcggcctgtactctctgagcagcgtggtcacagtgcctagctctagcctgggcacccagacctacatctgcaatgtgaaccacaagcctagcaacaccaaggtggacaagagagtggaacccaagagctgtgaagtgaaaaccgactccaccgaccacgtgaagcccaaagagacagagaacaccaagcagcccagcaagagctgccacaagcccaaggccatcgtgcacaccgagaaagtgaacatgatgagcctgaccgtgctgggcctgcggatgctgttcgccaaaaccgtggccgtgaacttcctgctgaccgccaagctgttcttcctcggtaccaagagaggccggaagaagctgctgtacatcttcaagcagcctttcatgcggcccgtgcagaccacccaggaagaggacggctgctcctgccggttccccgaggaagaagaaggcggctgcgagctgagactcaaaattcaagttcgcaaagccgccattacctcttacgagaagagtgatggggtgtacacaggactgtctacccggaatcaagaaacctacgaaaccctcaaacatgagaagccacctcagcgcgccaagagaagcggatctggcgtgaagcagaccctgaatttcgacctgctgaagctggctggcgacgtggaatccaacccaggcccttctagaggccatatgaccgagtacaagcccacggtgcgcctcgccacccgcgacgacgtccccagggccgtacgcaccctcgccgccgcgttcgccgactaccccgccacgcgccacaccgtcgatccggaccgccacatcgagcgggtcaccgagctgcaagaactcttcctcacgcgcgtcgggctcgacatcggcaaggtgtgggtcgcggacgacggcgccgcggtggcggtctggaccacgccggagagcgtcgaagcgggggcggtgttcgccgagatcggcccgcgcatggccgagttgagcggttcccggctggccgcgcagcaacagatggaaggcctcctggcgccgcaccggcccaaggagcccgcgtggttcctggccaccgtcggcgtctcgcccgaccaccagggcaagggtctgggcagcgccgtcgtgctccccggagtggaggcggccgagcgcgccggggtgcccgccttcctggagacctccgcgccccgcaacctccccttctacgagcggctcggcttcaccgtcaccgccgacgtcgaggtgcccgaaggaccgcgcacctggtgcatgacccgcaagcccggtgcctga

SEQ ID NO: 32469 - DNA, 3300 bp, synthetic construct
  source 1..3300: mol_type = other DNA
atggccttaccagtgaccgccttgctcctgccgctggccttgctgctccacgccgccaggccggacatccagatgacacagagccctagcagcctgtctgccagcgtgggagacagagtgaccatcacatgcaaggccagcgaccacatcaacaactggctggcctggtatcagcagaagcctggacaggcccctaagctgctgatctacggcgctaccacactggaaacaggcgtgcccagcagattttctggcagcggctctggcaccgactacaccctgacaatatccagcctccagcctgaggacttcgccacctactactgtcagcagagctggaacaccccttggacattcggccagggcaccaagctggaaatcaagagactcgaggccgacgtgtcccccaagcctaccatcttcctgccctctatcgccgagacaaagctccagaaggccggcacctacctgtgcctgctggaaaagttcttcccagatgtgattaagatccactggcaggaaaagaagtccaacaccatcctgggcagccaggaaggcaacaccatgaagaccaacgacacctacatgaagttcagctggctgaccgtgcccgagaagtccctggacaaagaacacagatgcatcgtgcggcacgaaaacaacaagaacggcgtggaccaggaaatcatcttcccacccatcaagaccgatgtgattacaatggaccccaaggacaactgctccaaggacgccaacgataccctgctgctccagctgaccaacaccagcgcctactacatgtacttgttgctgctgctgaagtccgtggtgtacttcgccatcatcacatgctgcctgctgcggagaaccgccttctgctgcaacggcgagaagtctggatccaaacggggcagaaagaaactcctgtatatattcaaacaaccatttatgagaccagtacaaactactcaagaggaagatggctgtagctgccgatttccagaagaagaagaaggaggatgtgaactgcggctgaagatccaagtgcggaaggccgccatcaccagctacgagaaatccgacggcgtgtacaccggcctgagcaccagaaatcaagagacatacgagacactgaagcacgaaaagcctccacaaagggccaagcgatctggatctggagcaacaaacttctcactactcaaacaagcaggtgacgtggaggagaatcccgggcctactagtatggactggatttggcgcatccttttccttgtcggcgctgctaccggcgcgcattccttcgaacaagttcagcttcaacagcctggcgctgagctggtcaaacctggcgcttctgtgaagatgagctgcaaagccagcggctacgccttcagcagctactggatcaactggatgaagcagaaacccggccagggactcgaatggatcggccaaatctatcccggcgacggcgacaccaactacaacggcaagttcaagggcagagccacactgaccgccgatacctctagcagcacagcctacatgcagctgagcagcctgaccagcgaagatagcgccgtgtacttctgtgcccggtccatcacaacagtcgtgggctgcgctatggactattggggccagggaacaagcgtgaccgtgtctagtacgcgtcctcacaccaagcccagcgtgttcgtgatgaagaacggcaccaacgtggcctgcctcgtgaaagagttctaccccaaggacatcaggatcaacctggtgtccagcaagaagatcaccgagttcgaccccgccatcgtgatctcccccagcggcaagtacaacgccgtgaagctggggaagtacgaggacagcaacagcgtgacctgctccgtgcagcacgacaacaagaccgtgcacagcaccgactttgaagtgaaaaccgactccaccgaccacgtgaagcccaaagagacagagaacaccaagcagcccagcaagagctgccacaagcccaaggccatcgtgcacaccgagaaagtgaacatgatgagcctgaccgtgctgggcctgcggatgctgttcgccaaaaccgtggccgtgaacttcctgctgaccgccaagctgttcttcctcggtaccaagagaggccggaagaagctgctgtacatcttcaagcagcctttcatgcggcccgtgcagaccacccaggaagaggacggctgctcctgccggttccccgaggaagaagaaggcggctgcgagctgcgggttaagttttccagatccgcagacgcacccgcttaccaacaagggcagaaccaactctacaatgaacttaatttggggcggagggaagagtacgacgttctggacaaaaggaggggacgagatcccgagatgggcggaaagcctcagcgaaggaagaatccgcaagaggggctttataacgaactccagaaagataaaatggcagaagcctatagtgagattgggatgaagggagaaaggaggaggggtaaaggtcacgatgggttgtaccaaggattgagcacagccactaaagatacctatgatgcgctccacatgcaggccctgccgccaagacgcgccaagagaagcggatctggcgtgaagcagaccctgaatttcgacctgctgaagctggctggcgacgtggaatccaacccaggcccttctagaagccatatgaccgagtacaagcccacggtgcgcctcgccacccgcgacgacgtccccagggccgtacgcaccctcgccgccgcgttcgccgactaccccgccacgcgccacaccgtcgatccggaccgccacatcgagcgggtcaccgagctgcaagaactcttcctcacgcgcgtcgggctcgacatcggcaaggtgtgggtcgcggacgacggcgccgcggtggcggtctggaccacgccggagagcgtcgaagcgggggcggtgttcgccgagatcggcccgcgcatggccgagttgagcggttcccggctggccgcgcagcaacagatggaaggcctcctggcgccgcaccggcccaaggagcccgcgtggttcctggccaccgtcggcgtctcgcccgaccaccagggcaagggtctgggcagcgccgtcgtgctccccggagtggaggcggccgagcgcgccggggtgcccgccttcctggagacctccgcgccccgcaacctccccttctacgagcggctcggcttcaccgtcaccgccgacgtcgaggtgcccgaaggaccgcgcacctggtgcatgacccgcaagcccggtgcctga

SEQ ID NO: 32470 - DNA, 3300 bp, synthetic construct
  source 1..3300: mol_type = other DNA
atggccttaccagtgaccgccttgctcctgccgctggccttgctgctccacgccgccaggccggacatccagatgacacagagccctagcagcctgtctgccagcgtgggagacagagtgaccatcacatgcaaggccagcgaccacatcaacaactggctggcctggtatcagcagaagcctggacaggcccctaagctgctgatctacggcgctaccacactggaaacaggcgtgcccagcagattttctggcagcggctctggcaccgactacaccctgacaatatccagcctccagcctgaggacttcgccacctactactgtcagcagagctggaacaccccttggacattcggccagggcaccaagctggaaatcaagagactcgaggccgacgtgtcccccaagcctaccatcttcctgccctctatcgccgagacaaagctccagaaggccggcacctacctgtgcctgctggaaaagttcttcccagatgtgattaagatccactggcaggaaaagaagtccaacaccatcctgggcagccaggaaggcaacaccatgaagaccaacgacacctacatgaagttcagctggctgaccgtgcccgagaagtccctggacaaagaacacagatgcatcgtgcggcacgaaaacaacaagaacggcgtggaccaggaaatcatcttcccacccatcaagaccgatgtgattacaatggaccccaaggacaactgctccaaggacgccaacgataccctgctgctccagctgaccaacaccagcgcctactacatgtacttgttgctgctgctgaagtccgtggtgtacttcgccatcatcacatgctgcctgctgcggagaaccgccttctgctgcaacggcgagaagtctggatccaaacggggcagaaagaaactcctgtatatattcaaacaaccatttatgagaccagtacaaactactcaagaggaagatggctgtagctgccgatttccagaagaagaagaaggaggatgtgaactgagagtgaagttcagcagaagcgccgacgcccctgcctaccagcagggacagaaccaactgtacaacgagctgaacctgggcagacgggaagagtacgacgtgctggacaagcggagaggcagggaccctgagatgggcggaaagccccagcggagaaagaacccccaggaaggactgtataacgaactccagaaagacaagatggccgaagcctacagcgagatcggcatgaagggcgagcggagaagaggcaagggccacgatggcctgtaccagggcctgagcaccgccaccaaggacacctatgacgccctgcacatgcaggccctgcctccaagaagggccaagcgatctggatctggagcaacaaacttctcactactcaaacaagcaggtgacgtggaggagaatcccgggcctactagtatggactggatttggcgcatccttttccttgtcggcgctgctaccggcgcgcattccttcgaacaagttcagcttcaacagcctggcgctgagctggtcaaacctggcgcttctgtgaagatgagctgcaaagccagcggctacgccttcagcagctactggatcaactggatgaagcagaaacccggccagggactcgaatggatcggccaaatctatcccggcgacggcgacaccaactacaacggcaagttcaagggcagagccacactgaccgccgatacctctagcagcacagcctacatgcagctgagcagcctgaccagcgaagatagcgccgtgtacttctgtgcccggtccatcacaacagtcgtgggctgcgctatggactattggggccagggaacaagcgtgaccgtgtctagtacgcgtcctcacaccaagcccagcgtgttcgtgatgaagaacggcaccaacgtggcctgcctcgtgaaagagttctaccccaaggacatcaggatcaacctggtgtccagcaagaagatcaccgagttcgaccccgccatcgtgatctcccccagcggcaagtacaacgccgtgaagctggggaagtacgaggacagcaacagcgtgacctgctccgtgcagcacgacaacaagaccgtgcacagcaccgactttgaagtgaaaaccgactccaccgaccacgtgaagcccaaagagacagagaacaccaagcagcccagcaagagctgccacaagcccaaggccatcgtgcacaccgagaaagtgaacatgatgagcctgaccgtgctgggcctgcggatgctgttcgccaaaaccgtggccgtgaacttcctgctgaccgccaagctgttcttcctcggtaccaagagaggccggaagaagctgctgtacatcttcaagcagcctttcatgcggcccgtgcagaccacccaggaagaggacggctgctcctgccggttccccgaggaagaagaaggcggctgcgagctgagactcaaaattcaagttcgcaaagccgccattacctcttacgagaagagtgatggggtgtacacaggactgtctacccggaatcaagaaacctacgaaaccctcaaacatgagaagccacctcagcgcgccaagagaagcggatctggcgtgaagcagaccctgaatttcgacctgctgaagctggctggcgacgtggaatccaacccaggcccttctagaggccatatgaccgagtacaagcccacggtgcgcctcgccacccgcgacgacgtccccagggccgtacgcaccctcgccgccgcgttcgccgactaccccgccacgcgccacaccgtcgatccggaccgccacatcgagcgggtcaccgagctgcaagaactcttcctcacgcgcgtcgggctcgacatcggcaaggtgtgggtcgcggacgacggcgccgcggtggcggtctggaccacgccggagagcgtcgaagcgggggcggtgttcgccgagatcggcccgcgcatggccgagttgagcggttcccggctggccgcgcagcaacagatggaaggcctcctggcgccgcaccggcccaaggagcccgcgtggttcctggccaccgtcggcgtctcgcccgaccaccagggcaagggtctgggcagcgccgtcgtgctccccggagtggaggcggccgagcgcgccggggtgcccgccttcctggagacctccgcgccccgcaacctccccttctacgagcggctcggcttcaccgtcaccgccgacgtcgaggtgcccgaaggaccgcgcacctggtgcatgacccgcaagcccggtgcctga

SEQ ID NO: 32471 - DNA, 3333 bp, synthetic construct
  source 1..3333: mol_type = other DNA
atggccttaccagtgaccgccttgctcctgccgctggccttgctgctccacgccgccaggccggacatccagatgacacagagccctagcagcctgtctgccagcgtgggagacagagtgaccatcacatgcaaggccagcgaccacatcaacaactggctggcctggtatcagcagaagcctggacaggcccctaagctgctgatctacggcgctaccacactggaaacaggcgtgcccagcagattttctggcagcggctctggcaccgactacaccctgacaatatccagcctccagcctgaggacttcgccacctactactgtcagcagagctggaacaccccttggacattcggccagggcaccaagctggaaatcaagagactcgagggacagcctaaggccaatcctaccgtgacactgttccctccaagcagcgaagaactccaggccaacaaggccacacttgtgtgcctgatctccgacttctaccctggggctgtgacagtggcttggaaggccgatggatctcctgtgaaagccggcgtggaaaccaccaagccatccaagcagagcaacaacaaatacgccgccagctcctacctgagcctgacacctgagcagtggaagtcccacagatcctacagctgccaagtgacccacgaaggcagcaccgtggaaaagacagtggcccctacagagtgcagcggcagagccgattgcggctttaccagcgagagctaccagcagggcgtgctgagcgccaccatcctgtacgagatcctgctgggcaaggccaccctgtacgccgtgctggtgtctgccctggtgctgatggctatggtcaagcggaaggacagccggggaggatccaaacggggcagaaagaaactcctgtatatattcaaacaaccatttatgagaccagtacaaactactcaagaggaagatggctgtagctgccgatttccagaagaagaagaaggaggatgtgaactgagagtgaagttcagcagaagcgccgacgcccctgcctaccagcagggacagaaccaactgtacaacgagctgaacctgggcagacgggaagagtacgacgtgctggacaagcggagaggcagggaccctgagatgggcggaaagccccagcggagaaagaacccccaggaaggactgtataacgaactccagaaagacaagatggccgaagcctacagcgagatcggcatgaagggcgagcggagaagaggcaagggccacgatggcctgtaccagggcctgagcaccgccaccaaggacacctatgacgccctgcacatgcaggccctgcctccaagaagggccaagcgatctggatctggagcaacaaacttctcactactcaaacaagcaggtgacgtggaggagaatcccgggcctactagtatggactggatttggcgcatccttttccttgtcggcgctgctaccggcgcgcattccttcgaacaagttcagcttcaacagcctggcgctgagctggtcaaacctggcgcttctgtgaagatgagctgcaaagccagcggctacgccttcagcagctactggatcaactggatgaagcagaaacccggccagggactcgaatggatcggccaaatctatcccggcgacggcgacaccaactacaacggcaagttcaagggcagagccacactgaccgccgatacctctagcagcacagcctacatgcagctgagcagcctgaccagcgaagatagcgccgtgtacttctgtgcccggtccatcacaacagtcgtgggctgcgctatggactattggggccagggaacaagcgtgaccgtgtctagtacgcgtgcctctacaaagggaccctccgtgtttcctctggctcccagcagcaagtctacaagcggaggaacagccgctctgggctgcctggtcaaggattactttcccgagcctgtgaccgtgtcctggaatagcggagcactgacaagcggcgtgcacacctttccagccgtgctgcaaagcagcggcctgtactctctgagcagcgtggtcacagtgcctagctctagcctgggcacccagacctacatctgcaatgtgaaccacaagcctagcaacaccaaggtggacaagagagtggaacccaagagctgtgaagtgaaaaccgactccaccgaccacgtgaagcccaaagagacagagaacaccaagcagcccagcaagagctgccacaagcccaaggccatcgtgcacaccgagaaagtgaacatgatgagcctgaccgtgctgggcctgcggatgctgttcgccaaaaccgtggccgtgaacttcctgctgaccgccaagctgttcttcctcggtaccaagagaggccggaagaagctgctgtacatcttcaagcagcctttcatgcggcccgtgcagaccacccaggaagaggacggctgctcctgccggttccccgaggaagaagaaggcggctgcgagctgagactcaaaattcaagttcgcaaagccgccattacctcttacgagaagagtgatggggtgtacacaggactgtctacccggaatcaagaaacctacgaaaccctcaaacatgagaagccacctcagcgcgccaagagaagcggatctggcgtgaagcagaccctgaatttcgacctgctgaagctggctggcgacgtggaatccaacccaggcccttctagaggccatatgaccgagtacaagcccacggtgcgcctcgccacccgcgacgacgtccccagggccgtacgcaccctcgccgccgcgttcgccgactaccccgccacgcgccacaccgtcgatccggaccgccacatcgagcgggtcaccgagctgcaagaactcttcctcacgcgcgtcgggctcgacatcggcaaggtgtgggtcgcggacgacggcgccgcggtggcggtctggaccacgccggagagcgtcgaagcgggggcggtgttcgccgagatcggcccgcgcatggccgagttgagcggttcccggctggccgcgcagcaacagatggaaggcctcctggcgccgcaccggcccaaggagcccgcgtggttcctggccaccgtcggcgtctcgcccgaccaccagggcaagggtctgggcagcgccgtcgtgctccccggagtggaggcggccgagcgcgccggggtgcccgccttcctggagacctccgcgccccgcaacctccccttctacgagcggctcggcttcaccgtcaccgccgacgtcgaggtgcccgaaggaccgcgcacctggtgcatgacccgcaagcccggtgcctga

SEQ ID NO: 32472 - DNA, 3546 bp, synthetic construct
  source 1..3546: mol_type = other DNA
atggccttaccagtgaccgccttgctcctgccgctggccttgctgctccacgccgccaggccggacatccagatgacacagagccctagcagcctgtctgccagcgtgggagacagagtgaccatcacatgcaaggccagcgaccacatcaacaactggctggcctggtatcagcagaagcctggacaggcccctaagctgctgatctacggcgctaccacactggaaacaggcgtgcccagcagattttctggcagcggctctggcaccgactacaccctgacaatatccagcctccagcctgaggacttcgccacctactactgtcagcagagctggaacaccccttggacattcggccagggcaccaagctggaaatcaagagactcgagggacagcctaaggccaatcctaccgtgacactgttccctccaagcagcgaagaactccaggccaacaaggccacacttgtgtgcctgatctccgacttctaccctggggctgtgacagtggcttggaaggccgatggatctcctgtgaaagccggcgtggaaaccaccaagccatccaagcagagcaacaacaaatacgccgccagctcctacctgagcctgacacctgagcagtggaagtcccacagatcctacagctgccaagtgacccacgaaggcagcaccgtggaaaagacagtggcccctacagagtgcagcggcagagccgattgcggctttaccagcgagagctaccagcagggcgtgctgagcgccaccatcctgtacgagatcctgctgggcaaggccaccctgtacgccgtgctggtgtctgccctggtgctgatggctatggtcaagcggaaggacagccggggaggatccaaacggggcagaaagaaactcctgtatatattcaaacaaccatttatgagaccagtacaaactactcaagaggaagatggctgtagctgccgatttccagaagaagaagaaggaggatgtgaactgagagtgaagttcagcagaagcgccgacgcccctgcctaccagcagggacagaaccaactgtacaacgagctgaacctgggcagacgggaagagtacgacgtgctggacaagcggagaggcagggaccctgagatgggcggaaagccccagcggagaaagaacccccaggaaggactgtataacgaactccagaaagacaagatggccgaagcctacagcgagatcggcatgaagggcgagcggagaagaggcaagggccacgatggcctgtaccagggcctgagcaccgccaccaaggacacctatgacgccctgcacatgcaggccctgcctccaagaagggccaagcgatctggatctggagcaacaaacttctcactactcaaacaagcaggtgacgtggaggagaatcccgggcctactagtatggactggatttggcgcatccttttccttgtcggcgctgctaccggcgcgcattccttcgaacaagttcagcttcaacagcctggcgctgagctggtcaaacctggcgcttctgtgaagatgagctgcaaagccagcggctacgccttcagcagctactggatcaactggatgaagcagaaacccggccagggactcgaatggatcggccaaatctatcccggcgacggcgacaccaactacaacggcaagttcaagggcagagccacactgaccgccgatacctctagcagcacagcctacatgcagctgagcagcctgaccagcgaagatagcgccgtgtacttctgtgcccggtccatcacaacagtcgtgggctgcgctatggactattggggccagggaacaagcgtgaccgtgtctagtacgcgtgcctctacaaagggaccctccgtgtttcctctggctcccagcagcaagtctacaagcggaggaacagccgctctgggctgcctggtcaaggattactttcccgagcctgtgaccgtgtcctggaatagcggagcactgacaagcggcgtgcacacctttccagccgtgctgcaaagcagcggcctgtactctctgagcagcgtggtcacagtgcctagctctagcctgggcacccagacctacatctgcaatgtgaaccacaagcctagcaacaccaaggtggacaagagagtggaacccaagagctgtgaagtgaaaaccgactccaccgaccacgtgaagcccaaagagacagagaacaccaagcagcccagcaagagctgccacaagcccaaggccatcgtgcacaccgagaaagtgaacatgatgagcctgaccgtgctgggcctgcggatgctgttcgccaaaaccgtggccgtgaacttcctgctgaccgccaagctgttcttcctcggtaccaagagaggccggaagaagctgctgtacatcttcaagcagcctttcatgcggcccgtgcagaccacccaggaagaggacggctgctcctgccggttccccgaggaagaagaaggcggctgcgagctgcgggttaagttttccagatccgcagacgcacccgcttaccaacaagggcagaaccaactctacaatgaacttaatttggggcggagggaagagtacgacgttctggacaaaaggaggggacgagatcccgagatgggcggaaagcctcagcgaaggaagaatccgcaagaggggctttataacgaactccagaaagataaaatggcagaagcctatagtgagattgggatgaagggagaaaggaggaggggtaaaggtcacgatgggttgtaccaaggattgagcacagccactaaagatacctatgatgcgctccacatgcaggccctgccgccaagacgcgccaagagaagcggatctggcgtgaagcagaccctgaatttcgacctgctgaagctggctggcgacgtggaatccaacccaggcccttctagaggccatatgaccgagtacaagcccacggtgcgcctcgccacccgcgacgacgtccccagggccgtacgcaccctcgccgccgcgttcgccgactaccccgccacgcgccacaccgtcgatccggaccgccacatcgagcgggtcaccgagctgcaagaactcttcctcacgcgcgtcgggctcgacatcggcaaggtgtgggtcgcggacgacggcgccgcggtggcggtctggaccacgccggagagcgtcgaagcgggggcggtgttcgccgagatcggcccgcgcatggccgagttgagcggttcccggctggccgcgcagcaacagatggaaggcctcctggcgccgcaccggcccaaggagcccgcgtggttcctggccaccgtcggcgtctcgcccgaccaccagggcaagggtctgggcagcgccgtcgtgctccccggagtggaggcggccgagcgcgccggggtgcccgccttcctggagacctccgcgccccgcaacctccccttctacgagcggctcggcttcaccgtcaccgccgacgtcgaggtgcccgaaggaccgcgcacctggtgcatgacccgcaagcccggtgcctga

SEQ ID NO: 32473 - DNA, 3390 bp, synthetic construct
  source 1..3390: mol_type = other DNA
atggccttaccagtgaccgccttgctcctgccgctggccttgctgctccacgccgccaggccggacatccagatgacacagagccctagcagcctgtctgccagcgtgggagacagagtgaccatcacatgcaaggccagcgaccacatcaacaactggctggcctggtatcagcagaagcctggacaggcccctaagctgctgatctacggcgctaccacactggaaacaggcgtgcccagcagattttctggcagcggctctggcaccgactacaccctgacaatatccagcctccagcctgaggacttcgccacctactactgtcagcagagctggaacaccccttggacattcggccagggcaccaagctggaaatcaagagactcgaggacctgaagaacgtgttcccacctgaggtggccgtgttcgagcctagcgaggccgagatcagccacacccagaaagccaccctcgtgtgcctggctaccggcttctaccccgaccatgtggaactgtcttggtgggtcaacggcaaagaggtgcacagcggcgtgtgtaccgacccccagccactgaaagaacagcccgccctgaacgacagccggtactgcctgagcagcagactgagagtgtccgccaccttctggcagaacccccggaaccacttcagatgccaggtgcagttctacggcctgagcgagaacgacgagtggacccaggacagagccaagcccgtgacccagatcgtgtctgccgaagcctggggcagagccgattgcggctttaccagcgagagctaccagcagggcgtgctgagcgccaccatcctgtacgagatcctgctgggcaaggccaccctgtacgccgtgctggtgtctgccctggtgctgatggctatggtcaagcggaaggacagccggggaggatccaaacggggcagaaagaaactcctgtatatattcaaacaaccatttatgagaccagtacaaactactcaagaggaagatggctgtagctgccgatttccagaagaagaagaaggaggatgtgaactgcggctgaagatccaagtgcggaaggccgccatcaccagctacgagaaatccgacggcgtgtacaccggcctgagcaccagaaatcaagagacatacgagacactgaagcacgaaaagcctccacaaagggccaagcgatctggatctggagcaacaaacttctcactactcaaacaagcaggtgacgtggaggagaatcccgggcctactagtatggactggatttggcgcatccttttccttgtcggcgctgctaccggcgcgcattccttcgaacaagttcagcttcaacagcctggcgctgagctggtcaaacctggcgcttctgtgaagatgagctgcaaagccagcggctacgccttcagcagctactggatcaactggatgaagcagaaacccggccagggactcgaatggatcggccaaatctatcccggcgacggcgacaccaactacaacggcaagttcaagggcagagccacactgaccgccgatacctctagcagcacagcctacatgcagctgagcagcctgaccagcgaagatagcgccgtgtacttctgtgcccggtccatcacaacagtcgtgggctgcgctatggactattggggccagggaacaagcgtgaccgtgtctagtacgcgtgcctctacaaagggaccctccgtgtttcctctggctcccagcagcaagtctacaagcggaggaacagccgctctgggctgcctggtcaaggattactttcccgagcctgtgaccgtgtcctggaatagcggagcactgacaagcggcgtgcacacctttccagccgtgctgcaaagcagcggcctgtactctctgagcagcgtggtcacagtgcctagctctagcctgggcacccagacctacatctgcaatgtgaaccacaagcctagcaacaccaaggtggacaagagagtggaacccaagagctgtgaagtgaaaaccgactccaccgaccacgtgaagcccaaagagacagagaacaccaagcagcccagcaagagctgccacaagcccaaggccatcgtgcacaccgagaaagtgaacatgatgagcctgaccgtgctgggcctgcggatgctgttcgccaaaaccgtggccgtgaacttcctgctgaccgccaagctgttcttcctcggtaccaagagaggccggaagaagctgctgtacatcttcaagcagcctttcatgcggcccgtgcagaccacccaggaagaggacggctgctcctgccggttccccgaggaagaagaaggcggctgcgagctgcgggttaagttttccagatccgcagacgcacccgcttaccaacaagggcagaaccaactctacaatgaacttaatttggggcggagggaagagtacgacgttctggacaaaaggaggggacgagatcccgagatgggcggaaagcctcagcgaaggaagaatccgcaagaggggctttataacgaactccagaaagataaaatggcagaagcctatagtgagattgggatgaagggagaaaggaggaggggtaaaggtcacgatgggttgtaccaaggattgagcacagccactaaagatacctatgatgcgctccacatgcaggccctgccgccaagacgcgccaagagaagcggatctggcgtgaagcagaccctgaatttcgacctgctgaagctggctggcgacgtggaatccaacccaggcccttctagaggccatatgaccgagtacaagcccacggtgcgcctcgccacccgcgacgacgtccccagggccgtacgcaccctcgccgccgcgttcgccgactaccccgccacgcgccacaccgtcgatccggaccgccacatcgagcgggtcaccgagctgcaagaactcttcctcacgcgcgtcgggctcgacatcggcaaggtgtgggtcgcggacgacggcgccgcggtggcggtctggaccacgccggagagcgtcgaagcgggggcggtgttcgccgagatcggcccgcgcatggccgagttgagcggttcccggctggccgcgcagcaacagatggaaggcctcctggcgccgcaccggcccaaggagcccgcgtggttcctggccaccgtcggcgtctcgcccgaccaccagggcaagggtctgggcagcgccgtcgtgctccccggagtggaggcggccgagcgcgccggggtgcccgccttcctggagacctccgcgccccgcaacctccccttctacgagcggctcggcttcaccgtcaccgccgacgtcgaggtgcccgaaggaccgcgcacctggtgcatgacccgcaagcccggtgcctga

SEQ ID NO: 32474 - DNA, 2583 bp, synthetic construct
  source 1..2583: mol_type = other DNA
atggccttaccagtgaccgccttgctcctgccgctggccttgctgctccacgccgccaggccggacatccagatgacacagagccctagcagcctgtctgccagcgtgggagacagagtgaccatcacatgcaaggccagcgaccacatcaacaactggctggcctggtatcagcagaagcctggacaggcccctaagctgctgatctacggcgctaccacactggaaacaggcgtgcccagcagattttctggcagcggctctggcaccgactacaccctgacaatatccagcctccagcctgaggacttcgccacctactactgtcagcagagctggaacaccccttggacattcggccagggcaccaagctggaaatcaagagactcgaggacaagagactggacgccgacatcagccccaagcctacaatcttcctgcctagcgtggccgagacaaacctgcacaagaccggcacctacctgtgtctgctggaaaagttcttccccgacgtgatccgggtgtactggaaagagaaggacggcaacaccatcctggactcccaagagggcgacaccctgaaaacaaacgacacctacatgaagttcagctggctgaccgtgcctgagagagctatgggcaaagaacacagatgcatcgtgaagcacgagaacaacaaaggcggagccgaccaagagatattcttcccgagcatcaagaaagtggccgtgtccaccaagccaaccacctgttggcaggacaagaacgacgtgctccagctccagttcaccatcaccagcgcctactacacatacctgctgctgctcctcaagagcgtgatctacctggccatcatcagcttcagcctgctgcggagaacaagcgtgtgcggcaacgagaagaagtccagggccaagcgatctggatctggagcaacaaacttctcactactcaaacaagcaggtgacgtggaggagaatcccgggcctactagtatggactggatttggcgcatccttttccttgtcggcgctgctaccggcgcgcattccttcgaacaagttcagcttcaacagcctggcgctgagctggtcaaacctggcgcttctgtgaagatgagctgcaaagccagcggctacgccttcagcagctactggatcaactggatgaagcagaaacccggccagggactcgaatggatcggccaaatctatcccggcgacggcgacaccaactacaacggcaagttcaagggcagagccacactgaccgccgatacctctagcagcacagcctacatgcagctgagcagcctgaccagcgaagatagcgccgtgtacttctgtgcccggtccatcacaacagtcgtgggctgcgctatggactattggggccagggaacaagcgtgaccgtgtctagtacgcgtcctcacaccaagcccagcgtgttcgtgatgaagaacggcaccaacgtggcctgcctcgtgaaagagttctaccccaaggacatcaggatcaacctggtgtccagcaagaagatcaccgagttcgaccccgccatcgtgatctcccccagcggcaagtacaacgccgtgaagctggggaagtacgaggacagcaacagcgtgacctgctccgtgcagcacgacaacaagaccgtgcacagcaccgactttgaagtgaaaaccgactccaccgaccacgtgaagcccaaagagacagagaacaccaagcagcccagcaagagctgccacaagcccaaggccatcgtgcacaccgagaaagtgaacatgatgagcctgaccgtgctgggcctgcggatgctgttcgccaaaaccgtggccgtgaacttcctgctgaccgccaagctgttcttcctccgcgccaagagaagcggatctggcgtgaagcagaccctgaatttcgacctgctgaagctggctggcgacgtggaatccaacccaggcccttctagaggccatatgaccgagtacaagcccacggtgcgcctcgccacccgcgacgacgtccccagggccgtacgcaccctcgccgccgcgttcgccgactaccccgccacgcgccacaccgtcgatccggaccgccacatcgagcgggtcaccgagctgcaagaactcttcctcacgcgcgtcgggctcgacatcggcaaggtgtgggtcgcggacgacggcgccgcggtggcggtctggaccacgccggagagcgtcgaagcgggggcggtgttcgccgagatcggcccgcgcatggccgagttgagcggttcccggctggccgcgcagcaacagatggaaggcctcctggcgccgcaccggcccaaggagcccgcgtggttcctggccaccgtcggcgtctcgcccgaccaccagggcaagggtctgggcagcgccgtcgtgctccccggagtggaggcggccgagcgcgccggggtgcccgccttcctggagacctccgcgccccgcaacctccccttctacgagcggctcggcttcaccgtcaccgccgacgtcgaggtgcccgaaggaccgcgcacctggtgcatgacccgcaagcccggtgcctga

SEQ ID NO: 32475 - DNA, 2733 bp, synthetic construct
  source 1..2733: mol_type = other DNA
atggccttaccagtgaccgccttgctcctgccgctggccttgctgctccacgccgccaggccggacatccagatgacacagagccctagcagcctgtctgccagcgtgggagacagagtgaccatcacatgcaaggccagcgaccacatcaacaactggctggcctggtatcagcagaagcctggacaggcccctaagctgctgatctacggcgctaccacactggaaacaggcgtgcccagcagattttctggcagcggctctggcaccgactacaccctgacaatatccagcctccagcctgaggacttcgccacctactactgtcagcagagctggaacaccccttggacattcggccagggcaccaagctggaaatcaagagactcgaggacctgaagaacgtgttcccacctgaggtggccgtgttcgagcctagcgaggccgagatcagccacacccagaaagccaccctcgtgtgcctggctaccggcttctaccccgaccatgtggaactgtcttggtgggtcaacggcaaagaggtgcacagcggcgtgtgtaccgacccccagccactgaaagaacagcccgccctgaacgacagccggtactgcctgagcagcagactgagagtgtccgccaccttctggcagaacccccggaaccacttcagatgccaggtgcagttctacggcctgagcgagaacgacgagtggacccaggacagagccaagcccgtgacccagatcgtgtctgccgaagcctggggcagagccgattgcggctttaccagcgagagctaccagcagggcgtgctgagcgccaccatcctgtacgagatcctgctgggcaaggccaccctgtacgccgtgctggtgtctgccctggtgctgatggctatggtcaagcggaaggacagccggggaagggccaagcgatctggatctggagcaacaaacttctcactactcaaacaagcaggtgacgtggaggagaatcccgggcctactagtatggactggatttggcgcatccttttccttgtcggcgctgctaccggcgcgcattccttcgaacaagttcagcttcaacagcctggcgctgagctggtcaaacctggcgcttctgtgaagatgagctgcaaagccagcggctacgccttcagcagctactggatcaactggatgaagcagaaacccggccagggactcgaatggatcggccaaatctatcccggcgacggcgacaccaactacaacggcaagttcaagggcagagccacactgaccgccgatacctctagcagcacagcctacatgcagctgagcagcctgaccagcgaagatagcgccgtgtacttctgtgcccggtccatcacaacagtcgtgggctgcgctatggactattggggccagggaacaagcgtgaccgtgtctagtacgcgtatccagaaccctgatcctgccgtgtaccagctgcgggatagcaagagcagcgacaagagcgtgtgtctgttcaccgacttcgacagccagaccaacgtgtcccagagcaaggactccgacgtgtacatcaccgataagtgcgtgctggacatgcggagcatggacttcaagagcaactccgccgtggcctggtccaacaagtccgatttcgcctgcgccaacgccttcaacaacagcattatccccgaggacacattcttcccaagccccgagagcagctgcgacgtgaagctggtggaaaagagcttcgagacagacaccaacctgaacttccagaacctgagcgtgatcggcttcagaatcctgctgctgaaagtggccggctttaacctgctgatgaccctgcggctgtggtccagccgcgccaagagaagcggatctggcgtgaagcagaccctgaatttcgacctgctgaagctggctggcgacgtggaatccaacccaggcccttctagaatggaatacgcctctgacgcttcactggaccccgaagccccgtggcctcccgcgccccgcgctcgcgcctgccgcgtactgccttgggccctggtcgcggggctgctgctgctgctgctgctcgctgccgcctgcgccgtcttcctcgcctgcccctgggccgtgtccggggctcgcgcctcgcccggctccgcggccagcccgagactccgcgagggtcccgagctttcgcccgacgatcccgccggcctcttggacctgcggcagggcatgtttgcgcagctggtggcccaaaatgttctgctgatcgatgggcccctgagctggtacagtgacccaggcctggcaggcgtgtccctgacggggggcctgagctacaaagaggacacgaaggagctggtggtggccaaggctggagtctactatgtcttctttcaactagagctgcggcgcgtggtggccggcgagggctcaggctccgtttcacttgcgctgcacctgcagccactgcgctctgctgctggggccgccgccctggctttgaccgtggacctgccacccgcctcctccgaggctcggaactcggccttcggtttccagggccgcttgctgcacctgagtgccggccagcgcctgggcgtccatcttcacactgaggccagggcacgccatgcctggcagcttacccagggcgccacagtcttgggactcttccgggtgacccccgaaatcccagccggactcccttcaccgaggtcggaacatatgtga

SEQ ID NO: 32476 - DNA, 2727 bp, synthetic construct
  source 1..2727: mol_type = other DNA
atggccttaccagtgaccgccttgctcctgccgctggccttgctgctccacgccgccaggccggacatccagatgacacagactacatcctccctgtctgcctctctgggagacagagtcaccatcagttgcagggcaagtcaggacattagtaagtacctgaactggtatcagcagaaaccagatggaactgttaaactcctgatctaccatacatcaagattacactcaggagtcccatcaaggttcagtggcagtgggtctggaacagattattctctcaccattagcaacctggagcaagaagatattgccacttacttttgccaacagggtaatacgcttccgtacacgttcggaggggggaccaagctggagatcacactcgagatccagaaccctgatcctgccgtgtaccagctgcgggatagcaagagcagcgacaagagcgtgtgtctgttcaccgacttcgacagccagaccaacgtgtcccagagcaaggactccgacgtgtacatcaccgataagtgcgtgctggacatgcggagcatggacttcaagagcaactccgccgtggcctggtccaacaagtccgatttcgcctgcgccaacgccttcaacaacagcattatccccgaggacacattcttcccaagcagcgacgtgccctgcgacgtgaagctggtggaaaagagcttcgagacagacaccaacctgaacttccagaacctgagcgtgatcggcttcagaatcctgctgctgaaagtggccggctttaacctgctgatgaccctgcggctgtggtccagccgcgccaagagaagcggatctggcgtgaagcagaccctgaatttcgacctgctgaagctggctggcgacgtggaatccaacccaggccctactagtatggactggatttggcgcatccttttccttgtcggcgctgctaccggcgcgcattccttcgaagtgaaactgcaggagtcaggacctggcctggtggcgccctcacagagcctgtccgtcacatgcactgtctcaggggtctcattacccgactatggtgtaagctggattcgccagcctccacgaaagggtctggagtggctgggagtaatatggggtagtgaaaccacatactataattcagctctcaaatccagactgaccatcatcaaggacaactccaagagccaagttttcttaaaaatgaacagtctgcaaactgatgacacagccatttactactgtgccaaacattattactacggtggtagctatgctatggactactggggccaaggaacctcagtcaccgtctcctcaacgcgtgaggacctgaagaacgtgttcccacctgaggtggccgtgttcgagcctagcaaggccgagatcgcccacacccagaaagccaccctcgtgtgcctggctaccggcttctaccccgaccatgtggaactgtcttggtgggtcaacggcaaagaggtgcacagcggcgtgtgtaccgacccccagccactgaaagaacagcccgccctgaacgacagccggtactgcctgagcagcagactgagagtgtccgccaccttctggcagaacccccggaaccacttcagatgccaggtgcagttctacggcctgagcgagaacgacgagtggacccaggacagagccaagcccgtgacccagatcgtgtctgccgaagcctggggcagagccgattgcggcatcaccagcgccagctaccaccagggcgtgctgagcgccaccatcctgtacgagatcctgctgggcaaggccaccctgtacgccgtgctggtgtctgccctggtgctgatggctatggtcaagcggaaggacagccggggaagggccaagcgatctggatctggagcaacaaacttctcactactcaaacaagcaggtgacgtggaggagaatcccgggccttctagaatggaatacgcctctgacgcttcactggaccccgaagccccgtggcctcccgcgccccgcgctcgcgcctgccgcgtactgccttgggccctggtcgcggggctgctgctgctgctgctgctcgctgccgcctgcgccgtcttcctcgcctgcccctgggccgtgtccggggctcgcgcctcgcccggctccgcggccagcccgagactccgcgagggtcccgagctttcgcccgacgatcccgccggcctcttggacctgcggcagggcatgtttgcgcagctggtggcccaaaatgttctgctgatcgatgggcccctgagctggtacagtgacccaggcctggcaggcgtgtccctgacggggggcctgagctacaaagaggacacgaaggagctggtggtggccaaggctggagtctactatgtcttctttcaactagagctgcggcgcgtggtggccggcgagggctcaggctccgtttcacttgcgctgcacctgcagccactgcgctctgctgctggggccgccgccctggctttgaccgtggacctgccacccgcctcctccgaggctcggaactcggccttcggtttccagggccgcttgctgcacctgagtgccggccagcgcctgggcgtccatcttcacactgaggccagggcacgccatgcctggcagcttacccagggcgccacagtcttgggactcttccgggtgacccccgaaatcccagccggactcccttcaccgaggtcggaacatatgtga

SEQ ID NO: 32477 - DNA, 2142 bp, synthetic construct
  source 1..2142: mol_type = other DNA
atggccttaccagtgaccgccttgctcctgccgctggccttgctgctccacgccgccaggccggacatccagatgacacagagccctagcagcctgtctgccagcgtgggagacagagttaccatcacatgcaaggccagcgaccacatcaacaactggctggcctggtatcagcagaagcctggacaggcccctaagctgctgatctacggcgctaccacactggaaacaggcgtgcccagcagattttctggcagcggctctggcaccgactacaccctgacaatatccagcctccagcctgaggacttcgccacctactactgtcagcagagctggaacaccccttggacattcggccagggcaccaagctggaaatcaagagaggcggaggcggaagtggaggcggaggatctggcggcggaggctctcaagttcagcttcaacagcctggcgctgagctggtcaaacctggcgcttctgtgaagatgagctgcaaagccagcggctacaccttcagcagctactggatcaactggatgaagcagaaacccggccagggactcgaatggatcggccaaatctatcccggcgacggcgacaccaactacaacggcaagttcaagggcagagccacactgaccgccgatacctctagcagcacagcctacatgcagctgagcagcctgaccagcgaagatagcgccgtgtacttctgtgcccggtccatcacaacagtcgtgggctgcgctatggactattggggccagggaacaagcgtgaccgtgtctagtacgcgtaccacgacgccagcgccgcgaccaccaacaccggcgcccaccatcgcgtcgcagcccctgtccctgcgcccagaggcgtgccggccagcggcggggggcgcagtgcacacgagggggctggacttcgcctgtgacatctacatctgggcgcccttggccgggacttgtggggtccttctcctgtcactggttatcaccctttactgcaaacggggcagaaagaaactcctgtatatattcaaacaaccatttatgagaccagtacaaactactcaagaggaagatggctgtagctgccgatttccagaagaagaagaaggaggatgtgaactgagagtgaagttcagcaggagcgcagacgcccccgcgtaccagcagggccagaaccagctctataacgagctgaatctaggacgaagagaggagtacgatgttttggacaagagacgtggccgggaccctgagatggggggaaagccgagaaggaagaaccctcaggaaggcctgtacaatgaactgcagaaagataagatggcggaggcctacagtgagattgggatgaaaggcgagcgccggaggggcaaggggcacgatggcctttaccagggtctcagtacagccaccaaggacacctacgacgcccttcacatgcaggccctgccccctcgctctagtggctccggcgagggcagaggaagtctactaacctgcggagatgtggaagaaaatcctggcccacatatgaccgagtacaagcccacggtgcgcctcgccacccgcgacgacgtccccagggccgtacgcaccctcgccgccgcgttcgccgactaccccgccacgcgccacaccgtcgatccggaccgccacatcgagcgggtcaccgagctgcaagaactcttcctcacgcgcgtcgggctcgacatcggcaaggtgtgggtcgcggacgacggcgccgcggtggcggtctggaccacgccggagagcgtcgaagcgggggcggtgttcgccgagatcggcccgcgcatggccgagttgagcggttcccggctggccgcgcagcaacagatggaaggcctcctggcgccgcaccggcccaaggagcccgcgtggttcctggccaccgtcggcgtctcgcccgaccaccagggcaagggtctgggcagcgccgtcgtgctccccggagtggaggcggccgagcgcgccggggtgcccgccttcctggagacctccgcgccccgcaacctccccttctacgagcggctcggcttcaccgtcaccgccgacgtcgaggtgcccgaaggaccgcgcacctggtgcatgacccgcaagcccggtgcctga

SEQ ID NO: 32478 - DNA, 2142 bp, synthetic construct
  source 1..2142: mol_type = other DNA
atggccttaccagtgaccgccttgctcctgccgctggccttgctgcttcacgccgccaggccggacatccagatgacacagagccctagcagcctgtctgccagcgtgggagacagagtgaccatcacatgcaaggccagcgaccacatcaacaactggctggcctggtatcagcagaagcctggacaggcccctaagctgctgatctacggcgctaccacactggaaacaggcgtgcccagcagattttctggcagcggctctggcaccgactacaccctgacaatatccagcctccagcctgaggacttcgccacctactactgtcagcagagctggaacaccccttggacattcggccagggcaccaagctggaaatcaagagaggcggaggcggaagtggaggcggaggatctggcggcggaggctctcaagttcagcttcaacagcctggcgctgagctggtcaaacctggcgcttctgtgaagatgagctgcaaagccagcggctacgccttcagcagctcttggatcaactggatgaagcagaaacccggccagggactcgaatggatcggccaaatctatcccggcgacggcgacaccaactacaacggcaagttcaagggcagagccacactgaccgccgatacctctagcagcacagcctacatgcagctgagcagcctgaccagcgaagatagcgccgtgtacttctgtgcccggtccatcacaacagtcgtgggctgcgctatggactattggggccagggaacaagcgtgaccgtgtctagtacgcgtaccacgacgccagcgccgcgaccaccaacaccggcgcccaccatcgcgtcgcagcccctgtccctgcgcccagaggcgtgccggccagcggcggggggcgcagtgcacacgagggggctggacttcgcctgtgacatctacatctgggcgcccttggccgggacttgtggggtccttctcctgtcactggttatcaccctttactgcaaacggggcagaaagaaactcctgtatatattcaaacaaccatttatgagaccagtacaaactactcaagaggaagatggctgtagctgccgatttccagaagaagaagaaggaggatgtgaactgagagtgaagttcagcaggagcgcagacgcccccgcgtaccagcagggccagaaccagctctataacgagctgaatctaggacgaagagaggagtacgatgttttggacaagagacgtggccgggaccctgagatggggggaaagccgagaaggaagaaccctcaggaaggcctgtacaatgaactgcagaaagataagatggcggaggcctacagtgagattgggatgaaaggcgagcgccggaggggcaaggggcacgatggcctttaccagggtctcagtacagccaccaaggacacctacgacgcccttcacatgcaggccctgccccctcgctctagtggctccggcgagggcagaggaagtctactaacctgcggagatgtggaagaaaatcctggcccacatatgaccgagtacaagcccacggtgcgcctcgccacccgcgacgacgtccccagggccgtacgcaccctcgccgccgcgttcgccgactaccccgccacgcgccacaccgtcgatccggaccgccacatcgagcgggtcaccgagctgcaagaactcttcctcacgcgcgtcgggctcgacatcggcaaggtgtgggtcgcggacgacggcgccgcggtggcggtctggaccacgccggagagcgtcgaagcgggggcggtgttcgccgagatcggcccgcgcatggccgagttgagcggttcccggctggccgcgcagcaacagatggaaggcctcctggcgccgcaccggcccaaggagcccgcgtggttcctggccaccgtcggcgtctcgcccgaccaccagggcaagggtctgggcagcgccgtcgtgctccccggagtggaggcggccgagcgcgccggggtgcccgccttcctggagacctccgcgccccgcaacctccccttctacgagcggctcggcttcaccgtcaccgccgacgtcgaggtgcccgaaggaccgcgcacctggtgcatgacccgcaagcccggtgcctga

SEQ ID NO: 32479 - DNA, 2142 bp, synthetic construct
  source 1..2142: mol_type = other DNA
atggccttaccagtgaccgccttgctcctgccgctggccttgctgctccacgccgccaggccggacatccagatgacacagagccctagcagcctgtctgccagcgtgggagacagagtgaccatcacatgcaaggccagcgaccacatcaacaactggctggcctggtatcagcagaagcctggacaggcccctaagctgctgatctacggcgctaccacactggaaacaggcgtgcccagcagattttctggcagcggctctggcaccgactacaccctgacaatatccagcctccagcctgaggacttcgccacctactactgtcagcagagctggaacaccccttggacattcggccagggcaccaagctggaaatcaagagaggcggaggcggaagtggaggcggaggatctggcggcggaggctctcaagttcagcttcaacagcctggcgctgagctggtcaaacctggcgcttctgtgaagatgagctgcaaagccagcggctacgccttcaacagctactggatcaactggatgaagcagaaacccggccagggactcgaatggatcggccaaatctatcccggcgacggcgacaccaactacaacggcaagttcaagggcagagccacactgaccgccgatacctctagcagcacagcctacatgcagctgagcagcctgaccagcgaagatagcgccgtgtacttctgtgcccggtccatcacaacagtcgtgggctgcgctatggactattggggccagggaacaagcgtgaccgtgtctagtacgcgtaccacgacgccagcgccgcgaccaccaacaccggcgcccaccatcgcgtcgcagcccctgtccctgcgcccagaggcgtgccggccagcggcggggggcgcagtgcacacgagggggctggacttcgcctgtgacatctacatctgggcgcccttggccgggacttgtggggtccttctcctgtcactggttatcaccctttactgcaaacggggcagaaagaaactcctgtatatattcaaacaaccatttatgagaccagtacaaactactcaagaggaagatggctgtagctgccgatttccagaagaagaagaaggaggatgtgaactgagagtgaagttcagcaggagcgcagacgcccccgcgtaccagcagggccagaaccagctctataacgagctgaatctaggacgaagagaggagtacgatgttttggacaagagacgtggccgggaccctgagatggggggaaagccgagaaggaagaaccctcaggaaggcctgtacaatgaactgcagaaagataagatggcggaggcctacagtgagattgggatgaaaggcgagcgccggaggggcaaggggcacgatggcctttaccagggtctcagtacagccaccaaggacacctacgacgcccttcacatgcaggccctgccccctcgctctagtggctccggcgagggcagaggaagtctactaacctgcggagatgtggaagaaaatcctggcccacatatgaccgagtacaagcccacggtgcgcctcgccacccgcgacgacgtccccagggccgtacgcaccctcgccgccgcgttcgccgactaccccgccacgcgccacaccgtcgatccggaccgccacatcgagcgggtcaccgagctgcaagaactcttcctcacgcgcgtcgggctcgacatcggcaaggtgtgggtcgcggacgacggcgccgcggtggcggtctggaccacgccggagagcgtcgaagcgggggcggtgttcgccgagatcggcccgcgcatggccgagttgagcggttcccggctggccgcgcagcaacagatggaaggcctcctggcgccgcaccggcccaaggagcccgcgtggttcctggccaccgtcggcgtctcgcccgaccaccagggcaagggtctgggcagcgccgtcgtgctccccggagtggaggcggccgagcgcgccggggtgcccgccttcctggagacctccgcgccccgcaacctccccttctacgagcggctcggcttcaccgtcaccgccgacgtcgaggtgcccgaaggaccgcgcacctggtgcatgacccgcaagcccggtgcctga

SEQ ID NO: 32480 - DNA, 1473 bp, synthetic construct; identical to SEQ ID NO: 32416
  source 1..1473: mol_type = other DNA

SEQ ID NO: 32481 - DNA, 2268 bp, synthetic construct
  source 1..2268: mol_type = other DNA
atggccttaccagtgaccgccttgctcctgccgctggccttgctgctccacgccgccaggccggacatccagatgacacagagccctagcagcctgtctgccagcgtgggagacagagtgaccatcacatgcaaggccagcgaccacatcaacaactggctggcctggtatcagcagaagcctggacaggcccctaagctgctgatctacggcgctaccacactggaaacaggcgtgcccagcagattttctggcagcggctctggcaccgactacaccctgacaatatccagcctccagcctgaggacttcgccacctactactgtcagcagagctggaacaccccttggacattcggccagggcaccaagctggaaatcaagagactcgaggacctgaagaacgtgttcccacctgaggtggccgtgttcgagcctagcgaggccgagatcagccacacccagaaagccaccctcgtgtgcctggctaccggcttctaccccgaccatgtggaactgtcttggtgggtcaacggcaaagaggtgcacagcggcgtgtctaccgacccccagccactgaaagaacagcccgccctgaacgacagccggtactgcctgagcagcagactgagagtgtccgccaccttctggcagaacccccggaaccacttcagatgccaggtgcagttctacggcctgagcgagaacgacgagtggacccaggacagagccaagcccgtgacccagatcgtgtctgccgaagcctggggcagagccgattgcggatccatgtgtcagagctgcgttgaactcgatccggccaccgtcgccgggattatcgtgaccgacgtaattgctacactgctgcttgcacttggggtattctgtttcgcgggacacgagacggggagactctccggcgctgcggacacacaggcccttttgagaaacgatcaggtctaccaacctttgcgggatcgagacgatgcccaatactcccaccttggcgggaactgggccaggaataagagggccaagcgatctggatctggagcaacaaacttctcactactcaaacaagcaggtgacgtggaggagaatcccgggcctactagtatggactggatttggcgcatccttttccttgtcggcgctgctaccggcgcgcattccttcgaacaagttcagcttcaacagcctggcgctgagctggtcaaacctggcgcttctgtgaagatgagctgcaaagccagcggctacgccttcagcagctactggatcaactggatgaagcagaaacccggccagggactcgaatggatcggccaaatctatcccggcgacggcgacaccaactacaacggcaagttcaagggcagagccacactgaccgccgatacctctagcagcacagcctacatgcagctgagcagcctgaccagcgaagatagcgccgtgtacttctgtgcccggtccatcacaacagtcgtgggctgcgctatggactattggggccagggaacaagcgtgaccgtgtctagtacgcgtatccagaaccctgatcctgccgtgtaccagctgcgggatagcaagagcagcgacaagagcgtgtgtctgttcaccgacttcgacagccagaccaacgtgtcccagagcaaggactccgacgtgtacatcaccgataagaccgtgctggacatgcggagcatggacttcaagagcaactccgccgtggcctggtccaacaagtccgatttcgcctgcgccaacgccttcaacaacagcattatccccgaggacacattcttcccaagccccgagagcagctgcggtacccagagttttgggttgttggaccctaaattgtgctatctgttggacggaatcctgttcatttacggagtgatcctgaccgcattgttcctgcgggttaagttttccagatccgcagacgcacccgcttaccaacaagggcagaaccaactctacaatgaacttaatttggggcggagggaagagtacgacgttctggacaaaaggaggggacgagatcccgagatgggcggaaagcctcagcgaaggaagaatccgcaagaggggctttataacgaactccagaaagataaaatggcagaagcctatagtgagattgggatgaagggagaaaggaggaggggtaaaggtcacgatgggttgtaccaaggattgagcacagccactaaagatacctatgatgcgctccacatgcaggccctgccgccaagataa

SEQ ID NO: 32482 - DNA, 2358 bp, synthetic construct
  source 1..2358: mol_type = other DNA
atggccttaccagtgaccgccttgctcctgccgctggccttgctgctccacgccgccaggccggacatccagatgacacagagccctagcagcctgtctgccagcgtgggagacagagtgaccatcacatgcaaggccagcgaccacatcaacaactggctggcctggtatcagcagaagcctggacaggcccctaagctgctgatctacggcgctaccacactggaaacaggcgtgcccagcagattttctggcagcggctctggcaccgactacaccctgacaatatccagcctccagcctgaggacttcgccacctactactgtcagcagagctggaacaccccttggacattcggccagggcaccaagctggaaatcaagagactcgaggacctgaagaacgtgttcccacctgaggtggccgtgttcgagcctagcgaggccgagatcagccacacccagaaagccaccctcgtgtgcctggctaccggcttctaccccgaccatgtggaactgtcttggtgggtcaacggcaaagaggtgcacagcggcgtgtctaccgacccccagccactgaaagaacagcccgccctgaacgacagccggtactgcctgagcagcagactgagagtgtccgccaccttctggcagaacccccggaaccacttcagatgccaggtgcagttctacggcctgagcgagaacgacgagtggacccaggacagagccaagcccgtgacccagatcgtgtctgccgaagcctggggcagagccgattgcggatcccagagcttcggcctgctggaccccaagctgtgctacctgctggatggcatcctgttcatctacggcgtgatcctgaccgccctgttcctgagagtgaagttcagcagaagcgccgacgcccctgcctaccagcagggacagaaccaactgtacaacgagctgaacctgggcagacgggaagagtacgacgtgctggacaagcggagaggcagggaccctgagatgggcggaaagccccagcggagaaagaacccccaggaaggactgtataacgaactccagaaagacaagatggccgaagcctacagcgagatcggcatgaagggcgagcggagaagaggcaagggccacgatggcctgtaccagggcctgagcaccgccaccaaggacacctatgacgccctgcacatgcaggccctgcctccaagaagggccaagcgatctggatctggagcaacaaacttctcactactcaaacaagcaggtgacgtggaggagaatcccgggcctactagtatggactggatttggcgcatccttttccttgtcggcgctgctaccggcgcgcattccttcgaacaagttcagcttcaacagcctggcgctgagctggtcaaacctggcgcttctgtgaagatgagctgcaaagccagcggctacgccttcagcagctactggatcaactggatgaagcagaaacccggccagggactcgaatggatcggccaaatctatcccggcgacggcgacaccaactacaacggcaagttcaagggcagagccacactgaccgccgatacctctagcagcacagcctacatgcagctgagcagcctgaccagcgaagatagcgccgtgtacttctgtgcccggtccatcacaacagtcgtgggctgcgctatggactattggggccagggaacaagcgtgaccgtgtctagtacgcgtatccagaaccctgatcctgccgtgtaccagctgcgggatagcaagagcagcgacaagagcgtgtgtctgttcaccgacttcgacagccagaccaacgtgtcccagagcaaggactccgacgtgtacatcaccgataagaccgtgctggacatgcggagcatggacttcaagagcaactccgccgtggcctggtccaacaagtccgatttcgcctgcgccaacgccttcaacaacagcattatccccgaggacacattcttcccaagccccgagagcagctgcggtaccatgtgccagtcctgcgtggaactggaccctgctacagtggccggcatcatcgtgaccgatgtgatcgctactctgctgctggctctgggagtgttctgcttcgccggacacgaaacaggcagactgtctggcgctgccgatacacaggccctgctgagaaacgaccaagtgtatcagcccctgcgcgacagagatgatgcccagtattctcacctcggcggcaactgggctagaaacaagagggccaagcgatctggatctggacaatgcactaattacgcattgctcaagctggccggtgacgttgagagtaatcctggcccctctagataa

SEQ ID NO: 32483 - DNA, 2364 bp, synthetic construct; identical to SEQ ID NO: 994
  source 1..2364: mol_type = other DNA

SEQ ID NO: 32484 - DNA, 2394 bp, synthetic construct
  source 1..2394: mol_type = other DNA
atggccttaccagtgaccgccttgctcctgccgctggccttgctgctccacgccgccaggccggacatccagatgacacagagccctagcagcctgtctgccagcgtgggagacagagtgaccatcacatgcaaggccagcgaccacatcaacaactggctggcctggtatcagcagaagcctggacaggcccctaagctgctgatctacggcgctaccacactggaaacaggcgtgcccagcagattttctggcagcggctctggcaccgactacaccctgacaatatccagcctccagcctgaggacttcgccacctactactgtcagcagagctggaacaccccttggacattcggccagggcaccaagctggaaatcaagagactcgaggacctgaagaacgtgttcccacctgaggtggccgtgttcgagcctagcgaggccgagatcagccacacccagaaagccaccctcgtgtgcctggctaccggcttctaccccgaccatgtggaactgtcttggtgggtcaacggcaaagaggtgcacagcggcgtgtctaccgacccccagccactgaaagaacagcccgccctgaacgacagccggtactgcctgagcagcagactgagagtgtccgccaccttctggcagaacccccggaaccacttcagatgccaggtgcagttctacggcctgagcgagaacgacgagtggacccaggacagagccaagcccgtgacccagatcgtgtctgccgaagcctggggcagagccgattgcggatcccagagcttcggcctgctggaccccaagctgtgctacctgctggatggcatcctgttcatctacggcgtgatcctgaccgccctgttcctgagagtgaagttcagcagaagcgccgacgcccctgcctaccagcagggacagaaccaactgtacaacgagctgaacctgggcagacgggaagagtacgacgtgctggacaagcggagaggcagggaccctgagatgggcggaaagccccagcggagaaagaacccccaggaaggactgtataacgaactccagaaagacaagatggccgaagcctacagcgagatcggcatgaagggcgagcggagaagaggcaagggccacgatggcctgtaccagggcctgagcaccgccaccaaggacacctatgacgccctgcacatgcaggccctgcctccaagaagggccaagcgatctggatctggagcaacaaacttctcactactcaaacaagcaggtgacgtggaggagaatcccgggcctactagtatggactggatttggcgcatccttttccttgtcggcgctgctaccggcgcgcattccttcgaacaagttcagcttcaacagcctggcgctgagctggtcaaacctggcgcttctgtgaagatgagctgcaaagccagcggctacgccttcagcagctactggatcaactggatgaagcagaaacccggccagggactcgaatggatcggccaaatctatcccggcgacggcgacaccaactacaacggcaagttcaagggcagagccacactgaccgccgatacctctagcagcacagcctacatgcagctgagcagcctgaccagcgaagatagcgccgtgtacttctgtgcccggtccatcacaacagtcgtgggctgcgctatggactattggggccagggaacaagcgtgaccgtgtctagtacgcgtatccagaaccctgatcctgccgtgtaccagctgcgggatagcaagagcagcgacaagagcgtgtgtctgttcaccgacttcgacagccagaccaacgtgtcccagagcaaggactccgacgtgtacatcaccgataagaccgtgctggacatgcggagcatggacttcaagagcaactccgccgtggcctggtccaacaagtccgatttcgcctgcgccaacgccttcaacaacagcattatccccgaggacacattcttcccaagccccgagagcagctgcggtaccgtgtgcgaaaattgcatggaaatggacgttatgtccgttgctacaatagttatcgtagatatatgcatcacgggtggactgcttctgctggtttattattggtccaagaatagaaaggccaaagctaaacccgtgaccagaggcgctggcgcaggcggaaggcaaaggggacaaaacaaagaacggccaccaccagtgccaaatccagattatgagcctattcggaaaggacagagggacctgtactctggcctgaatcagagaagaatccgcgccaagagaagcggatctggcgtgaagcagaccctgaatttcgacctgctgaagctggctggcgacgtggaatccaacccaggcccttctagataa

SEQ ID NO: 32485 - DNA, 2580 bp, synthetic construct; identical to SEQ ID NO: 998
  source 1..2580: mol_type = other DNA

SEQ ID NO: 32486 - DNA, 2298 bp, synthetic construct
  source 1..2298: mol_type = other DNA
atggccttaccagtgaccgccttgctcctgccgctggccttgctgctccacgccgccaggccggacatccagatgacacagagccctagcagcctgtctgccagcgtgggagacagagtgaccatcacatgcaaggccagcgaccacatcaacaactggctggcctggtatcagcagaagcctggacaggcccctaagctgctgatctacggcgctaccacactggaaacaggcgtgcccagcagattttctggcagcggctctggcaccgactacaccctgacaatatccagcctccagcctgaggacttcgccacctactactgtcagcagagctggaacaccccttggacattcggccagggcaccaagctggaaatcaagagactcgaggacctgaagaacgtgttcccacctgaggtggccgtgttcgagcctagcgaggccgagatcagccacacccagaaagccaccctcgtgtgcctggctaccggcttctaccccgaccatgtggaactgtcttggtgggtcaacggcaaagaggtgcacagcggcgtgtctaccgacccccagccactgaaagaacagcccgccctgaacgacagccggtactgcctgagcagcagactgagagtgtccgccaccttctggcagaacccccggaaccacttcagatgccaggtgcagttctacggcctgagcgagaacgacgagtggacccaggacagagccaagcccgtgacccagatcgtgtctgccgaagcctggggcagagccgattgcggatcccagagcttcggcctgctggaccccaagctgtgctacctgctggatggcatcctgttcatctacggcgtgatcctgaccgccctgttcctgagagtgaagttcagcagaagcgccgacgcccctgcctaccagcagggacagaaccaactgtacaacgagctgaacctgggcagacgggaagagtacgacgtgctggacaagcggagaggcagggaccctgagatgggcggaaagccccagcggagaaagaacccccaggaaggactgtataacgaactccagaaagacaagatggccgaagcctacagcgagatcggcatgaagggcgagcggagaagaggcaagggccacgatggcctgtaccagggcctgagcaccgccaccaaggacacctatgacgccctgcacatgcaggccctgcctccaagaagggccaagcgatctggatctggagcaacaaacttctcactactcaaacaagcaggtgacgtggaggagaatcccgggcctactagtatggactggatttggcgcatccttttccttgtcggcgctgctaccggcgcgcattccttcgaacaagttcagcttcaacagcctggcgctgagctggtcaaacctggcgcttctgtgaagatgagctgcaaagccagcggctacgccttcagcagctactggatcaactggatgaagcagaaacccggccagggactcgaatggatcggccaaatctatcccggcgacggcgacaccaactacaacggcaagttcaagggcagagccacactgaccgccgatacctctagcagcacagcctacatgcagctgagcagcctgaccagcgaagatagcgccgtgtacttctgtgcccggtccatcacaacagtcgtgggctgcgctatggactattggggccagggaacaagcgtgaccgtgtctagtacgcgtatccagaaccctgatcctgccgtgtaccagctgcgggatagcaagagcagcgacaagagcgtgtgtctgttcaccgacttcgacagccagaccaacgtgtcccagagcaaggactccgacgtgtacatcaccgataagaccgtgctggacatgcggagcatggacttcaagagcaactccgccgtggcctggtccaacaagtccgatttcgcctgcgccaacgccttcaacaacagcattatccccgaggacacattcttcccaagccccgagagcagctgcggtaccgtgtgcgagaactgcatggaaatggacgtgatgtccgtggctaccatcgtgatcgtggacatctgcatcaccggcggactgctgctgctggtgtactactggtccaagaaccggaaggccaaggccaagcctgtgacaagaggtgctggtgctggcggcagacagagaggccagaacaaagaaagacctcctcctgtgcctaatcctgactacgagcccatcagaaaaggccagcgggatctgtacagcggcctgaaccagagaagaatctag

SEQ ID NO: 32487 - DNA, 2457 bp, synthetic construct; identical to SEQ ID NO: 999
  source 1..2457: mol_type = other DNA

SEQ ID NO: 32488 - DNA, 3336 bp, synthetic construct
  source 1..3336: mol_type = other DNA
atggccttaccagtgaccgccttgctcctgccgctggccttgctgctccacgccgccaggccggacatccagatgacacagagccctagcagcctgtctgccagcgtgggagacagagtgaccatcacatgcaaggccagcgaccacatcaacaactggctggcctggtatcagcagaagcctggacaggcccctaagctgctgatctacggcgctaccacactggaaacaggcgtgcccagcagattttctggcagcggctctggcaccgactacaccctgacaatatccagcctccagcctgaggacttcgccacctactactgtcagcagagctggaacaccccttggacattcggccagggcaccaagctggaaatcaagagactcgagggacagcctaaggccaatcctaccgtgacactgttccctccaagcagcgaagaactccaggccaacaaggccacacttgtgtgcctgatctccgacttctaccctggggctgtgacagtggcttggaaggccgatggatctcctgtgaaagccggcgtggaaaccaccaagccatccaagcagagcaacaacaaatacgccgccagctcctacctgagcctgacacctgagcagtggaagtcccacagatcctacagctgccaagtgacccacgaaggcagcaccgtggaaaagacagtggcccctacagagtgcagcggcagagccgattgcggctttaccagcgagagctaccagcagggcgtgctgagcgccaccatcctgtacgagatcctgctgggcaaggccaccctgtacgccgtgctggtgtctgccctggtgctgatggctatggtcaagcggaaggacagccggggaactagtagagtgaagttcagcagaagcgccgacgcccctgcctaccagcagggacagaaccaactgtacaacgagctgaacctgggcagacgggaagagtacgacgtgctggacaagcggagaggcagggaccctgagatgggcggaaagccccagcggagaaagaacccccaggaaggactgtataacgaactccagaaagacaagatggccgaagcctacagcgagatcggcatgaagggcgagcggagaagaggcaagggccacgatggcctgtaccagggcctgagcaccgccaccaaggacacctatgacgccctgcacatgcaggccctgcctccaagaagggccaagcgatctggatctggagcaacaaacttctcactactcaaacaagcaggtgacgtggaggagaatcccgggcctatggactggatttggcgcatccttttccttgtcggcgctgctaccggcgcgcattccttcgaacaagttcagcttcaacagcctggcgctgagctggtcaaacctggcgcttctgtgaagatgagctgcaaagccagcggctacgccttcagcagctactggatcaactggatgaagcagaaacccggccagggactcgaatggatcggccaaatctatcccggcgacggcgacaccaactacaacggcaagttcaagggcagagccacactgaccgccgatacctctagcagcacagcctacatgcagctgagcagcctgaccagcgaagatagcgccgtgtacttctgtgcccggtccatcacaacagtcgtgggctgcgctatggactattggggccagggaacaagcgtgaccgtgtctagtacgcgtgcctctacaaagggaccctccgtgtttcctctggctcccagcagcaagtctacaagcggaggaacagccgctctgggctgcctggtcaaggattactttcccgagcctgtgaccgtgtcctggaatagcggagcactgacaagcggcgtgcacacctttccagccgtgctgcaaagcagcggcctgtactctctgagcagcgtggtcacagtgcctagctctagcctgggcacccagacctacatctgcaatgtgaaccacaagcctagcaacaccaaggtggacaagagagtggaacccaagagctgtggtacctctggacaggtgctgctggaaagcaacatcaaggtgctgcccacctggtccacccccgtgcagcctatggctctgattgtgctgggcggagtggccggactgctgctgtttattggcctgggcatcttcttttgcgtgcggtgcagacaccggcggagacaggccgagagaatgagccagatcaagagactgctgtccgagaagaaaacctgccagtgcccccacagattccagaaaacatgcagccccatctctagacgggttaagttttccagatccgcagacgcacccgcttaccaacaagggcagaaccaactctacaatgaacttaatttggggcggagggaagagtacgacgttctggacaaaaggaggggacgagatcccgagatgggcggaaagcctcagcgaaggaagaatccgcaagaggggctttataacgaactccagaaagataaaatggcagaagcctatagtgagattgggatgaagggagaaaggaggaggggtaaaggtcacgatgggttgtaccaaggattgagcacagccactaaagatacctatgatgcgctccacatgcaggccctgccgccaagacgcgccaagagaagcggatctggcgtgaagcagaccctgaatttcgacctgctgaagctggctggcgacgtggaatccaacccaggccctggccatatgaccgagtacaagcccacggtgcgcctcgccacccgcgacgacgtccccagggccgtacgcaccctcgccgccgcgttcgccgactaccccgccacgcgccacaccgtcgatccggaccgccacatcgagcgggtcaccgagctgcaagaactcttcctcacgcgcgtcgggctcgacatcggcaaggtgtgggtcgcggacgacggcgccgcggtggcggtctggaccacgccggagagcgtcgaagcgggggcggtgttcgccgagatcggcccgcgcatggccgagttgagcggttcccggctggccgcgcagcaacagatggaaggcctcctggcgccgcaccggcccaaggagcccgcgtggttcctggccaccgtcggcgtctcgcccgaccaccagggcaagggtctgggcagcgccgtcgtgctccccggagtggaggcggccgagcgcgccggggtgcccgccttcctggagacctccgcgccccgcaacctccccttctacgagcggctcggcttcaccgtcaccgccgacgtcgaggtgcccgaaggaccgcgcacctggtgcatgacccgcaagcccggtgcctga

SEQ ID NO: 32489 - DNA, 3216 bp, synthetic construct
  source 1..3216: mol_type = other DNA
atggccttaccagtgaccgccttgctcctgccgctggccttgctgctccacgccgccaggccggacatccagatgacacagagccctagcagcctgtctgccagcgtgggagacagagtgaccatcacatgcaaggccagcgaccacatcaacaactggctggcctggtatcagcagaagcctggacaggcccctaagctgctgatctacggcgctaccacactggaaacaggcgtgcccagcagattttctggcagcggctctggcaccgactacaccctgacaatatccagcctccagcctgaggacttcgccacctactactgtcagcagagctggaacaccccttggacattcggccagggcaccaagctggaaatcaagagactcgaggacctgaagaacgtgttcccacctgaggtggccgtgttcgagcctagcgaggccgagatcagccacacccagaaagccaccctcgtgtgcctggctaccggcttctaccccgaccatgtggaactgtcttggtgggtcaacggcaaagaggtgcacagcggcgtgtctaccgacccccagccactgaaagaacagcccgccctgaacgacagccggtactgcctgagcagcagactgagagtgtccgccaccttctggcagaacccccggaaccacttcagatgccaggtgcagttctacggcctgagcgagaacgacgagtggacccaggacagagccaagcccgtgacccagatcgtgtctgccgaagcctggggcagagccgattgcggatcccagagcttcggcctgctggaccccaagctgtgctacctgctggatggcatcctgttcatctacggcgtgatcctgaccgccctgttcctgagagtgaagttcagcagaagcgccgacgcccctgcctaccagcagggacagaaccaactgtacaacgagctgaacctgggcagacgggaagagtacgacgtgctggacaagcggagaggcagggaccctgagatgggcggaaagccccagcggagaaagaacccccaggaaggactgtataacgaactccagaaagacaagatggccgaagcctacagcgagatcggcatgaagggcgagcggagaagaggcaagggccacgatggcctgtaccagggcctgagcaccgccaccaaggacacctatgacgccctgcacatgcaggccctgcctccaagaagggccaagcgatctggatctggagcaacaaacttctcactactcaaacaagcaggtgacgtggaggagaatcccgggcctactagtatggactggatttggcgcatccttttccttgtcggcgctgctaccggcgcgcattccttcgaacaagttcagcttcaacagcctggcgctgagctggtcaaacctggcgcttctgtgaagatgagctgcaaagccagcggctacgccttcagcagctactggatcaactggatgaagcagaaacccggccagggactcgaatggatcggccaaatctatcccggcgacggcgacaccaactacaacggcaagttcaagggcagagccacactgaccgccgatacctctagcagcacagcctacatgcagctgagcagcctgaccagcgaagatagcgccgtgtacttctgtgcccggtccatcacaacagtcgtgggctgcgctatggactattggggccagggaacaagcgtgaccgtgtctagtacgcgtatccagaaccctgatcctgccgtgtaccagctgcgggatagcaagagcagcgacaagagcgtgtgtctgttcaccgacttcgacagccagaccaacgtgtcccagagcaaggactccgacgtgtacatcaccgataagtgcgtgctggacatgcggagcatggacttcaagagcaactccgccgtggcctggtccaacaagtccgatttcgcctgcgccaacgccttcaacaacagcattatccccgaggacacattcttcccaagccccgagagcagctgcgacgtgaagctggtggaaaagagcttcgagacagacaccaacctgaacttccagaacctgagcggtacccagagttttgggttgttggaccctaaattgtgctatctgttggacggaatcctgttcatttacggagtgatcctgaccgcattgttcctgcgggttaagttttccagatccgcagacgcacccgcttaccaacaagggcagaaccaactctacaatgaacttaatttggggcggagggaagagtacgacgttctggacaaaaggaggggacgagatcccgagatgggcggaaagcctcgaaggaagaatccgcaagaggggctttataacgaactccagaaagataaaatggcagaagcctatagtgagattgggatgaagggagaaaggaggaggggtaaaggtcacgatgggttgtaccaaggattgagcacagccactaaagatacctatgatgcgctccacatgcaggccctgccgccaagacgcgccaagagaagcggatctggcgtgaagcagaccctgaatttcgacctgctgaagctggctggcgacgtggaatccaacccaggcccttctagaggccatatgaccgagtacaagcccacggtgcgcctcgccacccgcgacgacgtccccagggccgtacgcaccctcgccgccgcgttcgccgactaccccgccacgcgccacaccgtcgatccggaccgccacatcgagcgggtcaccgagctgcaagaactcttcctcacgcgcgtcgggctcgacatcggcaaggtgtgggtcgcggacgacggcgccgcggtggcggtctggaccacgccggagagcgtcgaagcgggggcggtgttcgccgagatcggcccgcgcatggccgagttgagcggttcccggctggccgcgcagcaacagatggaaggcctcctggcgccgcaccggcccaaggagcccgcgtggttcctggccaccgtcggcgtctcgcccgaccaccagggcaagggtctgggcagcgccgtcgtgctccccggagtggaggcggccgagcgcgccggggtgcccgccttcctggagacctccgcgccccgcaacctccccttctacgagcggctcggcttcaccgtcaccgccgacgtcgaggtgcccgaaggaccgcgcacctggtgcatgacccgcaagcccggtgcctga

SEQ ID NO: 32490 - DNA, 3189 bp, synthetic construct
  source 1..3189: mol_type = other DNA
atggccttaccagtgaccgccttgctcctgccgctggccttgctgctccacgccgccaggccggacatccagatgacacagagccctagcagcctgtctgccagcgtgggagacagagtgaccatcacatgcaaggccagcgaccacatcaacaactggctggcctggtatcagcagaagcctggacaggcccctaagctgctgatctacggcgctaccacactggaaacaggcgtgcccagcagattttctggcagcggctctggcaccgactacaccctgacaatatccagcctccagcctgaggacttcgccacctactactgtcagcagagctggaacaccccttggacattcggccagggcaccaagctggaaatcaagagactcgaggacctgaagaacgtgttcccacctgaggtggccgtgttcgagcctagcgaggccgagatcagccacacccagaaagccaccctcgtgtgcctggctaccggcttctaccccgaccatgtggaactgtcttggtgggtcaacggcaaagaggtgcacagcggcgtgtctaccgacccccagccactgaaagaacagcccgccctgaacgacagccggtactgcctgagcagcagactgagagtgtccgccaccttctggcagaacccccggaaccacttcagatgccaggtgcagttctacggcctgagcgagaacgacgagtggacccaggacagagccaagcccgtgacccagatcgtgtctgccgaagcctggggcagagccgattgcggatcccagagcttcggcctgctggaccccaagctgtgctacctgctggatggcatcctgttcatctacggcgtgatcctgaccgccctgttcctgagagtgaagttcagcagaagcgccgacgcccctgcctaccagcagggacagaaccaactgtacaacgagctgaacctgggcagacgggaagagtacgacgtgctggacaagcggagaggcagggaccctgagatgggcggaaagccccagcggagaaagaacccccaggaaggactgtataacgaactccagaaagacaagatggccgaagcctacagcgagatcggcatgaagggcgagcggagaagaggcaagggccacgatggcctgtaccagggcctgagcaccgccaccaaggacacctatgacgccctgcacatgcaggccctgcctccaagaagggccaagcgatctggatctggagcaacaaacttctcactactcaaacaagcaggtgacgtggaggagaatcccgggcctactagtatggactggatttggcgcatccttttccttgtcggcgctgctaccggcgcgcattccttcgaacaagttcagcttcaacagcctggcgctgagctggtcaaacctggcgcttctgtgaagatgagctgcaaagccagcggctacgccttcagcagctactggatcaactggatgaagcagaaacccggccagggactcgaatggatcggccaaatctatcccggcgacggcgacaccaactacaacggcaagttcaagggcagagccacactgaccgccgatacctctagcagcacagcctacatgcagctgagcagcctgaccagcgaagatagcgccgtgtacttctgtgcccggtccatcacaacagtcgtgggctgcgctatggactattggggccagggaacaagcgtgaccgtgtctagtacgcgtatccagaaccctgatcctgccgtgtaccagctgcgggatagcaagagcagcgacaagagcgtgtgtctgttcaccgacttcgacagccagaccaacgtgtcccagagcaaggactccgacgtgtacatcaccgataagtgcgtgctggacatgcggagcatggacttcaagagcaactccgccgtggcctggtccaacaagtccgatttcgcctgcgccaacgccttcaacaacagcattatccccgaggacacattcttcccaagccccgagagcagctgcgacgtgaagctggtggaaaagagcttcgagacagacggtacccagagttttgggttgttggaccctaaattgtgctatctgttggacggaatcctgttcatttacggagtgatcctgaccgcattgttcctgcgggttaagttttccagatccgcagacgcacccgcttaccaacaagggcagaaccaactctacaatgaacttaatttggggcggagggaagagtacgacgttctggacaaaaggaggggacgagatcccgagatgggcggaaagcctcgaaggaagaatccgcaagaggggctttataacgaactccagaaagataaaatggcagaagcctatagtgagattgggatgaagggagaaaggaggaggggtaaaggtcacgatgggttgtaccaaggattgagcacagccactaaagatacctatgatgcgctccacatgcaggccctgccgccaagacgcgccaagagaagcggatctggcgtgaagcagaccctgaatttcgacctgctgaagctggctggcgacgtggaatccaacccaggcccttctagaggccatatgaccgagtacaagcccacggtgcgcctcgccacccgcgacgacgtccccagggccgtacgcaccctcgccgccgcgttcgccgactaccccgccacgcgccacaccgtcgatccggaccgccacatcgagcgggtcaccgagctgcaagaactcttcctcacgcgcgtcgggctcgacatcggcaaggtgtgggtcgcggacgacggcgccgcggtggcggtctggaccacgccggagagcgtcgaagcgggggcggtgttcgccgagatcggcccgcgcatggccgagttgagcggttcccggctggccgcgcagcaacagatggaaggcctcctggcgccgcaccggcccaaggagcccgcgtggttcctggccaccgtcggcgtctcgcccgaccaccagggcaagggtctgggcagcgccgtcgtgctccccggagtggaggcggccgagcgcgccggggtgcccgccttcctggagacctccgcgccccgcaacctccccttctacgagcggctcggcttcaccgtcaccgccgacgtcgaggtgcccgaaggaccgcgcacctggtgcatgacccgcaagcccggtgcctga

SEQ ID NO: 32491 - DNA, 3120 bp, synthetic construct
  source 1..3120: mol_type = other DNA
atggccttaccagtgaccgccttgctcctgccgctggccttgctgctccacgccgccaggccggacatccagatgacacagagccctagcagcctgtctgccagcgtgggagacagagtgaccatcacatgcaaggccagcgaccacatcaacaactggctggcctggtatcagcagaagcctggacaggcccctaagctgctgatctacggcgctaccacactggaaacaggcgtgcccagcagattttctggcagcggctctggcaccgactacaccctgacaatatccagcctccagcctgaggacttcgccacctactactgtcagcagagctggaacaccccttggacattcggccagggcaccaagctggaaatcaagagactcgaggacctgaagaacgtgttcccacctgaggtggccgtgttcgagcctagcgaggccgagatcagccacacccagaaagccaccctcgtgtgcctggctaccggcttctaccccgaccatgtggaactgtcttggtgggtcaacggcaaagaggtgcacagcggcgtgtctaccgacccccagccactgaaagaacagcccgccctgaacgacagccggtactgcctgagcagcagactgagagtgtccgccaccttctggcagaacccccggaaccacttcagatgccaggtgcagttctacggcctgagcgagaacgacgagtggacccaggacagagccaagcccgtgacccagatcgtgtctgccgaagcctggggcagagccgattgcggatcccagagcttcggcctgctggaccccaagctgtgctacctgctggatggcatcctgttcatctacggcgtgatcctgaccgccctgttcctgagagtgaagttcagcagaagcgccgacgcccctgcctaccagcagggacagaaccaactgtacaacgagctgaacctgggcagacgggaagagtacgacgtgctggacaagcggagaggcagggaccctgagatgggcggaaagccccagcggagaaagaacccccaggaaggactgtataacgaactccagaaagacaagatggccgaagcctacagcgagatcggcatgaagggcgagcggagaagaggcaagggccacgatggcctgtaccagggcctgagcaccgccaccaaggacacctatgacgccctgcacatgcaggccctgcctccaagaagggccaagcgatctggatctggagcaacaaacttctcactactcaaacaagcaggtgacgtggaggagaatcccgggcctactagtatggactggatttggcgcatccttttccttgtcggcgctgctaccggcgcgcattccttcgaacaagttcagcttcaacagcctggcgctgagctggtcaaacctggcgcttctgtgaagatgagctgcaaagccagcggctacgccttcagcagctactggatcaactggatgaagcagaaacccggccagggactcgaatggatcggccaaatctatcccggcgacggcgacaccaactacaacggcaagttcaagggcagagccacactgaccgccgatacctctagcagcacagcctacatgcagctgagcagcctgaccagcgaagatagcgccgtgtacttctgtgcccggtccatcacaacagtcgtgggctgcgctatggactattggggccagggaacaagcgtgaccgtgtctagtacgcgtcctcacaccaagcccagcgtgttcgtgatgaagaacggcaccaacgtggcctgcctcgtgaaagagttctaccccaaggacatcaggatcaacctggtgtccagcaagaagatcaccgagttcgaccccgccatcgtgatctcccccagcggcaagtacaacgccgtgaagctggggaagtacgaggacagcaacagcgtgacctgctccgtgcagcacgacaacaagaccgtgcacagcaccgactttggtacccagagttttgggttgttggaccctaaattgtgctatctgttggacggaatcctgttcatttacggagtgatcctgaccgcattgttcctgcgggttaagttttccagatccgcagacgcacccgcttaccaacaagggcagaaccaactctacaatgaacttaatttggggcggagggaagagtacgacgttctggacaaaaggaggggacgagatcccgagatgggcggaaagcctcgaaggaagaatccgcaagaggggctttataacgaactccagaaagataaaatggcagaagcctatagtgagattgggatgaagggagaaaggaggaggggtaaaggtcacgatgggttgtaccaaggattgagcacagccactaaagatacctatgatgcgctccacatgcaggccctgccgccaagacgcgccaagagaagcggatctggcgtgaagcagaccctgaatttcgacctgctgaagctggctggcgacgtggaatccaacccaggcccttctagaggccatatgaccgagtacaagcccacggtgcgcctcgccacccgcgacgacgtccccagggccgtacgcaccctcgccgccgcgttcgccgactaccccgccacgcgccacaccgtcgatccggaccgccacatcgagcgggtcaccgagctgcaagaactcttcctcacgcgcgtcgggctcgacatcggcaaggtgtgggtcgcggacgacggcgccgcggtggcggtctggaccacgccggagagcgtcgaagcgggggcggtgttcgccgagatcggcccgcgcatggccgagttgagcggttcccggctggccgcgcagcaacagatggaaggcctcctggcgccgcaccggcccaaggagcccgcgtggttcctggccaccgtcggcgtctcgcccgaccaccagggcaagggtctgggcagcgccgtcgtgctccccggagtggaggcggccgagcgcgccggggtgcccgccttcctggagacctccgcgccccgcaacctccccttctacgagcggctcggcttcaccgtcaccgccgacgtcgaggtgcccgaaggaccgcgcacctggtgcatgacccgcaagcccggtgcctga

SEQ ID NO: 32492 - DNA, 2526 bp, synthetic construct
  source 1..2526: mol_type = other DNA
atggccttaccagtgaccgccttgctcctgccgctggccttgctgctccacgccgccaggccggacatccagatgacacagagccctagcagcctgtctgccagcgtgggagacagagtgaccatcacatgcaaggccagcgaccacatcaacaactggctggcctggtatcagcagaagcctggacaggcccctaagctgctgatctacggcgctaccacactggaaacaggcgtgcccagcagattttctggcagcggctctggcaccgactacaccctgacaatatccagcctccagcctgaggacttcgccacctactactgtcagcagagctggaacaccccttggacattcggccagggcaccaagctggaaatcaagagactcgaggacctgaagaacgtgttcccacctgaggtggccgtgttcgagcctagcgaggccgagatcagccacacccagaaagccaccctcgtgtgcctggctaccggcttctaccccgaccatgtggaactgtcttggtgggtcaacggcaaagaggtgcacagcggcgtgtgtaccgacccccagccactgaaagaacagcccgccctgaacgacagccggtactgcctgagcagcagactgagagtgtccgccaccttctggcagaacccccggaaccacttcagatgccaggtgcagttctacggcctgagcgagaacgacgagtggacccaggacagagccaagcccgtgacccagatcgtgtctgccgaagcctggggcagagccgattgcggctttaccagcgagagctaccagcagggcgtgctgagcgccggatcccagagcttcggcctgctggaccccaagctgtgctacctgctggatggcatcctgttcatctacggcgtgatcctgaccgccctgttcctgagagtgaagttcagcagaagcgccgacgcccctgcctaccagcagggacagaaccaactgtacaacgagctgaacctgggcagacgggaagagtacgacgtgctggacaagcggagaggcagggaccctgagatgggcggaaagccccagcggagaaagaacccccaggaaggactgtataacgaactccagaaagacaagatggccgaagcctacagcgagatcggcatgaagggcgagcggagaagaggcaagggccacgatggcctgtaccagggcctgagcaccgccaccaaggacacctatgacgccctgcacatgcaggccctgcctccaagaagggccaagcgatctggatctggagcaacaaacttctcactactcaaacaagcaggtgacgtggaggagaatcccgggcctactagtatggactggatttggcgcatccttttccttgtcggcgctgctaccggcgcgcattccttcgaacaagttcagcttcaacagcctggcgctgagctggtcaaacctggcgcttctgtgaagatgagctgcaaagccagcggctacgccttcagcagctactggatcaactggatgaagcagaaacccggccagggactcgaatggatcggccaaatctatcccggcgacggcgacaccaactacaacggcaagttcaagggcagagccacactgaccgccgatacctctagcagcacagcctacatgcagctgagcagcctgaccagcgaagatagcgccgtgtacttctgtgcccggtccatcacaacagtcgtgggctgcgctatggactattggggccagggaacaagcgtgaccgtgtctagtacgcgtgcgtccactaagggtccgtcagtcttcccgctggcgccctgttcccgcagcacgagtgaatctaccgccgcccttgggtgcttggtaaaagactattttcctgagcccgttacagtatcatggaacagcggggctctgactagcggggtgcatacgttccctgcggttctgcaatctagcggactgtattctctctccagtgttgtgaccgtgccaagctccagcctcggtactaaaacttatacatgtaatgtggatcataaaccttcaaataccaaggttgacaaaagggtagagagtaagtacggtggtacccagagttttgggttgttggaccctaaattgtgctatctgttggacggaatcctgttcatttacggagtgatcctgaccgcattgttcctgcgggttaagttttccagatccgcagacgcacccgcttaccaacaagggcagaaccaactctacaatgaacttaatttggggcggagggaagagtacgacgttctggacaaaaggaggggacgagatcccgagatgggcggaaagcctcagcgaaggaagaatccgcaagaggggctttataacgaactccagaaagataaaatggcagaagcctatagtgagattgggatgaagggagaaaggaggaggggtaaaggtcacgatgggttgtaccaaggattgagcacagccactaaagatacctatgatgcgctccacatgcaggccctgccgccaagataa

SEQ ID NO: 32493 - DNA, 3219 bp, synthetic construct
  source 1..3219: mol_type = other DNA
atggccttaccagtgaccgccttgctcctgccgctggccttgctgctccacgccgccaggccggacatccagatgacacagagccctagcagcctgtctgccagcgtgggagacagagtgaccatcacatgcaaggccagcgaccacatcaacaactggctggcctggtatcagcagaagcctggacaggcccctaagctgctgatctacggcgctaccacactggaaacaggcgtgcccagcagattttctggcagcggctctggcaccgactacaccctgacaatatccagcctccagcctgaggacttcgccacctactactgtcagcagagctggaacaccccttggacattcggccagggcaccaagctggaaatcaagagactcgaggacctgaagaacgtgttcccacctgaggtggccgtgttcgagcctagcgaggccgagatcagccacacccagaaagccaccctcgtgtgcctggctaccggcttctaccccgaccatgtggaactgtcttggtgggtcaacggcaaagaggtgcacagcggcgtgtctaccgacccccagccactgaaagaacagcccgccctgaacgacagccggtactgcctgagcagcagactgagagtgtccgccaccttctggcagaacccccggaaccacttcagatgccaggtgcagttctacggcctgagcgagaacgacgagtggacccaggacagagccaagcccgtgacccagatcgtgtctgccgaagcctggggcagagccgattgcggatcccagagcttcggcctgctggaccccaagctgtgctacctgctggatggcatcctgttcatctacggcgtgatcctgaccgccctgttcctgagagtgaagttcagcagaagcgccgacgcccctgcctaccagcagggacagaaccaactgtacaacgagctgaacctgggcagacgggaagagtacgacgtgctggacaagcggagaggcagggaccctgagatgggcggaaagccccagcggagaaagaacccccaggaaggactgtataacgaactccagaaagacaagatggccgaagcctacagcgagatcggcatgaagggcgagcggagaagaggcaagggccacgatggcctgtaccagggcctgagcaccgccaccaaggacacctatgacgccctgcacatgcaggccctgcctccaagaagggccaagcgatctggatctggagcaacaaacttctcactactcaaacaagcaggtgacgtggaggagaatcccgggcctactagtatggactggatttggcgcatccttttccttgtcggcgctgctaccggcgcgcattccttcgaacaagttcagcttcaacagcctggcgctgagctggtcaaacctggcgcttctgtgaagatgagctgcaaagccagcggctacgccttcagcagctactggatcaactggatgaagcagaaacccggccagggactcgaatggatcggccaaatctatcccggcgacggcgacaccaactacaacggcaagttcaagggcagagccacactgaccgccgatacctctagcagcacagcctacatgcagctgagcagcctgaccagcgaagatagcgccgtgtacttctgtgcccggtccatcacaacagtcgtgggctgcgctatggactattggggccagggaacaagcgtgaccgtgtctagtacgcgtatccagaaccctgatcctgccgtgtaccagctgcgggatagcaagagcagcgacaagagcgtgtgtctgttcaccgacttcgacagccagaccaacgtgtcccagagcaaggactccgacgtgtacatcaccgataagtgcgtgctggacatgcggagcatggacttcaagagcaactccgccgtggcctggtccaacaagtccgatttcgcctgcgccaacgccttcaacaacagcattatccccgaggacacattcttcccaagccccgagagcagctgcgacgtgaagctggtggaaaagagcttcgagacagacaccaacctgaacttccagaacctgagcggtacccagagttttgggttgttggaccctaaattgtgctatctgttggacggaatcctgttcatttacggagtgatcctgaccgcattgttcctgcgggttaagttttccagatccgcagacgcacccgcttaccaacaagggcagaaccaactctacaatgaacttaatttggggcggagggaagagtacgacgttctggacaaaaggaggggacgagatcccgagatgggcggaaagcctcagcgaaggaagaatccgcaagaggggctttataacgaactccagaaagataaaatggcagaagcctatagtgagattgggatgaagggagaaaggaggaggggtaaaggtcacgatgggttgtaccaaggattgagcacagccactaaagatacctatgatgcgctccacatgcaggccctgccgccaagacgcgccaagagaagcggatctggcgtgaagcagaccctgaatttcgacctgctgaagctggctggcgacgtggaatccaacccaggcccttctagaggccatatgaccgagtacaagcccacggtgcgcctcgccacccgcgacgacgtccccagggccgtacgcaccctcgccgccgcgttcgccgactaccccgccacgcgccacaccgtcgatccggaccgccacatcgagcgggtcaccgagctgcaagaactcttcctcacgcgcgtcgggctcgacatcggcaaggtgtgggtcgcggacgacggcgccgcggtggcggtctggaccacgccggagagcgtcgaagcgggggcggtgttcgccgagatcggcccgcgcatggccgagttgagcggttcccggctggccgcgcagcaacagatggaaggcctcctggcgccgcaccggcccaaggagcccgcgtggttcctggccaccgtcggcgtctcgcccgaccaccagggcaagggtctgggcagcgccgtcgtgctccccggagtggaggcggccgagcgcgccggggtgcccgccttcctggagacctccgcgccccgcaacctccccttctacgagcggctcggcttcaccgtcaccgccgacgtcgaggtgcccgaaggaccgcgcacctggtgcatgacccgcaagcccggtgcctga

SEQ ID NO: 32494 - DNA, 3192 bp, synthetic construct
  source 1..3192: mol_type = other DNA
atggccttaccagtgaccgccttgctcctgccgctggccttgctgctccacgccgccaggccggacatccagatgacacagagccctagcagcctgtctgccagcgtgggagacagagtgaccatcacatgcaaggccagcgaccacatcaacaactggctggcctggtatcagcagaagcctggacaggcccctaagctgctgatctacggcgctaccacactggaaacaggcgtgcccagcagattttctggcagcggctctggcaccgactacaccctgacaatatccagcctccagcctgaggacttcgccacctactactgtcagcagagctggaacaccccttggacattcggccagggcaccaagctggaaatcaagagactcgaggacctgaagaacgtgttcccacctgaggtggccgtgttcgagcctagcgaggccgagatcagccacacccagaaagccaccctcgtgtgcctggctaccggcttctaccccgaccatgtggaactgtcttggtgggtcaacggcaaagaggtgcacagcggcgtgtctaccgacccccagccactgaaagaacagcccgccctgaacgacagccggtactgcctgagcagcagactgagagtgtccgccaccttctggcagaacccccggaaccacttcagatgccaggtgcagttctacggcctgagcgagaacgacgagtggacccaggacagagccaagcccgtgacccagatcgtgtctgccgaagcctggggcagagccgattgcggatcccagagcttcggcctgctggaccccaagctgtgctacctgctggatggcatcctgttcatctacggcgtgatcctgaccgccctgttcctgagagtgaagttcagcagaagcgccgacgcccctgcctaccagcagggacagaaccaactgtacaacgagctgaacctgggcagacgggaagagtacgacgtgctggacaagcggagaggcagggaccctgagatgggcggaaagccccagcggagaaagaacccccaggaaggactgtataacgaactccagaaagacaagatggccgaagcctacagcgagatcggcatgaagggcgagcggagaagaggcaagggccacgatggcctgtaccagggcctgagcaccgccaccaaggacacctatgacgccctgcacatgcaggccctgcctccaagaagggccaagcgatctggatctggagcaacaaacttctcactactcaaacaagcaggtgacgtggaggagaatcccgggcctactagtatggactggatttggcgcatccttttccttgtcggcgctgctaccggcgcgcattccttcgaacaagttcagcttcaacagcctggcgctgagctggtcaaacctggcgcttctgtgaagatgagctgcaaagccagcggctacgccttcagcagctactggatcaactggatgaagcagaaacccggccagggactcgaatggatcggccaaatctatcccggcgacggcgacaccaactacaacggcaagttcaagggcagagccacactgaccgccgatacctctagcagcacagcctacatgcagctgagcagcctgaccagcgaagatagcgccgtgtacttctgtgcccggtccatcacaacagtcgtgggctgcgctatggactattggggccagggaacaagcgtgaccgtgtctagtacgcgtatccagaaccctgatcctgccgtgtaccagctgcgggatagcaagagcagcgacaagagcgtgtgtctgttcaccgacttcgacagccagaccaacgtgtcccagagcaaggactccgacgtgtacatcaccgataagtgcgtgctggacatgcggagcatggacttcaagagcaactccgccgtggcctggtccaacaagtccgatttcgcctgcgccaacgccttcaacaacagcattatccccgaggacacattcttcccaagccccgagagcagctgcgacgtgaagctggtggaaaagagcttcgagacagacggtacccagagttttgggttgttggaccctaaattgtgctatctgttggacggaatcctgttcatttacggagtgatcctgaccgcattgttcctgcgggttaagttttccagatccgcagacgcacccgcttaccaacaagggcagaaccaactctacaatgaacttaatttggggcggagggaagagtacgacgttctggacaaaaggaggggacgagatcccgagatgggcggaaagcctcagcgaaggaagaatccgcaagaggggctttataacgaactccagaaagataaaatggcagaagcctatagtgagattgggatgaagggagaaaggaggaggggtaaaggtcacgatgggttgtaccaaggattgagcacagccactaaagatacctatgatgcgctccacatgcaggccctgccgccaagacgcgccaagagaagcggatctggcgtgaagcagaccctgaatttcgacctgctgaagctggctggcgacgtggaatccaacccaggcccttctagaggccatatgaccgagtacaagcccacggtgcgcctcgccacccgcgacgacgtccccagggccgtacgcaccctcgccgccgcgttcgccgactaccccgccacgcgccacaccgtcgatccggaccgccacatcgagcgggtcaccgagctgcaagaactcttcctcacgcgcgtcgggctcgacatcggcaaggtgtgggtcgcggacgacggcgccgcggtggcggtctggaccacgccggagagcgtcgaagcgggggcggtgttcgccgagatcggcccgcgcatggccgagttgagcggttcccggctggccgcgcagcaacagatggaaggcctcctggcgccgcaccggcccaaggagcccgcgtggttcctggccaccgtcggcgtctcgcccgaccaccagggcaagggtctgggcagcgccgtcgtgctccccggagtggaggcggccgagcgcgccggggtgcccgccttcctggagacctccgcgccccgcaacctccccttctacgagcggctcggcttcaccgtcaccgccgacgtcgaggtgcccgaaggaccgcgcacctggtgcatgacccgcaagcccggtgcctga

SEQ ID NO: 32495 - DNA, 3123 bp, synthetic construct
  source 1..3123: mol_type = other DNA
atggccttaccagtgaccgccttgctcctgccgctggccttgctgctccacgccgccaggccggacatccagatgacacagagccctagcagcctgtctgccagcgtgggagacagagtgaccatcacatgcaaggccagcgaccacatcaacaactggctggcctggtatcagcagaagcctggacaggcccctaagctgctgatctacggcgctaccacactggaaacaggcgtgcccagcagattttctggcagcggctctggcaccgactacaccctgacaatatccagcctccagcctgaggacttcgccacctactactgtcagcagagctggaacaccccttggacattcggccagggcaccaagctggaaatcaagagactcgaggacctgaagaacgtgttcccacctgaggtggccgtgttcgagcctagcgaggccgagatcagccacacccagaaagccaccctcgtgtgcctggctaccggcttctaccccgaccatgtggaactgtcttggtgggtcaacggcaaagaggtgcacagcggcgtgtctaccgacccccagccactgaaagaacagcccgccctgaacgacagccggtactgcctgagcagcagactgagagtgtccgccaccttctggcagaacccccggaaccacttcagatgccaggtgcagttctacggcctgagcgagaacgacgagtggacccaggacagagccaagcccgtgacccagatcgtgtctgccgaagcctggggcagagccgattgcggatcccagagcttcggcctgctggaccccaagctgtgctacctgctggatggcatcctgttcatctacggcgtgatcctgaccgccctgttcctgagagtgaagttcagcagaagcgccgacgcccctgcctaccagcagggacagaaccaactgtacaacgagctgaacctgggcagacgggaagagtacgacgtgctggacaagcggagaggcagggaccctgagatgggcggaaagccccagcggagaaagaacccccaggaaggactgtataacgaactccagaaagacaagatggccgaagcctacagcgagatcggcatgaagggcgagcggagaagaggcaagggccacgatggcctgtaccagggcctgagcaccgccaccaaggacacctatgacgccctgcacatgcaggccctgcctccaagaagggccaagcgatctggatctggagcaacaaacttctcactactcaaacaagcaggtgacgtggaggagaatcccgggcctactagtatggactggatttggcgcatccttttccttgtcggcgctgctaccggcgcgcattccttcgaacaagttcagcttcaacagcctggcgctgagctggtcaaacctggcgcttctgtgaagatgagctgcaaagccagcggctacgccttcagcagctactggatcaactggatgaagcagaaacccggccagggactcgaatggatcggccaaatctatcccggcgacggcgacaccaactacaacggcaagttcaagggcagagccacactgaccgccgatacctctagcagcacagcctacatgcagctgagcagcctgaccagcgaagatagcgccgtgtacttctgtgcccggtccatcacaacagtcgtgggctgcgctatggactattggggccagggaacaagcgtgaccgtgtctagtacgcgtcctcacaccaagcccagcgtgttcgtgatgaagaacggcaccaacgtggcctgcctcgtgaaagagttctaccccaaggacatcaggatcaacctggtgtccagcaagaagatcaccgagttcgaccccgccatcgtgatctcccccagcggcaagtacaacgccgtgaagctggggaagtacgaggacagcaacagcgtgacctgctccgtgcagcacgacaacaagaccgtgcacagcaccgactttggtacccagagttttgggttgttggaccctaaattgtgctatctgttggacggaatcctgttcatttacggagtgatcctgaccgcattgttcctgcgggttaagttttccagatccgcagacgcacccgcttaccaacaagggcagaaccaactctacaatgaacttaatttggggcggagggaagagtacgacgttctggacaaaaggaggggacgagatcccgagatgggcggaaagcctcagcgaaggaagaatccgcaagaggggctttataacgaactccagaaagataaaatggcagaagcctatagtgagattgggatgaagggagaaaggaggaggggtaaaggtcacgatgggttgtaccaaggattgagcacagccactaaagatacctatgatgcgctccacatgcaggccctgccgccaagacgcgccaagagaagcggatctggcgtgaagcagaccctgaatttcgacctgctgaagctggctggcgacgtggaatccaacccaggcccttctagaggccatatgaccgagtacaagcccacggtgcgcctcgccacccgcgacgacgtccccagggccgtacgcaccctcgccgccgcgttcgccgactaccccgccacgcgccacaccgtcgatccggaccgccacatcgagcgggtcaccgagctgcaagaactcttcctcacgcgcgtcgggctcgacatcggcaaggtgtgggtcgcggacgacggcgccgcggtggcggtctggaccacgccggagagcgtcgaagcgggggcggtgttcgccgagatcggcccgcgcatggccgagttgagcggttcccggctggccgcgcagcaacagatggaaggcctcctggcgccgcaccggcccaaggagcccgcgtggttcctggccaccgtcggcgtctcgcccgaccaccagggcaagggtctgggcagcgccgtcgtgctccccggagtggaggcggccgagcgcgccggggtgcccgccttcctggagacctccgcgccccgcaacctccccttctacgagcggctcggcttcaccgtcaccgccgacgtcgaggtgcccgaaggaccgcgcacctggtgcatgacccgcaagcccggtgcctga

SEQ ID NO: 32496 - DNA, 2184 bp, synthetic construct
  source 1..2184: mol_type = other DNA
atggccttaccagtgaccgccttgctcctgccgctggccttgctgctccacgccgccaggccggacatccagatgacacagagccctagcagcctgtctgccagcgtgggagacagagtgaccatcacatgcaaggccagcgaccacatcaacaactggctggcctggtatcagcagaagcctggacaggcccctaagctgctgatctacggcgctaccacactggaaacaggcgtgcccagcagattttctggcagcggctctggcaccgactacaccctgacaatatccagcctccagcctgaggacttcgccacctactactgtcagcagagctggaacaccccttggacattcggccagggcaccaagctggaaatcaagagactcgagggacagcctaaggccaatcctaccgtgacactgttccctccaagcagcgaagaactccaggccaacaaggccacacttgtgtgcctgatctccgacttctaccctggggctgtgacagtggcttggaaggccgatggatctcctgtgaaagccggcgtggaaaccaccaagccatccaagcagagcaacaacaaatacgccgccagctcctacctgagcctgacacctgagcagtggaagtcccacagatcctacagctgccaagtgacccacgaaggcagcaccgtggaaaagacagtggcccctacagagtgcagcggatcccccatcaagaccgatgtgattacaatggaccccaaggacaactgctccaaggacgccaacgataccctgctgctccagctgaccaacaccagcgcctactacatgtacttgttgctgctgctgaagtccgtggtgtacttcgccatcatcacatgctgcctgctgcggagaaccgccttctgctgcaacggcgagaagtctagggccaagcgatctggatctggagcaacaaacttctcactactcaaacaagcaggtgacgtggaggagaatcccgggcctactagtatggactggatttggcgcatccttttccttgtcggcgctgctaccggcgcgcattccttcgaacaagttcagcttcaacagcctggcgctgagctggtcaaacctggcgcttctgtgaagatgagctgcaaagccagcggctacgccttcagcagctactggatcaactggatgaagcagaaacccggccagggactcgaatggatcggccaaatctatcccggcgacggcgacaccaactacaacggcaagttcaagggcagagccacactgaccgccgatacctctagcagcacagcctacatgcagctgagcagcctgaccagcgaagatagcgccgtgtacttctgtgcccggtccatcacaacagtcgtgggctgcgctatggactattggggccagggaacaagcgtgaccgtgtctagtacgcgtgcgtccactaagggtccgtcagtcttcccgctggcgccctgttcccgcagcacgagtgaatctaccgccgcccttgggtgcttggtaaaagactattttcctgagcccgttacagtatcatggaacagcggggctctgactagcggggtgcatacgttccctgcggttctgcaatctagcggactgtattctctctccagtgttgtgaccgtgccaagctccagcctcggtactaaaacttatacatgtaatgtggatcataaaccttcaaataccaaggttgacaaaagggtagagagtaagtacggtggtacccagagttttgggttgttggaccctaaattgtgctatctgttggacggaatcctgttcatttacggagtgatcctgaccgcattgttcctgcgggttaagttttccagatccgcagacgcacccgcttaccaacaagggcagaaccaactctacaatgaacttaatttggggcggagggaagagtacgacgttctggacaaaaggaggggacgagatcccgagatgggcggaaagcctcagcgaaggaagaatccgcaagaggggctttataacgaactccagaaagataaaatggcagaagcctatagtgagattgggatgaagggagaaaggaggaggggtaaaggtcacgatgggttgtaccaaggattgagcacagccactaaagatacctatgatgcgctccacatgcaggccctgccgccaagataa

SEQ ID NO: 32497 - DNA, 2928 bp, synthetic construct
  source 1..2928: mol_type = other DNA
atggccttaccagtgaccgccttgctcctgccgctggccttgctgctccacgccgccaggccggacatccagatgacacagagccctagcagcctgtctgccagcgtgggagacagagtgaccatcacatgcaaggccagcgaccacatcaacaactggctggcctggtatcagcagaagcctggacaggcccctaagctgctgatctacggcgctaccacactggaaacaggcgtgcccagcagattttctggcagcggctctggcaccgactacaccctgacaatatccagcctccagcctgaggacttcgccacctactactgtcagcagagctggaacaccccttggacattcggccagggcaccaagctggaaatcaagagactcgaggacctgaagaacgtgttcccacctgaggtggccgtgttcgagcctagcgaggccgagatcagccacacccagaaagccaccctcgtgtgcctggctaccggcttctaccccgaccatgtggaactgtcttggtgggtcaacggcaaagaggtgcacagcggcgtgtctaccgacccccagccactgaaagaacagcccgccctgaacgacagccggtactgcctgagcagcagactgagagtgtccgccaccttctggcagaacccccggaaccacttcagatgccaggtgcagttctacggcctgagcgagaacgacgagtggacccaggacagagccaagcccgtgacccagatcgtgtctgccgaagcctggggcagagccgattgcggatcccccatcaagaccgatgtgattacaatggaccccaaggacaactgctccaaggacgccaacgataccctgctgctccagctgaccaacaccagcgcctactacatgtacttgttgctgctgctgaagtccgtggtgtacttcgccatcatcacatgctgcctgctgcggagaaccgccttctgctgcaacggcgagaagtctagggccaagcgatctggatctggagcaacaaacttctcactactcaaacaagcaggtgacgtggaggagaatcccgggcctactagtatggactggatttggcgcatccttttccttgtcggcgctgctaccggcgcgcattccttcgaacaagttcagcttcaacagcctggcgctgagctggtcaaacctggcgcttctgtgaagatgagctgcaaagccagcggctacgccttcagcagctactggatcaactggatgaagcagaaacccggccagggactcgaatggatcggccaaatctatcccggcgacggcgacaccaactacaacggcaagttcaagggcagagccacactgaccgccgatacctctagcagcacagcctacatgcagctgagcagcctgaccagcgaagatagcgccgtgtacttctgtgcccggtccatcacaacagtcgtgggctgcgctatggactattggggccagggaacaagcgtgaccgtgtctagtacgcgtatccagaaccctgatcctgccgtgtaccagctgcgggatagcaagagcagcgacaagagcgtgtgtctgttcaccgacttcgacagccagaccaacgtgtcccagagcaaggactccgacgtgtacatcaccgataagaccgtgctggacatgcggagcatggacttcaagagcaactccgccgtggcctggtccaacaagtccgatttcgcctgcgccaacgccttcaacaacagcattatccccgaggacacattcttcccaagccccgagagcagctgcggtacccagagttttgggttgttggaccctaaattgtgctatctgttggacggaatcctgttcatttacggagtgatcctgaccgcattgttcctgcgggttaagttttccagatccgcagacgcacccgcttaccaacaagggcagaaccaactctacaatgaacttaatttggggcggagggaagagtacgacgttctggacaaaaggaggggacgagatcccgagatgggcggaaagcctcagcgaaggaagaatccgcaagaggggctttataacgaactccagaaagataaaatggcagaagcctatagtgagattgggatgaagggagaaaggaggaggggtaaaggtcacgatgggttgtaccaaggattgagcacagccactaaagatacctatgatgcgctccacatgcaggccctgccgccaagacgcgccaagagaagcggatctggcgtgaagcagaccctgaatttcgacctgctgaagctggctggcgacgtggaatccaacccaggcccttctagaggccatatgaccgagtacaagcccacggtgcgcctcgccacccgcgacgacgtccccagggccgtacgcaccctcgccgccgcgttcgccgactaccccgccacgcgccacaccgtcgatccggaccgccacatcgagcgggtcaccgagctgcaagaactcttcctcacgcgcgtcgggctcgacatcggcaaggtgtgggtcgcggacgacggcgccgcggtggcggtctggaccacgccggagagcgtcgaagcgggggcggtgttcgccgagatcggcccgcgcatggccgagttgagcggttcccggctggccgcgcagcaacagatggaaggcctcctggcgccgcaccggcccaaggagcccgcgtggttcctggccaccgtcggcgtctcgcccgaccaccagggcaagggtctgggcagcgccgtcgtgctccccggagtggaggcggccgagcgcgccggggtgcccgccttcctggagacctccgcgccccgcaacctccccttctacgagcggctcggcttcaccgtcaccgccgacgtcgaggtgcccgaaggaccgcgcacctggtgcatgacccgcaagcccggtgcctga

SEQ ID NO: 32498 - DNA, 2139 bp, synthetic construct
  source 1..2139: mol_type = other DNA
atggccttaccagtgaccgccttgctcctgccgctggccttgctgctccacgccgccaggccggacatccagatgacacagagccctagcagcctgtctgccagcgtgggagacagagtgaccatcacatgcaaggccagcgaccacatcaacaactggctggcctggtatcagcagaagcctggacaggcccctaagctgctgatctacggcgctaccacactggaaacaggcgtgcccagcagattttctggcagcggctctggcaccgactacaccctgacaatatccagcctccagcctgaggacttcgccacctactactgtcagcagagctggaacaccccttggacattcggccagggcaccaagctggaaatcaagagactcgagggacagcctaaggccaatcctaccgtgacactgttccctccaagcagcgaagaactccaggccaacaaggccacacttgtgtgcctgatctccgacttctaccctggggctgtgacagtggcttggaaggccgatggatctcctgtgaaagccggcgtggaaaccaccaagccatccaagcagagcaacaacaaatacgccgccagctcctacctgagcctgacacctgagcagtggaagtcccacagatcctacagctgccaagtgacccacgaaggcagcaccgtggaaaagacagtggcccctacagagtgcagcggatcctccaaggacgccaacgataccctgctgctccagctgaccaacaccagcgcctactacatgtacttgttgctgctgctgaagtccgtggtgtacttcgccatcatcacatgctgcctgctgcggagaaccgccttctgctgcaacggcgagaagtctagggccaagcgatctggatctggagcaacaaacttctcactactcaaacaagcaggtgacgtggaggagaatcccgggcctactagtatggactggatttggcgcatccttttccttgtcggcgctgctaccggcgcgcattccttcgaacaagttcagcttcaacagcctggcgctgagctggtcaaacctggcgcttctgtgaagatgagctgcaaagccagcggctacgccttcagcagctactggatcaactggatgaagcagaaacccggccagggactcgaatggatcggccaaatctatcccggcgacggcgacaccaactacaacggcaagttcaagggcagagccacactgaccgccgatacctctagcagcacagcctacatgcagctgagcagcctgaccagcgaagatagcgccgtgtacttctgtgcccggtccatcacaacagtcgtgggctgcgctatggactattggggccagggaacaagcgtgaccgtgtctagtacgcgtgcgtccactaagggtccgtcagtcttcccgctggcgccctgttcccgcagcacgagtgaatctaccgccgcccttgggtgcttggtaaaagactattttcctgagcccgttacagtatcatggaacagcggggctctgactagcggggtgcatacgttccctgcggttctgcaatctagcggactgtattctctctccagtgttgtgaccgtgccaagctccagcctcggtactaaaacttatacatgtaatgtggatcataaaccttcaaataccaaggttgacaaaagggtagagagtaagtacggtggtacccagagttttgggttgttggaccctaaattgtgctatctgttggacggaatcctgttcatttacggagtgatcctgaccgcattgttcctgcgggttaagttttccagatccgcagacgcacccgcttaccaacaagggcagaaccaactctacaatgaacttaatttggggcggagggaagagtacgacgttctggacaaaaggaggggacgagatcccgagatgggcggaaagcctcagcgaaggaagaatccgcaagaggggctttataacgaactccagaaagataaaatggcagaagcctatagtgagattgggatgaagggagaaaggaggaggggtaaaggtcacgatgggttgtaccaaggattgagcacagccactaaagatacctatgatgcgctccacatgcaggccctgccgccaagataa

SEQ ID NO: 32499 - DNA, 2883 bp, synthetic construct
  source 1..2883: mol_type = other DNA
atggccttaccagtgaccgccttgctcctgccgctggccttgctgctccacgccgccaggccggacatccagatgacacagagccctagcagcctgtctgccagcgtgggagacagagtgaccatcacatgcaaggccagcgaccacatcaacaactggctggcctggtatcagcagaagcctggacaggcccctaagctgctgatctacggcgctaccacactggaaacaggcgtgcccagcagattttctggcagcggctctggcaccgactacaccctgacaatatccagcctccagcctgaggacttcgccacctactactgtcagcagagctggaacaccccttggacattcggccagggcaccaagctggaaatcaagagactcgaggacctgaagaacgtgttcccacctgaggtggccgtgttcgagcctagcgaggccgagatcagccacacccagaaagccaccctcgtgtgcctggctaccggcttctaccccgaccatgtggaactgtcttggtgggtcaacggcaaagaggtgcacagcggcgtgtctaccgacccccagccactgaaagaacagcccgccctgaacgacagccggtactgcctgagcagcagactgagagtgtccgccaccttctggcagaacccccggaaccacttcagatgccaggtgcagttctacggcctgagcgagaacgacgagtggacccaggacagagccaagcccgtgacccagatcgtgtctgccgaagcctggggcagagccgattgcggatcctccaaggacgccaacgataccctgctgctccagctgaccaacaccagcgcctactacatgtacttgttgctgctgctgaagtccgtggtgtacttcgccatcatcacatgctgcctgctgcggagaaccgccttctgctgcaacggcgagaagtctagggccaagcgatctggatctggagcaacaaacttctcactactcaaacaagcaggtgacgtggaggagaatcccgggcctactagtatggactggatttggcgcatccttttccttgtcggcgctgctaccggcgcgcattccttcgaacaagttcagcttcaacagcctggcgctgagctggtcaaacctggcgcttctgtgaagatgagctgcaaagccagcggctacgccttcagcagctactggatcaactggatgaagcagaaacccggccagggactcgaatggatcggccaaatctatcccggcgacggcgacaccaactacaacggcaagttcaagggcagagccacactgaccgccgatacctctagcagcacagcctacatgcagctgagcagcctgaccagcgaagatagcgccgtgtacttctgtgcccggtccatcacaacagtcgtgggctgcgctatggactattggggccagggaacaagcgtgaccgtgtctagtacgcgtatccagaaccctgatcctgccgtgtaccagctgcgggatagcaagagcagcgacaagagcgtgtgtctgttcaccgacttcgacagccagaccaacgtgtcccagagcaaggactccgacgtgtacatcaccgataagaccgtgctggacatgcggagcatggacttcaagagcaactccgccgtggcctggtccaacaagtccgatttcgcctgcgccaacgccttcaacaacagcattatccccgaggacacattcttcccaagccccgagagcagctgcggtacccagagttttgggttgttggaccctaaattgtgctatctgttggacggaatcctgttcatttacggagtgatcctgaccgcattgttcctgcgggttaagttttccagatccgcagacgcacccgcttaccaacaagggcagaaccaactctacaatgaacttaatttggggcggagggaagagtacgacgttctggacaaaaggaggggacgagatcccgagatgggcggaaagcctcagcgaaggaagaatccgcaagaggggctttataacgaactccagaaagataaaatggcagaagcctatagtgagattgggatgaagggagaaaggaggaggggtaaaggtcacgatgggttgtaccaaggattgagcacagccactaaagatacctatgatgcgctccacatgcaggccctgccgccaagacgcgccaagagaagcggatctggcgtgaagcagaccctgaatttcgacctgctgaagctggctggcgacgtggaatccaacccaggcccttctagaggccatatgaccgagtacaagcccacggtgcgcctcgccacccgcgacgacgtccccagggccgtacgcaccctcgccgccgcgttcgccgactaccccgccacgcgccacaccgtcgatccggaccgccacatcgagcgggtcaccgagctgcaagaactcttcctcacgcgcgtcgggctcgacatcggcaaggtgtgggtcgcggacgacggcgccgcggtggcggtctggaccacgccggagagcgtcgaagcgggggcggtgttcgccgagatcggcccgcgcatggccgagttgagcggttcccggctggccgcgcagcaacagatggaaggcctcctggcgccgcaccggcccaaggagcccgcgtggttcctggccaccgtcggcgtctcgcccgaccaccagggcaagggtctgggcagcgccgtcgtgctccccggagtggaggcggccgagcgcgccggggtgcccgccttcctggagacctccgcgccccgcaacctccccttctacgagcggctcggcttcaccgtcaccgccgacgtcgaggtgcccgaaggaccgcgcacctggtgcatgacccgcaagcccggtgcctga

SEQ ID NO: 32500 - DNA, 2451 bp, synthetic construct
  source 1..2451: mol_type = other DNA
atggccttaccagtgaccgccttgctcctgccgctggccttgctgctccacgccgccaggccggacatccagatgacacagagccctagcagcctgtctgccagcgtgggagacagagtgaccatcacatgcaaggccagcgaccacatcaacaactggctggcctggtatcagcagaagcctggacaggcccctaagctgctgatctacggcgctaccacactggaaacaggcgtgcccagcagattttctggcagcggctctggcaccgactacaccctgacaatatccagcctccagcctgaggacttcgccacctactactgtcagcagagctggaacaccccttggacattcggccagggcaccaagctggaaatcaagagactcgaggacctgaagaacgtgttcccacctgaggtggccgtgttcgagcctagcgaggccgagatcagccacacccagaaagccaccctcgtgtgcctggctaccggcttctaccccgaccatgtggaactgtcttggtgggtcaacggcaaagaggtgcacagcggcgtgtctaccgacccccagccactgaaagaacagcccgccctgaacgacagccggtactgcctgagcagcagactgagagtgtccgccaccttctggcagaacccccggaaccacttcagatgccaggtgcagttctacggcctgagcgagaacgacgagtggacccaggacagagccaagcccgtgacccagatcgtgtctgccgaagcctggggcagagccgattgcggatcccagagcttcggcctgctggaccccaagctgtgctacctgctggatggcatcctgttcatctacggcgtgatcctgaccgccctgttcctgagagtgaagttcagcagaagcgccgacgcccctgcctaccagcagggacagaaccaactgtacaacgagctgaacctgggcagacgggaagagtacgacgtgctggacaagcggagaggcagggaccctgagatgggcggaaagccccggagaaagaacccccaggaaggactgtataacgaactccagaaagacaagatggccgaagcctacagcgagatcggcatgaagggcgagcggagaagaggcaagggccacgatggcctgtaccagggcctgagcaccgccaccaaggacacctatgacgccctgcacatgcaggccctgcctccaagaagggccaagcgatctggatctggagcaacaaacttctcactactcaaacaagcaggtgacgtggaggagaatcccgggcctactagtatggactggatttggcgcatccttttccttgtcggcgctgctaccggcgcgcattccttcgaacaagttcagcttcaacagcctggcgctgagctggtcaaacctggcgcttctgtgaagatgagctgcaaagccagcggctacgccttcagcagctactggatcaactggatgaagcagaaacccggccagggactcgaatggatcggccaaatctatcccggcgacggcgacaccaactacaacggcaagttcaagggcagagccacactgaccgccgatacctctagcagcacagcctacatgcagctgagcagcctgaccagcgaagatagcgccgtgtacttctgtgcccggtccatcacaacagtcgtgggctgcgctatggactattggggccagggaacaagcgtgaccgtgtctagtacgcgtatccagaaccctgatcctgccgtgtaccagctgcgggatagcaagagcagcgacaagagcgtgtgtctgttcaccgacttcgacagccagaccaacgtgtcccagagcaaggactccgacgtgtacatcaccgataagaccgtgctggacatgcggagcatggacttcaagagcaactccgccgtggcctggtccaacaagtccgatttcgcctgcgccaacgccttcaacaacagcattatccccgaggacacattcttcccaagccccgagagcagctgcggtacccagagttttgggttgttggaccctaaattgtgctatctgttggacggaatcctgttcatttacggagtgatcctgaccgcattgttcctgcgggttaagttttccagatccgcagacgcacccgcttaccaacaagggcagaaccaactctacaatgaacttaatttggggcggagggaagagtacgacgttctggacaaaaggaggggacgagatcccgagatgggcggaaagcctcgaaggaagaatccgcaagaggggctttataacgaactccagaaagataaaatggcagaagcctatagtgagattgggatgaagggagaaaggaggaggggtaaaggtcacgatgggttgtaccaaggattgagcacagccactaaagatacctatgatgcgctccacatgcaggccctgccgccaagataa

SEQ ID NO: 32501 - DNA, 3234 bp, synthetic construct
  source 1..3234: mol_type = other DNA
atggccttaccagtgaccgccttgctcctgccgctggccttgctgctccacgccgccaggccggacatccagatgacacagagccctagcagcctgtctgccagcgtgggagacagagtgaccatcacatgcaaggccagcgaccacatcaacaactggctggcctggtatcagcagaagcctggacaggcccctaagctgctgatctacggcgctaccacactggaaacaggcgtgcccagcagattttctggcagcggctctggcaccgactacaccctgacaatatccagcctccagcctgaggacttcgccacctactactgtcagcagagctggaacaccccttggacattcggccagggcaccaagctggaaatcaagagactcgaggacctgaagaacgtgttcccacctgaggtggccgtgttcgagcctagcgaggccgagatcagccacacccagaaagccaccctcgtgtgcctggctaccggcttctaccccgaccatgtggaactgtcttggtgggtcaacggcaaagaggtgcacagcggcgtgtgtaccgacccccagccactgaaagaacagcccgccctgaacgacagccggtactgcctgagcagcagactgagagtgtccgccaccttctggcagaacccccggaaccacttcagatgccaggtgcagttctacggcctgagcgagaacgacgagtggacccaggacagagccaagcccgtgacccagatcgtgtctgccgaagcctggggcagagccgattgcggctttaccagcgagagctaccagcagggcgtgctgagcgccggatcccagagcttcggcctgctggaccccaagctgtgctacctgctggatggcatcctgttcatctacggcgtgatcctgaccgccctgttcctgagagtgaagttcagcagaagcgccgacgcccctgcctaccagcagggacagaaccaactgtacaacgagctgaacctgggcagacgggaagagtacgacgtgctggacaagcggagaggcagggaccctgagatgggcggaaagccccagcggagaaagaacccccaggaaggactgtataacgaactccagaaagacaagatggccgaagcctacagcgagatcggcatgaagggcgagcggagaagaggcaagggccacgatggcctgtaccagggcctgagcaccgccaccaaggacacctatgacgccctgcacatgcaggccctgcctccaagaagggccaagcgatctggatctggagcaacaaacttctcactactcaaacaagcaggtgacgtggaggagaatcccgggcctactagtatggactggatttggcgcatccttttccttgtcggcgctgctaccggcgcgcattccttcgaacaagttcagcttcaacagcctggcgctgagctggtcaaacctggcgcttctgtgaagatgagctgcaaagccagcggctacgccttcagcagctactggatcaactggatgaagcagaaacccggccagggactcgaatggatcggccaaatctatcccggcgacggcgacaccaactacaacggcaagttcaagggcagagccacactgaccgccgatacctctagcagcacagcctacatgcagctgagcagcctgaccagcgaagatagcgccgtgtacttctgtgcccggtccatcacaacagtcgtgggctgcgctatggactattggggccagggaacaagcgtgaccgtgtctagtacgcgtatccagaaccctgatcctgccgtgtaccagctgcgggatagcaagagcagcgacaagagcgtgtgtctgttcaccgacttcgacagccagaccaacgtgtcccagagcaaggactccgacgtgtacatcaccgataagtgcgtgctggacatgcggagcatggacttcaagagcaactccgccgtggcctggtccaacaagtccgatttcgcctgcgccaacgccttcaacaacagcattatccccgaggacacattcttcccaagccccgagagcagctgcgacgtgaagctggtggaaaagagcttcgagacagacggtacccagagttttgggttgttggaccctaaattgtgctatctgttggacggaatcctgttcatttacggagtgatcctgaccgcattgttcctgcgggttaagttttccagatccgcagacgcacccgcttaccaacaagggcagaaccaactctacaatgaacttaatttggggcggagggaagagtacgacgttctggacaaaaggaggggacgagatcccgagatgggcggaaagcctcagcgaaggaagaatccgcaagaggggctttataacgaactccagaaagataaaatggcagaagcctatagtgagattgggatgaagggagaaaggaggaggggtaaaggtcacgatgggttgtaccaaggattgagcacagccactaaagatacctatgatgcgctccacatgcaggccctgccgccaagacgcgccaagagaagcggatctggcgtgaagcagaccctgaatttcgacctgctgaagctggctggcgacgtggaatccaacccaggcccttctagaggccatatgaccgagtacaagcccacggtgcgcctcgccacccgcgacgacgtccccagggccgtacgcaccctcgccgccgcgttcgccgactaccccgccacgcgccacaccgtcgatccggaccgccacatcgagcgggtcaccgagctgcaagaactcttcctcacgcgcgtcgggctcgacatcggcaaggtgtgggtcgcggacgacggcgccgcggtggcggtctggaccacgccggagagcgtcgaagcgggggcggtgttcgccgagatcggcccgcgcatggccgagttgagcggttcccggctggccgcgcagcaacagatggaaggcctcctggcgccgcaccggcccaaggagcccgcgtggttcctggccaccgtcggcgtctcgcccgaccaccagggcaagggtctgggcagcgccgtcgtgctccccggagtggaggcggccgagcgcgccggggtgcccgccttcctggagacctccgcgccccgcaacctccccttctacgagcggctcggcttcaccgtcaccgccgacgtcgaggtgcccgaaggaccgcgcacctggtgcatgacccgcaagcccggtgcctga

SEQ ID NO: 32502 - DNA, 3075 bp, synthetic construct
  source 1..3075: mol_type = other DNA
atggccttaccagtgaccgccttgctcctgccgctggccttgctgctccacgccgccaggccggacatccagatgacacagagccctagcagcctgtctgccagcgtgggagacagagtgaccatcacatgcaaggccagcgaccacatcaacaactggctggcctggtatcagcagaagcctggacaggcccctaagctgctgatctacggcgctaccacactggaaacaggcgtgcccagcagattttctggcagcggctctggcaccgactacaccctgacaatatccagcctccagcctgaggacttcgccacctactactgtcagcagagctggaacaccccttggacattcggccagggcaccaagctggaaatcaagagactcgaggccgacgtgtcccccaagcctaccatcttcctgccctctatcgccgagacaaagctccagaaggccggcacctacctgtgcctgctggaaaagttcttcccagatgtgattaagatccactggcaggaaaagaagtccaacaccatcctgggcagccaggaaggcaacaccatgaagaccaacgacacctacatgaagttcagctggctgaccgtgcccgagaagtccctggacaaagaacacagatgcatcgtgcggcacgaaaacaacaagaacggcgtggaccaggaaatcatcttcccacccatcaagaccgatgtgattacaatggaccccaaggacggatcccagagcttcggcctgctggaccccaagctgtgctacctgctggatggcatcctgttcatctacggcgtgatcctgaccgccctgttcctgagagtgaagttcagcagaagcgccgacgcccctgcctaccagcagggacagaaccaactgtacaacgagctgaacctgggcagacgggaagagtacgacgtgctggacaagcggagaggcagggaccctgagatgggcggaaagccccagcggagaaagaacccccaggaaggactgtataacgaactccagaaagacaagatggccgaagcctacagcgagatcggcatgaagggcgagcggagaagaggcaagggccacgatggcctgtaccagggcctgagcaccgccaccaaggacacctatgacgccctgcacatgcaggccctgcctccaagaagggccaagcgatctggatctggagcaacaaacttctcactactcaaacaagcaggtgacgtggaggagaatcccgggcctactagtatggactggatttggcgcatccttttccttgtcggcgctgctaccggcgcgcattccttcgaacaagttcagcttcaacagcctggcgctgagctggtcaaacctggcgcttctgtgaagatgagctgcaaagccagcggctacgccttcagcagctactggatcaactggatgaagcagaaacccggccagggactcgaatggatcggccaaatctatcccggcgacggcgacaccaactacaacggcaagttcaagggcagagccacactgaccgccgatacctctagcagcacagcctacatgcagctgagcagcctgaccagcgaagatagcgccgtgtacttctgtgcccggtccatcacaacagtcgtgggctgcgctatggactattggggccagggaacaagcgtgaccgtgtctagtacgcgtcctcacaccaagcccagcgtgttcgtgatgaagaacggcaccaacgtggcctgcctcgtgaaagagttctaccccaaggacatcaggatcaacctggtgtccagcaagaagatcaccgagttcgaccccgccatcgtgatctcccccagcggcaagtacaacgccgtgaagctggggaagtacgaggacagcaacagcgtgacctgctccgtgcagcacgacaacaagaccgtgcacagcaccgactttggtacccagagttttgggttgttggaccctaaattgtgctatctgttggacggaatcctgttcatttacggagtgatcctgaccgcattgttcctgcgggttaagttttccagatccgcagacgcacccgcttaccaacaagggcagaaccaactctacaatgaacttaatttggggcggagggaagagtacgacgttctggacaaaaggaggggacgagatcccgagatgggcggaaagcctcagcgaaggaagaatccgcaagaggggctttataacgaactccagaaagataaaatggcagaagcctatagtgagattgggatgaagggagaaaggaggaggggtaaaggtcacgatgggttgtaccaaggattgagcacagccactaaagatacctatgatgcgctccacatgcaggccctgccgccaagacgcgccaagagaagcggatctggcgtgaagcagaccctgaatttcgacctgctgaagctggctggcgacgtggaatccaacccaggcccttctagaggccatatgaccgagtacaagcccacggtgcgcctcgccacccgcgacgacgtccccagggccgtacgcaccctcgccgccgcgttcgccgactaccccgccacgcgccacaccgtcgatccggaccgccacatcgagcgggtcaccgagctgcaagaactcttcctcacgcgcgtcgggctcgacatcggcaaggtgtgggtcgcggacgacggcgccgcggtggcggtctggaccacgccggagagcgtcgaagcgggggcggtgttcgccgagatcggcccgcgcatggccgagttgagcggttcccggctggccgcgcagcaacagatggaaggcctcctggcgccgcaccggcccaaggagcccgcgtggttcctggccaccgtcggcgtctcgcccgaccaccagggcaagggtctgggcagcgccgtcgtgctccccggagtggaggcggccgagcgcgccggggtgcccgccttcctggagacctccgcgccccgcaacctccccttctacgagcggctcggcttcaccgtcaccgccgacgtcgaggtgcccgaaggaccgcgcacctggtgcatgacccgcaagcccggtgcctga

SEQ ID NO: 32503 - DNA, 2568 bp, synthetic construct
  source 1..2568: mol_type = other DNA
atggccttaccagtgaccgccttgctcctgccgctggccttgctgctccacgccgccaggccggacatccagatgacacagagccctagcagcctgtctgccagcgtgggagacagagtgaccatcacatgcaaggccagcgaccacatcaacaactggctggcctggtatcagcagaagcctggacaggcccctaagctgctgatctacggcgctaccacactggaaacaggcgtgcccagcagattttctggcagcggctctggcaccgactacaccctgacaatatccagcctccagcctgaggacttcgccacctactactgtcagcagagctggaacaccccttggacattcggccagggcaccaagctggaaatcaagagactcgaggacctgaagaacgtgttcccacctgaggtggccgtgttcgagcctagcgaggccgagatcagccacacccagaaagccaccctcgtgtgcctggctaccggcttctaccccgaccatgtggaactgtcttggtgggtcaacggcaaagaggtgcacagcggcgtgtgtaccgacccccagccactgaaagaacagcccgccctgaacgacagccggtactgcctgagcagcagactgagagtgtccgccaccttctggcagaacccccggaaccacttcagatgccaggtgcagttctacggcctgagcgagaacgacgagtggacccaggacagagccaagcccgtgacccagatcgtgtctgccgaagcctggggcagagccgatggcggctttaccagcgagagctaccagcagggcgtgctgagcgccaccatcctgtacgagatcctgctgggcaaggccaccctgtacgccgtgctggtgtctgccctggtgctgatggctatggtcaagcggaaggacagccggggaagggccaagcgatctggatctggagcaacaaacttctcactactcaaacaagcaggtgacgtggaggagaatcccgggcctactagtatggactggatttggcgcatccttttccttgtcggcgctgctaccggcgcgcattccttcgaacaagttcagcttcaacagcctggcgctgagctggtcaaacctggcgcttctgtgaagatgagctgcaaagccagcggctacgccttcagcagctactggatcaactggatgaagcagaaacccggccagggactcgaatggatcggccaaatctatcccggcgacggcgacaccaactacaacggcaagttcaagggcagagccacactgaccgccgatacctctagcagcacagcctacatgcagctgagcagcctgaccagcgaagatagcgccgtgtacttctgtgcccggtccatcacaacagtcgtgggctgcgctatggactattggggccagggaacaagcgtgaccgtgtctagtacgcgtatccagaaccctgatcctgccgtgtaccagctgcgggatagcaagagcagcgacaagagcgtgtgtctgttcaccgacttcgacagccagaccaacgtgtcccagagcaaggactccgacgtgtacatcaccgataagtgcgtgctggacatgcggagcatggacttcaagagcaactccgccgtggcctggtccaacaagtccgatttcgcctgcgccaacgccttcaacaacagcattatccccgaggacacattcttcccaagccccgagagcagctgcgacgtgaagctggtggaaaagagcttcgagacagacaccaacctgaacttccagaacctgagcgtgatcggcttcagaatcctgctgctgaaagtggccggctttaacctgctgatgaccctgcggctgtggtccagccgcgccaagagaagcggatctggcgtgaagcagaccctgaatttcgacctgctgaagctggctggcgacgtggaatccaacccaggcccttctagaggccatatgaccgagtacaagcccacggtgcgcctcgccacccgcgacgacgtccccagggccgtacgcaccctcgccgccgcgttcgccgactaccccgccacgcgccacaccgtcgatccggaccgccacatcgagcgggtcaccgagctgcaagaactcttcctcacgcgcgtcgggctcgacatcggcaaggtgtgggtcgcggacgacggcgccgcggtggcggtctggaccacgccggagagcgtcgaagcgggggcggtgttcgccgagatcggcccgcgcatggccgagttgagcggttcccggctggccgcgcagcaacagatggaaggcctcctggcgccgcaccggcccaaggagcccgcgtggttcctggccaccgtcggcgtctcgcccgaccaccagggcaagggtctgggcagcgccgtcgtgctccccggagtggaggcggccgagcgcgccggggtgcccgccttcctggagacctccgcgccccgcaacctccccttctacgagcggctcggcttcaccgtcaccgccgacgtcgaggtgcccgaaggaccgcgcacctggtgcatgacccgcaagcccggtgcctga

SEQ ID NO: 32504 - DNA, 3393 bp, synthetic construct
  source 1..3393: mol_type = other DNA
atggccttaccagtgaccgccttgctcctgccgctggccttgctgctccacgccgccaggccggacatccagatgacacagagccctagcagcctgtctgccagcgtgggagacagagtgaccatcacatgcaaggccagcgaccacatcaacaactggctggcctggtatcagcagaagcctggacaggcccctaagctgctgatctacggcgctaccacactggaaacaggcgtgcccagcagattttctggcagcggctctggcaccgactacaccctgacaatatccagcctccagcctgaggacttcgccacctactactgtcagcagagctggaacaccccttggacattcggccagggcaccaagctggaaatcaagagactcgaggacctgaagaacgtgttcccacctgaggtggccgtgttcgagcctagcgaggccgagatcagccacacccagaaagccaccctcgtgtgcctggctaccggcttctaccccgaccatgtggaactgtcttggtgggtcaacggcaaagaggtgcacagcggcgtgtgtaccgacccccagccactgaaagaacagcccgccctgaacgacagccggtactgcctgagcagcagactgagagtgtccgccaccttctggcagaacccccggaaccacttcagatgccaggtgcagttctacggcctgagcgagaacgacgagtggacccaggacagagccaagcccgtgacccagatcgtgtctgccgaagcctggggcagagccgattgcggctttaccagcgagagctaccagcagggcgtgctgagcgccaccatcctgtacgagatcctgctgggcaaggccaccctgtacgccgtgctggtgtctgccctggtgctgatggctatggtcaagcggaaggacagccggggaactagtagagtgaagttcagcagaagcgccgacgcccctgcctaccagcagggacagaaccaactgtacaacgagctgaacctgggcagacgggaagagtacgacgtgctggacaagcggagaggcagggaccctgagatgggcggaaagccccagcggagaaagaacccccaggaaggactgtataacgaactccagaaagacaagatggccgaagcctacagcgagatcggcatgaagggcgagcggagaagaggcaagggccacgatggcctgtaccagggcctgagcaccgccaccaaggacacctatgacgccctgcacatgcaggccctgcctccaagaagggccaagcgatctggatctggagcaacaaacttctcactactcaaacaagcaggtgacgtggaggagaatcccgggcctatggactggatttggcgcatccttttccttgtcggcgctgctaccggcgcgcattccttcgaacaagttcagcttcaacagcctggcgctgagctggtcaaacctggcgcttctgtgaagatgagctgcaaagccagcggctacgccttcagcagctactggatcaactggatgaagcagaaacccggccagggactcgaatggatcggccaaatctatcccggcgacggcgacaccaactacaacggcaagttcaagggcagagccacactgaccgccgatacctctagcagcacagcctacatgcagctgagcagcctgaccagcgaagatagcgccgtgtacttctgtgcccggtccatcacaacagtcgtgggctgcgctatggactattggggccagggaacaagcgtgaccgtgtctagtacgcgtgcctctacaaagggaccctccgtgtttcctctggctcccagcagcaagtctacaagcggaggaacagccgctctgggctgcctggtcaaggattactttcccgagcctgtgaccgtgtcctggaatagcggagcactgacaagcggcgtgcacacctttccagccgtgctgcaaagcagcggcctgtactctctgagcagcgtggtcacagtgcctagctctagcctgggcacccagacctacatctgcaatgtgaaccacaagcctagcaacaccaaggtggacaagagagtggaacccaagagctgtggtacctctggacaggtgctgctggaaagcaacatcaaggtgctgcccacctggtccacccccgtgcagcctatggctctgattgtgctgggcggagtggccggactgctgctgtttattggcctgggcatcttcttttgcgtgcggtgcagacaccggcggagacaggccgagagaatgagccagatcaagagactgctgtccgagaagaaaacctgccagtgcccccacagattccagaaaacatgcagccccatctctagacgggttaagttttccagatccgcagacgcacccgcttaccaacaagggcagaaccaactctacaatgaacttaatttggggcggagggaagagtacgacgttctggacaaaaggaggggacgagatcccgagatgggcggaaagcctcagcgaaggaagaatccgcaagaggggctttataacgaactccagaaagataaaatggcagaagcctatagtgagattgggatgaagggagaaaggaggaggggtaaaggtcacgatgggttgtaccaaggattgagcacagccactaaagatacctatgatgcgctccacatgcaggccctgccgccaagacgcgccaagagaagcggatctggcgtgaagcagaccctgaatttcgacctgctgaagctggctggcgacgtggaatccaacccaggccctggccatatgaccgagtacaagcccacggtgcgcctcgccacccgcgacgacgtccccagggccgtacgcaccctcgccgccgcgttcgccgactaccccgccacgcgccacaccgtcgatccggaccgccacatcgagcgggtcaccgagctgcaagaactcttcctcacgcgcgtcgggctcgacatcggcaaggtgtgggtcgcggacgacggcgccgcggtggcggtctggaccacgccggagagcgtcgaagcgggggcggtgttcgccgagatcggcccgcgcatggccgagttgagcggttcccggctggccgcgcagcaacagatggaaggcctcctggcgccgcaccggcccaaggagcccgcgtggttcctggccaccgtcggcgtctcgcccgaccaccagggcaagggtctgggcagcgccgtcgtgctccccggagtggaggcggccgagcgcgccggggtgcccgccttcctggagacctccgcgccccgcaacctccccttctacgagcggctcggcttcaccgtcaccgccgacgtcgaggtgcccgaaggaccgcgcacctggtgcatgacccgcaagcccggtgcctga

SEQ ID NO: 32505 - DNA, 3072 bp, synthetic construct
  source 1..3072: mol_type = other DNA
atggccttaccagtgaccgccttgctcctgccgctggccttgctgctccacgccgccaggccggacatccagatgacacagagccctagcagcctgtctgccagcgtgggagacagagtgaccatcacatgcaaggccagcgaccacatcaacaactggctggcctggtatcagcagaagcctggacaggcccctaagctgctgatctacggcgctaccacactggaaacaggcgtgcccagcagattttctggcagcggctctggcaccgactacaccctgacaatatccagcctccagcctgaggacttcgccacctactactgtcagcagagctggaacaccccttggacattcggccagggcaccaagctggaaatcaagagactcgaggccgacgtgtcccccaagcctaccatcttcctgccctctatcgccgagacaaagctccagaaggccggcacctacctgtgcctgctggaaaagttcttcccagatgtgattaagatccactggcaggaaaagaagtccaacaccatcctgggcagccaggaaggcaacaccatgaagaccaacgacacctacatgaagttcagctggctgaccgtgcccgagaagtccctggacaaagaacacagatgcatcgtgcggcacgaaaacaacaagaacggcgtggaccaggaaatcatcttcccacccatcaagaccgatgtgattacaatggaccccaaggacggatcccagagcttcggcctgctggaccccaagctgtgctacctgctggatggcatcctgttcatctacggcgtgatcctgaccgccctgttcctgagagtgaagttcagcagaagcgccgacgcccctgcctaccagcagggacagaaccaactgtacaacgagctgaacctgggcagacgggaagagtacgacgtgctggacaagcggagaggcagggaccctgagatgggcggaaagccccggagaaagaacccccaggaaggactgtataacgaactccagaaagacaagatggccgaagcctacagcgagatcggcatgaagggcgagcggagaagaggcaagggccacgatggcctgtaccagggcctgagcaccgccaccaaggacacctatgacgccctgcacatgcaggccctgcctccaagaagggccaagcgatctggatctggagcaacaaacttctcactactcaaacaagcaggtgacgtggaggagaatcccgggcctactagtatggactggatttggcgcatccttttccttgtcggcgctgctaccggcgcgcattccttcgaacaagttcagcttcaacagcctggcgctgagctggtcaaacctggcgcttctgtgaagatgagctgcaaagccagcggctacgccttcagcagctactggatcaactggatgaagcagaaacccggccagggactcgaatggatcggccaaatctatcccggcgacggcgacaccaactacaacggcaagttcaagggcagagccacactgaccgccgatacctctagcagcacagcctacatgcagctgagcagcctgaccagcgaagatagcgccgtgtacttctgtgcccggtccatcacaacagtcgtgggctgcgctatggactattggggccagggaacaagcgtgaccgtgtctagtacgcgtcctcacaccaagcccagcgtgttcgtgatgaagaacggcaccaacgtggcctgcctcgtgaaagagttctaccccaaggacatcaggatcaacctggtgtccagcaagaagatcaccgagttcgaccccgccatcgtgatctcccccagcggcaagtacaacgccgtgaagctggggaagtacgaggacagcaacagcgtgacctgctccgtgcagcacgacaacaagaccgtgcacagcaccgactttggtacccagagttttgggttgttggaccctaaattgtgctatctgttggacggaatcctgttcatttacggagtgatcctgaccgcattgttcctgcgggttaagttttccagatccgcagacgcacccgcttaccaacaagggcagaaccaactctacaatgaacttaatttggggcggagggaagagtacgacgttctggacaaaaggaggggacgagatcccgagatgggcggaaagcctcagcgaaggaagaatccgcaagaggggctttataacgaactccagaaagataaaatggcagaagcctatagtgagattgggatgaagggagaaaggaggaggggtaaaggtcacgatgggttgtaccaaggattgagcacagccactaaagatacctatgatgcgctccacatgcaggccctgccgccaagacgcgccaagagaagcggatctggcgtgaagcagaccctgaatttcgacctgctgaagctggctggcgacgtggaatccaacccaggcccttctagaggccatatgaccgagtacaagcccacggtgcgcctcgccacccgcgacgacgtccccagggccgtacgcaccctcgccgccgcgttcgccgactaccccgccacgcgccacaccgtcgatccggaccgccacatcgagcgggtcaccgagctgcaagaactcttcctcacgcgcgtcgggctcgacatcggcaaggtgtgggtcgcggacgacggcgccgcggtggcggtctggaccacgccggagagcgtcgaagcgggggcggtgttcgccgagatcggcccgcgcatggccgagttgagcggttcccggctggccgcgcagcaacagatggaaggcctcctggcgccgcaccggcccaaggagcccgcgtggttcctggccaccgtcggcgtctcgcccgaccaccagggcaagggtctgggcagcgccgtcgtgctccccggagtggaggcggccgagcgcgccggggtgcccgccttcctggagacctccgcgccccgcaacctccccttctacgagcggctcggcttcaccgtcaccgccgacgtcgaggtgcccgaaggaccgcgcacctggtgcatgacccgcaagcccggtgcctga

SEQ ID NO: 32506 - DNA, 3231 bp, synthetic construct
  source 1..3231: mol_type = other DNA
atggccttaccagtgaccgccttgctcctgccgctggccttgctgctccacgccgccaggccggacatccagatgacacagagccctagcagcctgtctgccagcgtgggagacagagtgaccatcacatgcaaggccagcgaccacatcaacaactggctggcctggtatcagcagaagcctggacaggcccctaagctgctgatctacggcgctaccacactggaaacaggcgtgcccagcagattttctggcagcggctctggcaccgactacaccctgacaatatccagcctccagcctgaggacttcgccacctactactgtcagcagagctggaacaccccttggacattcggccagggcaccaagctggaaatcaagagactcgaggacctgaagaacgtgttcccacctgaggtggccgtgttcgagcctagcgaggccgagatcagccacacccagaaagccaccctcgtgtgcctggctaccggcttctaccccgaccatgtggaactgtcttggtgggtcaacggcaaagaggtgcacagcggcgtgtgtaccgacccccagccactgaaagaacagcccgccctgaacgacagccggtactgcctgagcagcagactgagagtgtccgccaccttctggcagaacccccggaaccacttcagatgccaggtgcagttctacggcctgagcgagaacgacgagtggacccaggacagagccaagcccgtgacccagatcgtgtctgccgaagcctggggcagagccgattgcggctttaccagcgagagctaccagcagggcgtgctgagcgccggatcccagagcttcggcctgctggaccccaagctgtgctacctgctggatggcatcctgttcatctacggcgtgatcctgaccgccctgttcctgagagtgaagttcagcagaagcgccgacgcccctgcctaccagcagggacagaaccaactgtacaacgagctgaacctgggcagacgggaagagtacgacgtgctggacaagcggagaggcagggaccctgagatgggcggaaagccccggagaaagaacccccaggaaggactgtataacgaactccagaaagacaagatggccgaagcctacagcgagatcggcatgaagggcgagcggagaagaggcaagggccacgatggcctgtaccagggcctgagcaccgccaccaaggacacctatgacgccctgcacatgcaggccctgcctccaagaagggccaagcgatctggatctggagcaacaaacttctcactactcaaacaagcaggtgacgtggaggagaatcccgggcctactagtatggactggatttggcgcatccttttccttgtcggcgctgctaccggcgcgcattccttcgaacaagttcagcttcaacagcctggcgctgagctggtcaaacctggcgcttctgtgaagatgagctgcaaagccagcggctacgccttcagcagctactggatcaactggatgaagcagaaacccggccagggactcgaatggatcggccaaatctatcccggcgacggcgacaccaactacaacggcaagttcaagggcagagccacactgaccgccgatacctctagcagcacagcctacatgcagctgagcagcctgaccagcgaagatagcgccgtgtacttctgtgcccggtccatcacaacagtcgtgggctgcgctatggactattggggccagggaacaagcgtgaccgtgtctagtacgcgtatccagaaccctgatcctgccgtgtaccagctgcgggatagcaagagcagcgacaagagcgtgtgtctgttcaccgacttcgacagccagaccaacgtgtcccagagcaaggactccgacgtgtacatcaccgataagtgcgtgctggacatgcggagcatggacttcaagagcaactccgccgtggcctggtccaacaagtccgatttcgcctgcgccaacgccttcaacaacagcattatccccgaggacacattcttcccaagccccgagagcagctgcgacgtgaagctggtggaaaagagcttcgagacagacggtacccagagttttgggttgttggaccctaaattgtgctatctgttggacggaatcctgttcatttacggagtgatcctgaccgcattgttcctgcgggttaagttttccagatccgcagacgcacccgcttaccaacaagggcagaaccaactctacaatgaacttaatttggggcggagggaagagtacgacgttctggacaaaaggaggggacgagatcccgagatgggcggaaagcctcagcgaaggaagaatccgcaagaggggctttataacgaactccagaaagataaaatggcagaagcctatagtgagattgggatgaagggagaaaggaggaggggtaaaggtcacgatgggttgtaccaaggattgagcacagccactaaagatacctatgatgcgctccacatgcaggccctgccgccaagacgcgccaagagaagcggatctggcgtgaagcagaccctgaatttcgacctgctgaagctggctggcgacgtggaatccaacccaggcccttctagaggccatatgaccgagtacaagcccacggtgcgcctcgccacccgcgacgacgtccccagggccgtacgcaccctcgccgccgcgttcgccgactaccccgccacgcgccacaccgtcgatccggaccgccacatcgagcgggtcaccgagctgcaagaactcttcctcacgcgcgtcgggctcgacatcggcaaggtgtgggtcgcggacgacggcgccgcggtggcggtctggaccacgccggagagcgtcgaagcgggggcggtgttcgccgagatcggcccgcgcatggccgagttgagcggttcccggctggccgcgcagcaacagatggaaggcctcctggcgccgcaccggcccaaggagcccgcgtggttcctggccaccgtcggcgtctcgcccgaccaccagggcaagggtctgggcagcgccgtcgtgctccccggagtggaggcggccgagcgcgccggggtgcccgccttcctggagacctccgcgccccgcaacctccccttctacgagcggctcggcttcaccgtcaccgccgacgtcgaggtgcccgaaggaccgcgcacctggtgcatgacccgcaagcccggtgcctga

SEQ ID NO: 32507 - DNA, 2391 bp, synthetic construct
  source 1..2391: mol_type = other DNA
atggccttaccagtgaccgccttgctcctgccgctggccttgctgctccacgccgccaggccggacatccagatgacacagagccctagcagcctgtctgccagcgtgggagacagagtgaccatcacatgcaaggccagcgaccacatcaacaactggctggcctggtatcagcagaagcctggacaggcccctaagctgctgatctacggcgctaccacactggaaacaggcgtgcccagcagattttctggcagcggctctggcaccgactacaccctgacaatatccagcctccagcctgaggacttcgccacctactactgtcagcagagctggaacaccccttggacattcggccagggcaccaagctggaaatcaagagactcgaggacctgaagaacgtgttcccacctgaggtggccgtgttcgagcctagcgaggccgagatcagccacacccagaaagccaccctcgtgtgcctggctaccggcttctaccccgaccatgtggaactgtcttggtgggtcaacggcaaagaggtgcacagcggcgtgtctaccgacccccagccactgaaagaacagcccgccctgaacgacagccggtactgcctgagcagcagactgagagtgtccgccaccttctggcagaacccccggaaccacttcagatgccaggtgcagttctacggcctgagcgagaacgacgagtggacccaggacagagccaagcccgtgacccagatcgtgtctgccgaagcctggggcagagccgattgcggatcccagagcttcggcctgctggaccccaagctgtgctacctgctggatggcatcctgttcatctacggcgtgatcctgaccgccctgttcctgagagtgaagttcagcagaagcgccgacgcccctgcctaccagcagggacagaaccaactgtacaacgagctgaacctgggcagacgggaagagtacgacgtgctggacaagcggagaggcagggaccctgagatgggcggaaagccccagcggagaaagaacccccaggaaggactgtataacgaactccagaaagacaagatggccgaagcctacagcgagatcggcatgaagggcgagcggagaagaggcaagggccacgatggcctgtaccagggcctgagcaccgccaccaaggacacctatgacgccctgcacatgcaggccctgcctccaagaagggccaagcgatctggatctggagcaacaaacttctcactactcaaacaagcaggtgacgtggaggagaatcccgggcctactagtatggactggatttggcgcatccttttccttgtcggcgctgctaccggcgcgcattccttcgaacaagttcagcttcaacagcctggcgctgagctggtcaaacctggcgcttctgtgaagatgagctgcaaagccagcggctacgccttcagcagctactggatcaactggatgaagcagaaacccggccagggactcgaatggatcggccaaatctatcccggcgacggcgacaccaactacaacggcaagttcaagggcagagccacactgaccgccgatacctctagcagcacagcctacatgcagctgagcagcctgaccagcgaagatagcgccgtgtacttctgtgcccggtccatcacaacagtcgtgggctgcgctatggactattggggccagggaacaagcgtgaccgtgtctagtacgcgtatccagaaccctgatcctgccgtgtaccagctgcgggatagcaagagcagcgacaagagcgtgtgtctgttcaccgacttcgacagccagaccaacgtgtcccagagcaaggactccgacgtgtacatcaccgataagtgcgtgctggacatgcggagcatggacttcaagagcaactccgccgtggcctggtccaacaagtccgatttcgcctgcgccaacgccttcaacaacagcattatccccgaggacacattcttcccaagccccgagagcagctgcgacgtgaagctggtggaaaagagcttcgagacagacaccaacctgaacttccagaacctgagcggtaccgaagtgaaaaccgactccaccgaccacgtgaagcccaaagagacagagaacaccaagcagcccagcaagagctgccacaagcccaaggccatcgtgcacaccgagaaagtgaacatgatgagcctgaccgtgctgggcctgcggatgctgttcgccaaaaccgtggccgtgaacttcctgctgaccgccaagctgttcttcctccgcgccaagagaagcggatctggcgtgaagcagaccctgaatttcgacctgctgaagctggctggcgacgtggaatccaacccaggcccttctagataa

SEQ ID NO: 32508 - DNA, 2364 bp, synthetic construct
  source 1..2364: mol_type = other DNA
atggccttaccagtgaccgccttgctcctgccgctggccttgctgctccacgccgccaggccggacatccagatgacacagagccctagcagcctgtctgccagcgtgggagacagagtgaccatcacatgcaaggccagcgaccacatcaacaactggctggcctggtatcagcagaagcctggacaggcccctaagctgctgatctacggcgctaccacactggaaacaggcgtgcccagcagattttctggcagcggctctggcaccgactacaccctgacaatatccagcctccagcctgaggacttcgccacctactactgtcagcagagctggaacaccccttggacattcggccagggcaccaagctggaaatcaagagactcgaggacctgaagaacgtgttcccacctgaggtggccgtgttcgagcctagcgaggccgagatcagccacacccagaaagccaccctcgtgtgcctggctaccggcttctaccccgaccatgtggaactgtcttggtgggtcaacggcaaagaggtgcacagcggcgtgtctaccgacccccagccactgaaagaacagcccgccctgaacgacagccggtactgcctgagcagcagactgagagtgtccgccaccttctggcagaacccccggaaccacttcagatgccaggtgcagttctacggcctgagcgagaacgacgagtggacccaggacagagccaagcccgtgacccagatcgtgtctgccgaagcctggggcagagccgattgcggatcccagagcttcggcctgctggaccccaagctgtgctacctgctggatggcatcctgttcatctacggcgtgatcctgaccgccctgttcctgagagtgaagttcagcagaagcgccgacgcccctgcctaccagcagggacagaaccaactgtacaacgagctgaacctgggcagacgggaagagtacgacgtgctggacaagcggagaggcagggaccctgagatgggcggaaagccccagcggagaaagaacccccaggaaggactgtataacgaactccagaaagacaagatggccgaagcctacagcgagatcggcatgaagggcgagcggagaagaggcaagggccacgatggcctgtaccagggcctgagcaccgccaccaaggacacctatgacgccctgcacatgcaggccctgcctccaagaagggccaagcgatctggatctggagcaacaaacttctcactactcaaacaagcaggtgacgtggaggagaatcccgggcctactagtatggactggatttggcgcatccttttccttgtcggcgctgctaccggcgcgcattccttcgaacaagttcagcttcaacagcctggcgctgagctggtcaaacctggcgcttctgtgaagatgagctgcaaagccagcggctacgccttcagcagctactggatcaactggatgaagcagaaacccggccagggactcgaatggatcggccaaatctatcccggcgacggcgacaccaactacaacggcaagttcaagggcagagccacactgaccgccgatacctctagcagcacagcctacatgcagctgagcagcctgaccagcgaagatagcgccgtgtacttctgtgcccggtccatcacaacagtcgtgggctgcgctatggactattggggccagggaacaagcgtgaccgtgtctagtacgcgtatccagaaccctgatcctgccgtgtaccagctgcgggatagcaagagcagcgacaagagcgtgtgtctgttcaccgacttcgacagccagaccaacgtgtcccagagcaaggactccgacgtgtacatcaccgataagtgcgtgctggacatgcggagcatggacttcaagagcaactccgccgtggcctggtccaacaagtccgatttcgcctgcgccaacgccttcaacaacagcattatccccgaggacacattcttcccaagccccgagagcagctgcgacgtgaagctggtggaaaagagcttcgagacagacggtaccgaagtgaaaaccgactccaccgaccacgtgaagcccaaagagacagagaacaccaagcagcccagcaagagctgccacaagcccaaggccatcgtgcacaccgagaaagtgaacatgatgagcctgaccgtgctgggcctgcggatgctgttcgccaaaaccgtggccgtgaacttcctgctgaccgccaagctgttcttcctccgcgccaagagaagcggatctggcgtgaagcagaccctgaatttcgacctgctgaagctggctggcgacgtggaatccaacccaggcccttctagataa

SEQ ID NO: 32509 - DNA, 2295 bp, synthetic construct
  source 1..2295: mol_type = other DNA
atggccttaccagtgaccgccttgctcctgccgctggccttgctgctccacgccgccaggccggacatccagatgacacagagccctagcagcctgtctgccagcgtgggagacagagtgaccatcacatgcaaggccagcgaccacatcaacaactggctggcctggtatcagcagaagcctggacaggcccctaagctgctgatctacggcgctaccacactggaaacaggcgtgcccagcagattttctggcagcggctctggcaccgactacaccctgacaatatccagcctccagcctgaggacttcgccacctactactgtcagcagagctggaacaccccttggacattcggccagggcaccaagctggaaatcaagagactcgaggacctgaagaacgtgttcccacctgaggtggccgtgttcgagcctagcgaggccgagatcagccacacccagaaagccaccctcgtgtgcctggctaccggcttctaccccgaccatgtggaactgtcttggtgggtcaacggcaaagaggtgcacagcggcgtgtctaccgacccccagccactgaaagaacagcccgccctgaacgacagccggtactgcctgagcagcagactgagagtgtccgccaccttctggcagaacccccggaaccacttcagatgccaggtgcagttctacggcctgagcgagaacgacgagtggacccaggacagagccaagcccgtgacccagatcgtgtctgccgaagcctggggcagagccgattgcggatcccagagcttcggcctgctggaccccaagctgtgctacctgctggatggcatcctgttcatctacggcgtgatcctgaccgccctgttcctgagagtgaagttcagcagaagcgccgacgcccctgcctaccagcagggacagaaccaactgtacaacgagctgaacctgggcagacgggaagagtacgacgtgctggacaagcggagaggcagggaccctgagatgggcggaaagccccagcggagaaagaacccccaggaaggactgtataacgaactccagaaagacaagatggccgaagcctacagcgagatcggcatgaagggcgagcggagaagaggcaagggccacgatggcctgtaccagggcctgagcaccgccaccaaggacacctatgacgccctgcacatgcaggccctgcctccaagaagggccaagcgatctggatctggagcaacaaacttctcactactcaaacaagcaggtgacgtggaggagaatcccgggcctactagtatggactggatttggcgcatccttttccttgtcggcgctgctaccggcgcgcattccttcgaacaagttcagcttcaacagcctggcgctgagctggtcaaacctggcgcttctgtgaagatgagctgcaaagccagcggctacgccttcagcagctactggatcaactggatgaagcagaaacccggccagggactcgaatggatcggccaaatctatcccggcgacggcgacaccaactacaacggcaagttcaagggcagagccacactgaccgccgatacctctagcagcacagcctacatgcagctgagcagcctgaccagcgaagatagcgccgtgtacttctgtgcccggtccatcacaacagtcgtgggctgcgctatggactattggggccagggaacaagcgtgaccgtgtctagtacgcgtcctcacaccaagcccagcgtgttcgtgatgaagaacggcaccaacgtggcctgcctcgtgaaagagttctaccccaaggacatcaggatcaacctggtgtccagcaagaagatcaccgagttcgaccccgccatcgtgatctcccccagcggcaagtacaacgccgtgaagctggggaagtacgaggacagcaacagcgtgacctgctccgtgcagcacgacaacaagaccgtgcacagcaccgactttggtaccgaagtgaaaaccgactccaccgaccacgtgaagcccaaagagacagagaacaccaagcagcccagcaagagctgccacaagcccaaggccatcgtgcacaccgagaaagtgaacatgatgagcctgaccgtgctgggcctgcggatgctgttcgccaaaaccgtggccgtgaacttcctgctgaccgccaagctgttcttcctccgcgccaagagaagcggatctggcgtgaagcagaccctgaatttcgacctgctgaagctggctggcgacgtggaatccaacccaggcccttctagataa

SEQ ID NO: 32510 - DNA, 3207 bp, synthetic construct
  source 1..3207: mol_type = other DNA
atggccttaccagtgaccgccttgctcctgccgctggccttgctgctccacgccgccaggccggacatccagatgacacagagccctagcagcctgtctgccagcgtgggagacagagtgaccatcacatgcaaggccagcgaccacatcaacaactggctggcctggtatcagcagaagcctggacaggcccctaagctgctgatctacggcgctaccacactggaaacaggcgtgcccagcagattttctggcagcggctctggcaccgactacaccctgacaatatccagcctccagcctgaggacttcgccacctactactgtcagcagagctggaacaccccttggacattcggccagggcaccaagctggaaatcaagagactcgaggacctgaagaacgtgttcccacctgaggtggccgtgttcgagcctagcgaggccgagatcagccacacccagaaagccaccctcgtgtgcctggctaccggcttctaccccgaccatgtggaactgtcttggtgggtcaacggcaaagaggtgcacagcggcgtgtgtaccgacccccagccactgaaagaacagcccgccctgaacgacagccggtactgcctgagcagcagactgagagtgtccgccaccttctggcagaacccccggaaccacttcagatgccaggtgcagttctacggcctgagcgagaacgacgagtggacccaggacagagccaagcccgtgacccagatcgtgtctgccgaagcctggggcagagccgattgcggctttaccagcgagagctaccagcagggcgtgctgagcgccaccatcctgtacgagatcctgctgggcaaggccaccctgtacgccgtgctggtgtctgccctggtgctgatggctatggtcaagcggaaggacagccggggaggatccagagtgaagttcagcagaagcgccgacgcccctgcctaccagcagggacagaaccaactgtacaacgagctgaacctgggcagacgggaagagtacgacgtgctggacaagcggagaggcagggaccctgagatgggcggaaagccccggagaaagaacccccaggaaggactgtataacgaactccagaaagacaagatggccgaagcctacagcgagatcggcatgaagggcgagcggagaagaggcaagggccacgatggcctgtaccagggcctgagcaccgccaccaaggacacctatgacgccctgcacatgcaggccctgcctccaagaagggccaagcgatctggatctggagcaacaaacttctcactactcaaacaagcaggtgacgtggaggagaatcccgggcctactagtatggactggatttggcgcatccttttccttgtcggcgctgctaccggcgcgcattccttcgaacaagttcagcttcaacagcctggcgctgagctggtcaaacctggcgcttctgtgaagatgagctgcaaagccagcggctacgccttcagcagctactggatcaactggatgaagcagaaacccggccagggactcgaatggatcggccaaatctatcccggcgacggcgacaccaactacaacggcaagttcaagggcagagccacactgaccgccgatacctctagcagcacagcctacatgcagctgagcagcctgaccagcgaagatagcgccgtgtacttctgtgcccggtccatcacaacagtcgtgggctgcgctatggactattggggccagggaacaagcgtgaccgtgtctagtacgcgtatccagaaccctgatcctgccgtgtaccagctgcgggatagcaagagcagcgacaagagcgtgtgtctgttcaccgacttcgacagccagaccaacgtgtcccagagcaaggactccgacgtgtacatcaccgataagaccgtgctggacatgcggagcatggacttcaagagcaactccgccgtggcctggtccaacaagtccgatttcgcctgcgccaacgccttcaacaacagcattatccccgaggacacattcttcccaagccccgagagcagctgcggtacccagagttttgggttgttggaccctaaattgtgctatctgttggacggaatcctgttcatttacggagtgatcctgaccgcattgttcctgcgggttaagttttccagatccgcagacgcacccgcttaccaacaagggcagaaccaactctacaatgaacttaatttggggcggagggaagagtacgacgttctggacaaaaggaggggacgagatcccgagatgggcggaaagcctcagcgaaggaagaatccgcaagaggggctttataacgaactccagaaagataaaatggcagaagcctatagtgagattgggatgaagggagaaaggaggaggggtaaaggtcacgatgggttgtaccaaggattgagcacagccactaaagatacctatgatgcgctccacatgcaggccctgccgccaagacgcgccaagagaagcggatctggcgtgaagcagaccctgaatttcgacctgctgaagctggctggcgacgtggaatccaacccaggcccttctagaggccatatgaccgagtacaagcccacggtgcgcctcgccacccgcgacgacgtccccagggccgtacgcaccctcgccgccgcgttcgccgactaccccgccacgcgccacaccgtcgatccggaccgccacatcgagcgggtcaccgagctgcaagaactcttcctcacgcgcgtcgggctcgacatcggcaaggtgtgggtcgcggacgacggcgccgcggtggcggtctggaccacgccggagagcgtcgaagcgggggcggtgttcgccgagatcggcccgcgcatggccgagttgagcggttcccggctggccgcgcagcaacagatggaaggcctcctggcgccgcaccggcccaaggagcccgcgtggttcctggccaccgtcggcgtctcgcccgaccaccagggcaagggtctgggcagcgccgtcgtgctccccggagtggaggcggccgagcgcgccggggtgcccgccttcctggagacctccgcgccccgcaacctccccttctacgagcggctcggcttcaccgtcaccgccgacgtcgaggtgcccgaaggaccgcgcacctggtgcatgacccgcaagcccggtgcctga

SEQ ID NO: 32511 - DNA, 3150 bp, synthetic construct
  source 1..3150: mol_type = other DNA
atggccttaccagtgaccgccttgctcctgccgctggccttgctgctccacgccgccaggccggacatccagatgacacagagccctagcagcctgtctgccagcgtgggagacagagtgaccatcacatgcaaggccagcgaccacatcaacaactggctggcctggtatcagcagaagcctggacaggcccctaagctgctgatctacggcgctaccacactggaaacaggcgtgcccagcagattttctggcagcggctctggcaccgactacaccctgacaatatccagcctccagcctgaggacttcgccacctactactgtcagcagagctggaacaccccttggacattcggccagggcaccaagctggaaatcaagagactcgagggacagcctaaggccaatcctaccgtgacactgttccctccaagcagcgaagaactccaggccaacaaggccacacttgtgtgcctgatctccgacttctaccctggggctgtgacagtggcttggaaggccgatggatctcctgtgaaagccggcgtggaaaccaccaagccatccaagcagagcaacaacaaatacgccgccagctcctacctgagcctgacacctgagcagtggaagtcccacagatcctacagctgccaagtgacccacgaaggcagcaccgtggaaaagacagtggcccctacagagtgcagcggcagagccgattgcggctttaccagcgagagctaccagcagggcgtgctgagcgccaccatcctgtacgagatcctgctgggcaaggccaccctgtacgccgtgctggtgtctgccctggtgctgatggctatggtcaagcggaaggacagccggggaggatccagagtgaagttcagcagaagcgccgacgcccctgcctaccagcagggacagaaccaactgtacaacgagctgaacctgggcagacgggaagagtacgacgtgctggacaagcggagaggcagggaccctgagatgggcggaaagccccggagaaagaacccccaggaaggactgtataacgaactccagaaagacaagatggccgaagcctacagcgagatcggcatgaagggcgagcggagaagaggcaagggccacgatggcctgtaccagggcctgagcaccgccaccaaggacacctatgacgccctgcacatgcaggccctgcctccaagaagggccaagcgatctggatctggagcaacaaacttctcactactcaaacaagcaggtgacgtggaggagaatcccgggcctactagtatggactggatttggcgcatccttttccttgtcggcgctgctaccggcgcgcattccttcgaacaagttcagcttcaacagcctggcgctgagctggtcaaacctggcgcttctgtgaagatgagctgcaaagccagcggctacgccttcagcagctactggatcaactggatgaagcagaaacccggccagggactcgaatggatcggccaaatctatcccggcgacggcgacaccaactacaacggcaagttcaagggcagagccacactgaccgccgatacctctagcagcacagcctacatgcagctgagcagcctgaccagcgaagatagcgccgtgtacttctgtgcccggtccatcacaacagtcgtgggctgcgctatggactattggggccagggaacaagcgtgaccgtgtctagtacgcgtatccagaaccctgatcctgccgtgtaccagctgcgggatagcaagagcagcgacaagagcgtgtgtctgttcaccgacttcgacagccagaccaacgtgtcccagagcaaggactccgacgtgtacatcaccgataagaccgtgctggacatgcggagcatggacttcaagagcaactccgccgtggcctggtccaacaagtccgatttcgcctgcgccaacgccttcaacaacagcattatccccgaggacacattcttcccaagccccgagagcagctgcggtacccagagttttgggttgttggaccctaaattgtgctatctgttggacggaatcctgttcatttacggagtgatcctgaccgcattgttcctgcgggttaagttttccagatccgcagacgcacccgcttaccaacaagggcagaaccaactctacaatgaacttaatttggggcggagggaagagtacgacgttctggacaaaaggaggggacgagatcccgagatgggcggaaagcctcagcgaaggaagaatccgcaagaggggctttataacgaactccagaaagataaaatggcagaagcctatagtgagattgggatgaagggagaaaggaggaggggtaaaggtcacgatgggttgtaccaaggattgagcacagccactaaagatacctatgatgcgctccacatgcaggccctgccgccaagacgcgccaagagaagcggatctggcgtgaagcagaccctgaatttcgacctgctgaagctggctggcgacgtggaatccaacccaggcccttctagaggccatatgaccgagtacaagcccacggtgcgcctcgccacccgcgacgacgtccccagggccgtacgcaccctcgccgccgcgttcgccgactaccccgccacgcgccacaccgtcgatccggaccgccacatcgagcgggtcaccgagctgcaagaactcttcctcacgcgcgtcgggctcgacatcggcaaggtgtgggtcgcggacgacggcgccgcggtggcggtctggaccacgccggagagcgtcgaagcgggggcggtgttcgccgagatcggcccgcgcatggccgagttgagcggttcccggctggccgcgcagcaacagatggaaggcctcctggcgccgcaccggcccaaggagcccgcgtggttcctggccaccgtcggcgtctcgcccgaccaccagggcaagggtctgggcagcgccgtcgtgctccccggagtggaggcggccgagcgcgccggggtgcccgccttcctggagacctccgcgccccgcaacctccccttctacgagcggctcggcttcaccgtcaccgccgacgtcgaggtgcccgaaggaccgcgcacctggtgcatgacccgcaagcccggtgcctga

SEQ ID NO: 32512 - DNA, 3177 bp, synthetic construct
  source 1..3177: mol_type = other DNA
atggccttaccagtgaccgccttgctcctgccgctggccttgctgctccacgccgccaggccggacatccagatgacacagagccctagcagcctgtctgccagcgtgggagacagagtgaccatcacatgcaaggccagcgaccacatcaacaactggctggcctggtatcagcagaagcctggacaggcccctaagctgctgatctacggcgctaccacactggaaacaggcgtgcccagcagattttctggcagcggctctggcaccgactacaccctgacaatatccagcctccagcctgaggacttcgccacctactactgtcagcagagctggaacaccccttggacattcggccagggcaccaagctggaaatcaagagactcgaggccgacgtgtcccccaagcctaccatcttcctgccctctatcgccgagacaaagctccagaaggccggcacctacctgtgcctgctggaaaagttcttcccagatgtgattaagatccactggcaggaaaagaagtccaacaccatcctgggcagccaggaaggcaacaccatgaagaccaacgacacctacatgaagttcagctggctgaccgtgcccgagaagtccctggacaaagaacacagatgcatcgtgcggcacgaaaacaacaagaacggcgtggaccaggaaatcatcttcccacccatcaagaccgatgtgattacaatggaccccaaggacaactgctccaaggacgccaacgataccctgctgctccagctgaccaacaccagcgcctactacatgtacttgttgctgctgctgaagtccgtggtgtacttcgccatcatcacatgctgcctgctgcggagaaccgccttctgctgcaacggcgagaagtctggatccagagtgaagttcagcagaagcgccgacgcccctgcctaccagcagggacagaaccaactgtacaacgagctgaacctgggcagacgggaagagtacgacgtgctggacaagcggagaggcagggaccctgagatgggcggaaagccccggagaaagaacccccaggaaggactgtataacgaactccagaaagacaagatggccgaagcctacagcgagatcggcatgaagggcgagcggagaagaggcaagggccacgatggcctgtaccagggcctgagcaccgccaccaaggacacctatgacgccctgcacatgcaggccctgcctccaagaagggccaagcgatctggatctggagcaacaaacttctcactactcaaacaagcaggtgacgtggaggagaatcccgggcctactagtatggactggatttggcgcatccttttccttgtcggcgctgctaccggcgcgcattccttcgaacaagttcagcttcaacagcctggcgctgagctggtcaaacctggcgcttctgtgaagatgagctgcaaagccagcggctacgccttcagcagctactggatcaactggatgaagcagaaacccggccagggactcgaatggatcggccaaatctatcccggcgacggcgacaccaactacaacggcaagttcaagggcagagccacactgaccgccgatacctctagcagcacagcctacatgcagctgagcagcctgaccagcgaagatagcgccgtgtacttctgtgcccggtccatcacaacagtcgtgggctgcgctatggactattggggccagggaacaagcgtgaccgtgtctagtacgcgtatccagaaccctgatcctgccgtgtaccagctgcgggatagcaagagcagcgacaagagcgtgtgtctgttcaccgacttcgacagccagaccaacgtgtcccagagcaaggactccgacgtgtacatcaccgataagaccgtgctggacatgcggagcatggacttcaagagcaactccgccgtggcctggtccaacaagtccgatttcgcctgcgccaacgccttcaacaacagcattatccccgaggacacattcttcccaagccccgagagcagctgcggtacccagagttttgggttgttggaccctaaattgtgctatctgttggacggaatcctgttcatttacggagtgatcctgaccgcattgttcctgcgggttaagttttccagatccgcagacgcacccgcttaccaacaagggcagaaccaactctacaatgaacttaatttggggcggagggaagagtacgacgttctggacaaaaggaggggacgagatcccgagatgggcggaaagcctcagcgaaggaagaatccgcaagaggggctttataacgaactccagaaagataaaatggcagaagcctatagtgagattgggatgaagggagaaaggaggaggggtaaaggtcacgatgggttgtaccaaggattgagcacagccactaaagatacctatgatgcgctccacatgcaggccctgccgccaagacgcgccaagagaagcggatctggcgtgaagcagaccctgaatttcgacctgctgaagctggctggcgacgtggaatccaacccaggcccttctagaggccatatgaccgagtacaagcccacggtgcgcctcgccacccgcgacgacgtccccagggccgtacgcaccctcgccgccgcgttcgccgactaccccgccacgcgccacaccgtcgatccggaccgccacatcgagcgggtcaccgagctgcaagaactcttcctcacgcgcgtcgggctcgacatcggcaaggtgtgggtcgcggacgacggcgccgcggtggcggtctggaccacgccggagagcgtcgaagcgggggcggtgttcgccgagatcggcccgcgcatggccgagttgagcggttcccggctggccgcgcagcaacagatggaaggcctcctggcgccgcaccggcccaaggagcccgcgtggttcctggccaccgtcggcgtctcgcccgaccaccagggcaagggtctgggcagcgccgtcgtgctccccggagtggaggcggccgagcgcgccggggtgcccgccttcctggagacctccgcgccccgcaacctccccttctacgagcggctcggcttcaccgtcaccgccgacgtcgaggtgcccgaaggaccgcgcacctggtgcatgacccgcaagcccggtgcctga

SEQ ID NO: 32513 - DNA, 3192 bp, synthetic construct
  source 1..3192: mol_type = other DNA
atggccttaccagtgaccgccttgctcctgccgctggccttgctgctccacgccgccaggccggacatccagatgacacagagccctagcagcctgtctgccagcgtgggagacagagtgaccatcacatgcaaggccagcgaccacatcaacaactggctggcctggtatcagcagaagcctggacaggcccctaagctgctgatctacggcgctaccacactggaaacaggcgtgcccagcagattttctggcagcggctctggcaccgactacaccctgacaatatccagcctccagcctgaggacttcgccacctactactgtcagcagagctggaacaccccttggacattcggccagggcaccaagctggaaatcaagagactcgagggacagcctaaggccaatcctaccgtgacactgttccctccaagcagcgaagaactccaggccaacaaggccacacttgtgtgcctgatctccgacttctaccctggggctgtgacagtggcttggaaggccgatggatctcctgtgaaagccggcgtggaaaccaccaagccatccaagcagagcaacaacaaatacgccgccagctcctacctgagcctgacacctgagcagtggaagtcccacagatcctacagctgccaagtgacccacgaaggcagcaccgtggaaaagacagtggcccctacagagtgcagccccatcaagaccgatgtgattacaatggaccccaaggacaactgctccaaggacgccaacgataccctgctgctccagctgaccaacaccagcgcctactacatgtacttgttgctgctgctgaagtccgtggtgtacttcgccatcatcacatgctgcctgctgcggagaaccgccttctgctgcaacggcgagaagtctggatccagagtgaagttcagcagaagcgccgacgcccctgcctaccagcagggacagaaccaactgtacaacgagctgaacctgggcagacgggaagagtacgacgtgctggacaagcggagaggcagggaccctgagatgggcggaaagccccggagaaagaacccccaggaaggactgtataacgaactccagaaagacaagatggccgaagcctacagcgagatcggcatgaagggcgagcggagaagaggcaagggccacgatggcctgtaccagggcctgagcaccgccaccaaggacacctatgacgccctgcacatgcaggccctgcctccaagaagggccaagcgatctggatctggagcaacaaacttctcactactcaaacaagcaggtgacgtggaggagaatcccgggcctactagtatggactggatttggcgcatccttttccttgtcggcgctgctaccggcgcgcattccttcgaacaagttcagcttcaacagcctggcgctgagctggtcaaacctggcgcttctgtgaagatgagctgcaaagccagcggctacgccttcagcagctactggatcaactggatgaagcagaaacccggccagggactcgaatggatcggccaaatctatcccggcgacggcgacaccaactacaacggcaagttcaagggcagagccacactgaccgccgatacctctagcagcacagcctacatgcagctgagcagcctgaccagcgaagatagcgccgtgtacttctgtgcccggtccatcacaacagtcgtgggctgcgctatggactattggggccagggaacaagcgtgaccgtgtctagtacgcgtatccagaaccctgatcctgccgtgtaccagctgcgggatagcaagagcagcgacaagagcgtgtgtctgttcaccgacttcgacagccagaccaacgtgtcccagagcaaggactccgacgtgtacatcaccgataagaccgtgctggacatgcggagcatggacttcaagagcaactccgccgtggcctggtccaacaagtccgatttcgcctgcgccaacgccttcaacaacagcattatccccgaggacacattcttcccaagccccgagagcagctgcggtacccagagttttgggttgttggaccctaaattgtgctatctgttggacggaatcctgttcatttacggagtgatcctgaccgcattgttcctgcgggttaagttttccagatccgcagacgcacccgcttaccaacaagggcagaaccaactctacaatgaacttaatttggggcggagggaagagtacgacgttctggacaaaaggaggggacgagatcccgagatgggcggaaagcctcagcgaaggaagaatccgcaagaggggctttataacgaactccagaaagataaaatggcagaagcctatagtgagattgggatgaagggagaaaggaggaggggtaaaggtcacgatgggttgtaccaaggattgagcacagccactaaagatacctatgatgcgctccacatgcaggccctgccgccaagacgcgccaagagaagcggatctggcgtgaagcagaccctgaatttcgacctgctgaagctggctggcgacgtggaatccaacccaggcccttctagaggccatatgaccgagtacaagcccacggtgcgcctcgccacccgcgacgacgtccccagggccgtacgcaccctcgccgccgcgttcgccgactaccccgccacgcgccacaccgtcgatccggaccgccacatcgagcgggtcaccgagctgcaagaactcttcctcacgcgcgtcgggctcgacatcggcaaggtgtgggtcgcggacgacggcgccgcggtggcggtctggaccacgccggagagcgtcgaagcgggggcggtgttcgccgagatcggcccgcgcatggccgagttgagcggttcccggctggccgcgcagcaacagatggaaggcctcctggcgccgcaccggcccaaggagcccgcgtggttcctggccaccgtcggcgtctcgcccgaccaccagggcaagggtctgggcagcgccgtcgtgctccccggagtggaggcggccgagcgcgccggggtgcccgccttcctggagacctccgcgccccgcaacctccccttctacgagcggctcggcttcaccgtcaccgccgacgtcgaggtgcccgaaggaccgcgcacctggtgcatgacccgcaagcccggtgcctga

SEQ ID NO: 32514 - DNA, 3156 bp, synthetic construct
  source 1..3156: mol_type = other DNA
atggccttaccagtgaccgccttgctcctgccgctggccttgctgctccacgccgccaggccggacatccagatgacacagagccctagcagcctgtctgccagcgtgggagacagagtgaccatcacatgcaaggccagcgaccacatcaacaactggctggcctggtatcagcagaagcctggacaggcccctaagctgctgatctacggcgctaccacactggaaacaggcgtgcccagcagattttctggcagcggctctggcaccgactacaccctgacaatatccagcctccagcctgaggacttcgccacctactactgtcagcagagctggaacaccccttggacattcggccagggcaccaagctggaaatcaagagactcgaggacctgaagaacgtgttcccacctgaggtggccgtgttcgagcctagcgaggccgagatcagccacacccagaaagccaccctcgtgtgcctggctaccggcttctaccccgaccatgtggaactgtcttggtgggtcaacggcaaagaggtgcacagcggcgtgtctaccgacccccagccactgaaagaacagcccgccctgaacgacagccggtactgcctgagcagcagactgagagtgtccgccaccttctggcagaacccccggaaccacttcagatgccaggtgcagttctacggcctgagcgagaacgacgagtggacccaggacagagccaagcccgtgacccagatcgtgtctgccgaagcctggggcagagccgattgcggatcccagagcttcggcctgctggaccccaagctgtgctacctgctggatggcatcctgttcatctacggcgtgatcctgaccgccctgttcctgagagtgaagttcagcagaagcgccgacgcccctgcctaccagcagggacagaaccaactgtacaacgagctgaacctgggcagacgggaagagtacgacgtgctggacaagcggagaggcagggaccctgagatgggcggaaagccccagcggagaaagaacccccaggaaggactgtataacgaactccagaaagacaagatggccgaagcctacagcgagatcggcatgaagggcgagcggagaagaggcaagggccacgatggcctgtaccagggcctgagcaccgccaccaaggacacctatgacgccctgcacatgcaggccctgcctccaagaagggccaagcgatctggatctggagcaacaaacttctcactactcaaacaagcaggtgacgtggaggagaatcccgggcctactagtatggactggatttggcgcatccttttccttgtcggcgctgctaccggcgcgcattccttcgaacaagttcagcttcaacagcctggcgctgagctggtcaaacctggcgcttctgtgaagatgagctgcaaagccagcggctacgccttcagcagctactggatcaactggatgaagcagaaacccggccagggactcgaatggatcggccaaatctatcccggcgacggcgacaccaactacaacggcaagttcaagggcagagccacactgaccgccgatacctctagcagcacagcctacatgcagctgagcagcctgaccagcgaagatagcgccgtgtacttctgtgcccggtccatcacaacagtcgtgggctgcgctatggactattggggccagggaacaagcgtgaccgtgtctagtacgcgtatccagaaccctgatcctgccgtgtaccagctgcgggatagcaagagcagcgacaagagcgtgtgtctgttcaccgacttcgacagccagaccaacgtgtcccagagcaaggactccgacgtgtacatcaccgataagaccgtgctggacatgcggagcatggacttcaagagcaactccgccgtggcctggtccaacaagtccgatttcgcctgcgccaacgccttcaacaacagcattatccccgaggacacattcttcccaagccccgagagcagctgcggtacccagagttttgggttgttggaccctaaattgtgctatctgttggacggaatcctgttcatttacggagtgatcctgaccgcattgttcctgcgggttaagttttccagatccgcagacgcacccgcttaccaacaagggcagaaccaactctacaatgaacttaatttggggcggagggaagagtacgacgttctggacaaaaggaggggacgagatcccgagatgggcggaaagcctcagcgaaggaagaatccgcaagaggggctttataacgaactccagaaagataaaatggcagaagcctatagtgagattgggatgaagggagaaaggaggaggggtaaaggtcacgatgggttgtaccaaggattgagcacagccactaaagatacctatgatgcgctccacatgcaggccctgccgccaagacgcgccaagagaagcggatctggcgtgaagcagaccctgaatttcgacctgctgaagctggctggcgacgtggaatccaacccaggcccttctagaggccatatgaccgagtacaagcccacggtgcgcctcgccacccgcgacgacgtccccagggccgtacgcaccctcgccgccgcgttcgccgactaccccgccacgcgccacaccgtcgatccggaccgccacatcgagcgggtcaccgagctgcaagaactcttcctcacgcgcgtcgggctcgacatcggcaaggtgtgggtcgcggacgacggcgccgcggtggcggtctggaccacgccggagagcgtcgaagcgggggcggtgttcgccgagatcggcccgcgcatggccgagttgagcggttcccggctggccgcgcagcaacagatggaaggcctcctggcgccgcaccggcccaaggagcccgcgtggttcctggccaccgtcggcgtctcgcccgaccaccagggcaagggtctgggcagcgccgtcgtgctccccggagtggaggcggccgagcgcgccggggtgcccgccttcctggagacctccgcgccccgcaacctccccttctacgagcggctcggcttcaccgtcaccgccgacgtcgaggtgcccgaaggaccgcgcacctggtgcatgacccgcaagcccggtgcctga

SEQ ID NO: 32515 - DNA, 3294 bp, synthetic construct
  source 1..3294: mol_type = other DNA
atggccttaccagtgaccgccttgctcctgccgctggccttgctgctccacgccgccaggccggacatccagatgacacagagccctagcagcctgtctgccagcgtgggagacagagtgaccatcacatgcaaggccagcgaccacatcaacaactggctggcctggtatcagcagaagcctggacaggcccctaagctgctgatctacggcgctaccacactggaaacaggcgtgcccagcagattttctggcagcggctctggcaccgactacaccctgacaatatccagcctccagcctgaggacttcgccacctactactgtcagcagagctggaacaccccttggacattcggccagggcaccaagctggaaatcaagagactcgaggacctgaagaacgtgttcccacctgaggtggccgtgttcgagcctagcgaggccgagatcagccacacccagaaagccaccctcgtgtgcctggctaccggcttctaccccgaccatgtggaactgtcttggtgggtcaacggcaaagaggtgcacagcggcgtgtctaccgacccccagccactgaaagaacagcccgccctgaacgacagccggtactgcctgagcagcagactgagagtgtccgccaccttctggcagaacccccggaaccacttcagatgccaggtgcagttctacggcctgagcgagaacgacgagtggacccaggacagagccaagcccgtgacccagatcgtgtctgccgaagcctggggcagagccgattgcggatcccagagcttcggcctgctggaccccaagctgtgctacctgctggatggcatcctgttcatctacggcgtgatcctgaccgccctgttcctgagagtgaagttcagcagaagcgccgacgcccctgcctaccagcagggacagaaccaactgtacaacgagctgaacctgggcagacgggaagagtacgacgtgctggacaagcggagaggcagggaccctgagatgggcggaaagccccagcggagaaagaacccccaggaaggactgtataacgaactccagaaagacaagatggccgaagcctacagcgagatcggcatgaagggcgagcggagaagaggcaagggccacgatggcctgtaccagggcctgagcaccgccaccaaggacacctatgacgccctgcacatgcaggccctgcctccaagaagggccaagcgatctggatctggagcaacaaacttctcactactcaaacaagcaggtgacgtggaggagaatcccgggcctactagtatggactggatttggcgcatccttttccttgtcggcgctgctaccggcgcgcattccttcgaacaagttcagcttcaacagcctggcgctgagctggtcaaacctggcgcttctgtgaagatgagctgcaaagccagcggctacgccttcagcagctactggatcaactggatgaagcagaaacccggccagggactcgaatggatcggccaaatctatcccggcgacggcgacaccaactacaacggcaagttcaagggcagagccacactgaccgccgatacctctagcagcacagcctacatgcagctgagcagcctgaccagcgaagatagcgccgtgtacttctgtgcccggtccatcacaacagtcgtgggctgcgctatggactattggggccagggaacaagcgtgaccgtgtctagtacgcgtgcctctacaaagggaccctccgtgtttcctctggctcccagcagcaagtctacaagcggaggaacagccgctctgggctgcctggtcaaggattactttcccgagcctgtgaccgtgtcctggaatagcggagcactgacaagcggcgtgcacacctttccagccgtgctgcaaagcagcggcctgtactctctgagcagcgtggtcacagtgcctagctctagcctgggcacccagacctacatctgcaatgtgaaccacaagcctagcaacaccaaggtggacaagagagtggaacccaagagctgtgaagtgaaaaccgactccaccgaccacgtgaagcccaaagagacagagaacaccaagcagcccagcaagagctgccacaagcccaaggccatcgtgcacaccgagaaagtgaacatgatgagcctgaccgtgctgggcctgcggatgctgttcgccaaaaccgtggccgtgaacttcctgctgaccgccaagctgttcttcctcggtaccagggttaagttttccagatccgcagacgcacccgcttaccaacaagggcagaaccaactctacaatgaacttaatttggggcggagggaagagtacgacgttctggacaaaaggaggggacgagatcccgagatgggcggaaagcctcgaaggaagaatccgcaagaggggctttataacgaactccagaaagataaaatggcagaagcctatagtgagattgggatgaagggagaaaggaggaggggtaaaggtcacgatgggttgtaccaaggattgagcacagccactaaagatacctatgatgcgctccacatgcaggccctgccgccaagacgcgccaagagaagcggatctggcgtgaagcagaccctgaatttcgacctgctgaagctggctggcgacgtggaatccaacccaggcccttctagaggccatatgaccgagtacaagcccacggtgcgcctcgccacccgcgacgacgtccccagggccgtacgcaccctcgccgccgcgttcgccgactaccccgccacgcgccacaccgtcgatccggaccgccacatcgagcgggtcaccgagctgcaagaactcttcctcacgcgcgtcgggctcgacatcggcaaggtgtgggtcgcggacgacggcgccgcggtggcggtctggaccacgccggagagcgtcgaagcgggggcggtgttcgccgagatcggcccgcgcatggccgagttgagcggttcccggctggccgcgcagcaacagatggaaggcctcctggcgccgcaccggcccaaggagcccgcgtggttcctggccaccgtcggcgtctcgcccgaccaccagggcaagggtctgggcagcgccgtcgtgctccccggagtggaggcggccgagcgcgccggggtgcccgccttcctggagacctccgcgccccgcaacctccccttctacgagcggctcggcttcaccgtcaccgccgacgtcgaggtgcccgaaggaccgcgcacctggtgcatgacccgcaagcccggtgcctga

SEQ ID NO: 32516 - DNA, 2997 bp, synthetic construct
  source 1..2997: mol_type = other DNA
atggccttaccagtgaccgccttgctcctgccgctggccttgctgctccacgccgccaggccggacatccagatgacacagagccctagcagcctgtctgccagcgtgggagacagagtgaccatcacatgcaaggccagcgaccacatcaacaactggctggcctggtatcagcagaagcctggacaggcccctaagctgctgatctacggcgctaccacactggaaacaggcgtgcccagcagattttctggcagcggctctggcaccgactacaccctgacaatatccagcctccagcctgaggacttcgccacctactactgtcagcagagctggaacaccccttggacattcggccagggcaccaagctggaaatcaagagactcgaggacctgaagaacgtgttcccacctgaggtggccgtgttcgagcctagcgaggccgagatcagccacacccagaaagccaccctcgtgtgcctggctaccggcttctaccccgaccatgtggaactgtcttggtgggtcaacggcaaagaggtgcacagcggcgtgtgtaccgacccccagccactgaaagaacagcccgccctgaacgacagccggtactgcctgagcagcagactgagagtgtccgccaccttctggcagaacccccggaaccacttcagatgccaggtgcagttctacggcctgagcgagaacgacgagtggacccaggacagagccaagcccgtgacccagatcgtgtctgccgaagcctggggcagagccgattgcggctttaccagcgagagctaccagcagggcgtgctgagcgccaccatcctgtacgagatcctgctgggcaaggccaccctgtacgccgtgctggtgtctgccctggtgctgatggctatggtcaagcggaaggacagccggggaggatcccggctgaagatccaagtgcggaaggccgccatcaccagctacgagaaatccgacggcgtgtacaccggcctgagcaccagaaatcaagagacatacgagacactgaagcacgaaaagcctccacaaagggccaagcgatctggatctggagcaacaaacttctcactactcaaacaagcaggtgacgtggaggagaatcccgggcctactagtatggactggatttggcgcatccttttccttgtcggcgctgctaccggcgcgcattccttcgaacaagttcagcttcaacagcctggcgctgagctggtcaaacctggcgcttctgtgaagatgagctgcaaagccagcggctacgccttcagcagctactggatcaactggatgaagcagaaacccggccagggactcgaatggatcggccaaatctatcccggcgacggcgacaccaactacaacggcaagttcaagggcagagccacactgaccgccgatacctctagcagcacagcctacatgcagctgagcagcctgaccagcgaagatagcgccgtgtacttctgtgcccggtccatcacaacagtcgtgggctgcgctatggactattggggccagggaacaagcgtgaccgtgtctagtacgcgtatccagaaccctgatcctgccgtgtaccagctgcgggatagcaagagcagcgacaagagcgtgtgtctgttcaccgacttcgacagccagaccaacgtgtcccagagcaaggactccgacgtgtacatcaccgataagaccgtgctggacatgcggagcatggacttcaagagcaactccgccgtggcctggtccaacaagtccgatttcgcctgcgccaacgccttcaacaacagcattatccccgaggacacattcttcccaagccccgagagcagctgcggtacccagagttttgggttgttggaccctaaattgtgctatctgttggacggaatcctgttcatttacggagtgatcctgaccgcattgttcctgcgggttaagttttccagatccgcagacgcacccgcttaccaacaagggcagaaccaactctacaatgaacttaatttggggcggagggaagagtacgacgttctggacaaaaggaggggacgagatcccgagatgggcggaaagcctcagcgaaggaagaatccgcaagaggggctttataacgaactccagaaagataaaatggcagaagcctatagtgagattgggatgaagggagaaaggaggaggggtaaaggtcacgatgggttgtaccaaggattgagcacagccactaaagatacctatgatgcgctccacatgcaggccctgccgccaagacgcgccaagagaagcggatctggcgtgaagcagaccctgaatttcgacctgctgaagctggctggcgacgtggaatccaacccaggcccttctagaggccatatgaccgagtacaagcccacggtgcgcctcgccacccgcgacgacgtccccagggccgtacgcaccctcgccgccgcgttcgccgactaccccgccacgcgccacaccgtcgatccggaccgccacatcgagcgggtcaccgagctgcaagaactcttcctcacgcgcgtcgggctcgacatcggcaaggtgtgggtcgcggacgacggcgccgcggtggcggtctggaccacgccggagagcgtcgaagcgggggcggtgttcgccgagatcggcccgcgcatggccgagttgagcggttcccggctggccgcgcagcaacagatggaaggcctcctggcgccgcaccggcccaaggagcccgcgtggttcctggccaccgtcggcgtctcgcccgaccaccagggcaagggtctgggcagcgccgtcgtgctccccggagtggaggcggccgagcgcgccggggtgcccgccttcctggagacctccgcgccccgcaacctccccttctacgagcggctcggcttcaccgtcaccgccgacgtcgaggtgcccgaaggaccgcgcacctggtgcatgacccgcaagcccggtgcctga

SEQ ID NO: 32517 - DNA, 2982 bp, synthetic construct
  source 1..2982: mol_type = other DNA
atggccttaccagtgaccgccttgctcctgccgctggccttgctgctccacgccgccaggccggacatccagatgacacagagccctagcagcctgtctgccagcgtgggagacagagtgaccatcacatgcaaggccagcgaccacatcaacaactggctggcctggtatcagcagaagcctggacaggcccctaagctgctgatctacggcgctaccacactggaaacaggcgtgcccagcagattttctggcagcggctctggcaccgactacaccctgacaatatccagcctccagcctgaggacttcgccacctactactgtcagcagagctggaacaccccttggacattcggccagggcaccaagctggaaatcaagagactcgagggacagcctaaggccaatcctaccgtgacactgttccctccaagcagcgaagaactccaggccaacaaggccacacttgtgtgcctgatctccgacttctaccctggggctgtgacagtggcttggaaggccgatggatctcctgtgaaagccggcgtggaaaccaccaagccatccaagcagagcaacaacaaatacgccgccagctcctacctgagcctgacacctgagcagtggaagtcccacagatcctacagctgccaagtgacccacgaaggcagcaccgtggaaaagacagtggcccctacagagtgcagccccatcaagaccgatgtgattacaatggaccccaaggacaactgctccaaggacgccaacgataccctgctgctccagctgaccaacaccagcgcctactacatgtacttgttgctgctgctgaagtccgtggtgtacttcgccatcatcacatgctgcctgctgcggagaaccgccttctgctgcaacggcgagaagtctggatcccggctgaagatccaagtgcggaaggccgccatcaccagctacgagaaatccgacggcgtgtacaccggcctgagcaccagaaatcaagagacatacgagacactgaagcacgaaaagcctccacaaagggccaagcgatctggatctggagcaacaaacttctcactactcaaacaagcaggtgacgtggaggagaatcccgggcctactagtatggactggatttggcgcatccttttccttgtcggcgctgctaccggcgcgcattccttcgaacaagttcagcttcaacagcctggcgctgagctggtcaaacctggcgcttctgtgaagatgagctgcaaagccagcggctacgccttcagcagctactggatcaactggatgaagcagaaacccggccagggactcgaatggatcggccaaatctatcccggcgacggcgacaccaactacaacggcaagttcaagggcagagccacactgaccgccgatacctctagcagcacagcctacatgcagctgagcagcctgaccagcgaagatagcgccgtgtacttctgtgcccggtccatcacaacagtcgtgggctgcgctatggactattggggccagggaacaagcgtgaccgtgtctagtacgcgtatccagaaccctgatcctgccgtgtaccagctgcgggatagcaagagcagcgacaagagcgtgtgtctgttcaccgacttcgacagccagaccaacgtgtcccagagcaaggactccgacgtgtacatcaccgataagaccgtgctggacatgcggagcatggacttcaagagcaactccgccgtggcctggtccaacaagtccgatttcgcctgcgccaacgccttcaacaacagcattatccccgaggacacattcttcccaagccccgagagcagctgcggtacccagagttttgggttgttggaccctaaattgtgctatctgttggacggaatcctgttcatttacggagtgatcctgaccgcattgttcctgcgggttaagttttccagatccgcagacgcacccgcttaccaacaagggcagaaccaactctacaatgaacttaatttggggcggagggaagagtacgacgttctggacaaaaggaggggacgagatcccgagatgggcggaaagcctcagcgaaggaagaatccgcaagaggggctttataacgaactccagaaagataaaatggcagaagcctatagtgagattgggatgaagggagaaaggaggaggggtaaaggtcacgatgggttgtaccaaggattgagcacagccactaaagatacctatgatgcgctccacatgcaggccctgccgccaagacgcgccaagagaagcggatctggcgtgaagcagaccctgaatttcgacctgctgaagctggctggcgacgtggaatccaacccaggcccttctagaggccatatgaccgagtacaagcccacggtgcgcctcgccacccgcgacgacgtccccagggccgtacgcaccctcgccgccgcgttcgccgactaccccgccacgcgccacaccgtcgatccggaccgccacatcgagcgggtcaccgagctgcaagaactcttcctcacgcgcgtcgggctcgacatcggcaaggtgtgggtcgcggacgacggcgccgcggtggcggtctggaccacgccggagagcgtcgaagcgggggcggtgttcgccgagatcggcccgcgcatggccgagttgagcggttcccggctggccgcgcagcaacagatggaaggcctcctggcgccgcaccggcccaaggagcccgcgtggttcctggccaccgtcggcgtctcgcccgaccaccagggcaagggtctgggcagcgccgtcgtgctccccggagtggaggcggccgagcgcgccggggtgcccgccttcctggagacctccgcgccccgcaacctccccttctacgagcggctcggcttcaccgtcaccgccgacgtcgaggtgcccgaaggaccgcgcacctggtgcatgacccgcaagcccggtgcctga

SEQ ID NO: 32518 - DNA, 3120 bp, synthetic construct
  source 1..3120: mol_type = other DNA
atggccttaccagtgaccgccttgctcctgccgctggccttgctgctccacgccgccaggccggacatccagatgacacagagccctagcagcctgtctgccagcgtgggagacagagtgaccatcacatgcaaggccagcgaccacatcaacaactggctggcctggtatcagcagaagcctggacaggcccctaagctgctgatctacggcgctaccacactggaaacaggcgtgcccagcagattttctggcagcggctctggcaccgactacaccctgacaatatccagcctccagcctgaggacttcgccacctactactgtcagcagagctggaacaccccttggacattcggccagggcaccaagctggaaatcaagagactcgagggacagcctaaggccaatcctaccgtgacactgttccctccaagcagcgaagaactccaggccaacaaggccacacttgtgtgcctgatctccgacttctaccctggggctgtgacagtggcttggaaggccgatggatctcctgtgaaagccggcgtggaaaccaccaagccatccaagcagagcaacaacaaatacgccgccagctcctacctgagcctgacacctgagcagtggaagtcccacagatcctacagctgccaagtgacccacgaaggcagcaccgtggaaaagacagtggcccctacagagtgcagccccatcaagaccgatgtgattacaatggaccccaaggacaactgctccaaggacgccaacgataccctgctgctccagctgaccaacaccagcgcctactacatgtacttgttgctgctgctgaagtccgtggtgtacttcgccatcatcacatgctgcctgctgcggagaaccgccttctgctgcaacggcgagaagtctggatcccggctgaagatccaagtgcggaaggccgccatcaccagctacgagaaatccgacggcgtgtacaccggcctgagcaccagaaatcaagagacatacgagacactgaagcacgaaaagcctccacaaagggccaagcgatctggatctggagcaacaaacttctcactactcaaacaagcaggtgacgtggaggagaatcccgggcctactagtatggactggatttggcgcatccttttccttgtcggcgctgctaccggcgcgcattccttcgaacaagttcagcttcaacagcctggcgctgagctggtcaaacctggcgcttctgtgaagatgagctgcaaagccagcggctacgccttcagcagctactggatcaactggatgaagcagaaacccggccagggactcgaatggatcggccaaatctatcccggcgacggcgacaccaactacaacggcaagttcaagggcagagccacactgaccgccgatacctctagcagcacagcctacatgcagctgagcagcctgaccagcgaagatagcgccgtgtacttctgtgcccggtccatcacaacagtcgtgggctgcgctatggactattggggccagggaacaagcgtgaccgtgtctagtacgcgtgcctctacaaagggaccctccgtgtttcctctggctcccagcagcaagtctacaagcggaggaacagccgctctgggctgcctggtcaaggattactttcccgagcctgtgaccgtgtcctggaatagcggagcactgacaagcggcgtgcacacctttccagccgtgctgcaaagcagcggcctgtactctctgagcagcgtggtcacagtgcctagctctagcctgggcacccagacctacatctgcaatgtgaaccacaagcctagcaacaccaaggtggacaagagagtggaacccaagagctgtgaagtgaaaaccgactccaccgaccacgtgaagcccaaagagacagagaacaccaagcagcccagcaagagctgccacaagcccaaggccatcgtgcacaccgagaaagtgaacatgatgagcctgaccgtgctgggcctgcggatgctgttcgccaaaaccgtggccgtgaacttcctgctgaccgccaagctgttcttcctcggtaccagggttaagttttccagatccgcagacgcacccgcttaccaacaagggcagaaccaactctacaatgaacttaatttggggcggagggaagagtacgacgttctggacaaaaggaggggacgagatcccgagatgggcggaaagcctcgaaggaagaatccgcaagaggggctttataacgaactccagaaagataaaatggcagaagcctatagtgagattgggatgaagggagaaaggaggaggggtaaaggtcacgatgggttgtaccaaggattgagcacagccactaaagatacctatgatgcgctccacatgcaggccctgccgccaagacgcgccaagagaagcggatctggcgtgaagcagaccctgaatttcgacctgctgaagctggctggcgacgtggaatccaacccaggcccttctagaggccatatgaccgagtacaagcccacggtgcgcctcgccacccgcgacgacgtccccagggccgtacgcaccctcgccgccgcgttcgccgactaccccgccacgcgccacaccgtcgatccggaccgccacatcgagcgggtcaccgagctgcaagaactcttcctcacgcgcgtcgggctcgacatcggcaaggtgtgggtcgcggacgacggcgccgcggtggcggtctggaccacgccggagagcgtcgaagcgggggcggtgttcgccgagatcggcccgcgcatggccgagttgagcggttcccggctggccgcgcagcaacagatggaaggcctcctggcgccgcaccggcccaaggagcccgcgtggttcctggccaccgtcggcgtctcgcccgaccaccagggcaagggtctgggcagcgccgtcgtgctccccggagtggaggcggccgagcgcgccggggtgcccgccttcctggagacctccgcgccccgcaacctccccttctacgagcggctcggcttcaccgtcaccgccgacgtcgaggtgcccgaaggaccgcgcacctggtgcatgacccgcaagcccggtgcctga

SEQ ID NO: 32519 - DNA, 3294 bp, synthetic construct
  source 1..3294: mol_type = other DNA
atggccttaccagtgaccgccttgctcctgccgctggccttgctgctccacgccgccaggccggacatccagatgacacagagccctagcagcctgtctgccagcgtgggagacagagtgaccatcacatgcaaggccagcgaccacatcaacaactggctggcctggtatcagcagaagcctggacaggcccctaagctgctgatctacggcgctaccacactggaaacaggcgtgcccagcagattttctggcagcggctctggcaccgactacaccctgacaatatccagcctccagcctgaggacttcgccacctactactgtcagcagagctggaacaccccttggacattcggccagggcaccaagctggaaatcaagagactcgaggacctgaagaacgtgttcccacctgaggtggccgtgttcgagcctagcgaggccgagatcagccacacccagaaagccaccctcgtgtgcctggctaccggcttctaccccgaccatgtggaactgtcttggtgggtcaacggcaaagaggtgcacagcggcgtgtctaccgacccccagccactgaaagaacagcccgccctgaacgacagccggtactgcctgagcagcagactgagagtgtccgccaccttctggcagaacccccggaaccacttcagatgccaggtgcagttctacggcctgagcgagaacgacgagtggacccaggacagagccaagcccgtgacccagatcgtgtctgccgaagcctggggcagagccgattgcggatcccagagcttcggcctgctggaccccaagctgtgctacctgctggatggcatcctgttcatctacggcgtgatcctgaccgccctgttcctgagagtgaagttcagcagaagcgccgacgcccctgcctaccagcagggacagaaccaactgtacaacgagctgaacctgggcagacgggaagagtacgacgtgctggacaagcggagaggcagggaccctgagatgggcggaaagccccagcggagaaagaacccccaggaaggactgtataacgaactccagaaagacaagatggccgaagcctacagcgagatcggcatgaagggcgagcggagaagaggcaagggccacgatggcctgtaccagggcctgagcaccgccaccaaggacacctatgacgccctgcacatgcaggccctgcctccaagaagggccaagcgatctggatctggagcaacaaacttctcactactcaaacaagcaggtgacgtggaggagaatcccgggcctactagtatggactggatttggcgcatccttttccttgtcggcgctgctaccggcgcgcattccttcgaacaagttcagcttcaacagcctggcgctgagctggtcaaacctggcgcttctgtgaagatgagctgcaaagccagcggctacgccttcagcagctactggatcaactggatgaagcagaaacccggccagggactcgaatggatcggccaaatctatcccggcgacggcgacaccaactacaacggcaagttcaagggcagagccacactgaccgccgatacctctagcagcacagcctacatgcagctgagcagcctgaccagcgaagatagcgccgtgtacttctgtgcccggtccatcacaacagtcgtgggctgcgctatggactattggggccagggaacaagcgtgaccgtgtctagtacgcgtatccagaaccctgatcctgccgtgtaccagctgcgggatagcaagagcagcgacaagagcgtgtgtctgttcaccgacttcgacagccagaccaacgtgtcccagagcaaggactccgacgtgtacatcaccgataagtgcgtgctggacatgcggagcatggacttcaagagcaactccgccgtggcctggtccaacaagtccgatttcgcctgcgccaacgccttcaacaacagcattatccccgaggacacattcttcccaagccccgagagcagctgcgacgtgaagctggtggaaaagagcttcgagacagacaccaacctgaacttccagaacctgagcgtgatcggcttcagaatcctgctgctgaaagtggccggctttaacctgctgatgaccctgcggctgtggtccagcggtacccagagttttgggttgttggaccctaaattgtgctatctgttggacggaatcctgttcatttacggagtgatcctgaccgcattgttcctgcgggttaagttttccagatccgcagacgcacccgcttaccaacaagggcagaaccaactctacaatgaacttaatttggggcggagggaagagtacgacgttctggacaaaaggaggggacgagatcccgagatgggcggaaagcctcagcgaaggaagaatccgcaagaggggctttataacgaactccagaaagataaaatggcagaagcctatagtgagattgggatgaagggagaaaggaggaggggtaaaggtcacgatgggttgtaccaaggattgagcacagccactaaagatacctatgatgcgctccacatgcaggccctgccgccaagacgcgccaagagaagcggatctggcgtgaagcagaccctgaatttcgacctgctgaagctggctggcgacgtggaatccaacccaggcccttctagaggccatatgaccgagtacaagcccacggtgcgcctcgccacccgcgacgacgtccccagggccgtacgcaccctcgccgccgcgttcgccgactaccccgccacgcgccacaccgtcgatccggaccgccacatcgagcgggtcaccgagctgcaagaactcttcctcacgcgcgtcgggctcgacatcggcaaggtgtgggtcgcggacgacggcgccgcggtggcggtctggaccacgccggagagcgtcgaagcgggggcggtgttcgccgagatcggcccgcgcatggccgagttgagcggttcccggctggccgcgcagcaacagatggaaggcctcctggcgccgcaccggcccaaggagcccgcgtggttcctggccaccgtcggcgtctcgcccgaccaccagggcaagggtctgggcagcgccgtcgtgctccccggagtggaggcggccgagcgcgccggggtgcccgccttcctggagacctccgcgccccgcaacctccccttctacgagcggctcggcttcaccgtcaccgccgacgtcgaggtgcccgaaggaccgcgcacctggtgcatgacccgcaagcccggtgcctga

SEQ ID NO: 32520 - DNA, 3294 bp, synthetic construct
  source 1..3294: mol_type = other DNA
atggccttaccagtgaccgccttgctcctgccgctggccttgctgctccacgccgccaggccggacatccagatgacacagagccctagcagcctgtctgccagcgtgggagacagagtgaccatcacatgcaaggccagcgaccacatcaacaactggctggcctggtatcagcagaagcctggacaggcccctaagctgctgatctacggcgctaccacactggaaacaggcgtgcccagcagattttctggcagcggctctggcaccgactacaccctgacaatatccagcctccagcctgaggacttcgccacctactactgtcagcagagctggaacaccccttggacattcggccagggcaccaagctggaaatcaagagactcgaggacctgaagaacgtgttcccacctgaggtggccgtgttcgagcctagcgaggccgagatcagccacacccagaaagccaccctcgtgtgcctggctaccggcttctaccccgaccatgtggaactgtcttggtgggtcaacggcaaagaggtgcacagcggcgtgtctaccgacccccagccactgaaagaacagcccgccctgaacgacagccggtactgcctgagcagcagactgagagtgtccgccaccttctggcagaacccccggaaccacttcagatgccaggtgcagttctacggcctgagcgagaacgacgagtggacccaggacagagccaagcccgtgacccagatcgtgtctgccgaagcctggggcagagccgattgcggatcccagagcttcggcctgctggaccccaagctgtgctacctgctggatggcatcctgttcatctacggcgtgatcctgaccgccctgttcctgagagtgaagttcagcagaagcgccgacgcccctgcctaccagcagggacagaaccaactgtacaacgagctgaacctgggcagacgggaagagtacgacgtgctggacaagcggagaggcagggaccctgagatgggcggaaagccccagcggagaaagaacccccaggaaggactgtataacgaactccagaaagacaagatggccgaagcctacagcgagatcggcatgaagggcgagcggagaagaggcaagggccacgatggcctgtaccagggcctgagcaccgccaccaaggacacctatgacgccctgcacatgcaggccctgcctccaagaagggccaagcgatctggatctggagcaacaaacttctcactactcaaacaagcaggtgacgtggaggagaatcccgggcctactagtatggactggatttggcgcatccttttccttgtcggcgctgctaccggcgcgcattccttcgaacaagttcagcttcaacagcctggcgctgagctggtcaaacctggcgcttctgtgaagatgagctgcaaagccagcggctacgccttcagcagctactggatcaactggatgaagcagaaacccggccagggactcgaatggatcggccaaatctatcccggcgacggcgacaccaactacaacggcaagttcaagggcagagccacactgaccgccgatacctctagcagcacagcctacatgcagctgagcagcctgaccagcgaagatagcgccgtgtacttctgtgcccggtccatcacaacagtcgtgggctgcgctatggactattggggccagggaacaagcgtgaccgtgtctagtacgcgtatccagaaccctgatcctgccgtgtaccagctgcgggatagcaagagcagcgacaagagcgtgtgtctgttcaccgacttcgacagccagaccaacgtgtcccagagcaaggactccgacgtgtacatcaccgataagtgcgtgctggacatgcggagcatggacttcaagagcaactccgccgtggcctggtccaacaagtccgatttcgcctgcgccaacgccttcaacaacagcattatccccgaggacacattcttcccaagcagcgacgtgccctgcgacgtgaagctggtggaaaagagcttcgagacagacaccaacctgaacttccagaacctgagcgtgatcggcttcagaatcctgctgctgaaagtggccggctttaacctgctgatgaccctgcggctgtggtccagcggtacccagagttttgggttgttggaccctaaattgtgctatctgttggacggaatcctgttcatttacggagtgatcctgaccgcattgttcctgcgggttaagttttccagatccgcagacgcacccgcttaccaacaagggcagaaccaactctacaatgaacttaatttggggcggagggaagagtacgacgttctggacaaaaggaggggacgagatcccgagatgggcggaaagcctcagcgaaggaagaatccgcaagaggggctttataacgaactccagaaagataaaatggcagaagcctatagtgagattgggatgaagggagaaaggaggaggggtaaaggtcacgatgggttgtaccaaggattgagcacagccactaaagatacctatgatgcgctccacatgcaggccctgccgccaagacgcgccaagagaagcggatctggcgtgaagcagaccctgaatttcgacctgctgaagctggctggcgacgtggaatccaacccaggcccttctagaggccatatgaccgagtacaagcccacggtgcgcctcgccacccgcgacgacgtccccagggccgtacgcaccctcgccgccgcgttcgccgactaccccgccacgcgccacaccgtcgatccggaccgccacatcgagcgggtcaccgagctgcaagaactcttcctcacgcgcgtcgggctcgacatcggcaaggtgtgggtcgcggacgacggcgccgcggtggcggtctggaccacgccggagagcgtcgaagcgggggcggtgttcgccgagatcggcccgcgcatggccgagttgagcggttcccggctggccgcgcagcaacagatggaaggcctcctggcgccgcaccggcccaaggagcccgcgtggttcctggccaccgtcggcgtctcgcccgaccaccagggcaagggtctgggcagcgccgtcgtgctccccggagtggaggcggccgagcgcgccggggtgcccgccttcctggagacctccgcgccccgcaacctccccttctacgagcggctcggcttcaccgtcaccgccgacgtcgaggtgcccgaaggaccgcgcacctggtgcatgacccgcaagcccggtgcctga

SEQ ID NO: 32521 - DNA, 3294 bp, synthetic construct; identical to SEQ ID NO: 32520
  source 1..3294: mol_type = other DNA

SEQ ID NO: 32522 - DNA, 3363 bp, synthetic construct
  source 1..3363: mol_type = other DNA
atggccttaccagtgaccgccttgctcctgccgctggccttgctgctccacgccgccaggccggacatccagatgacacagagccctagcagcctgtctgccagcgtgggagacagagtgaccatcacatgcaaggccagcgaccacatcaacaactggctggcctggtatcagcagaagcctggacaggcccctaagctgctgatctacggcgctaccacactggaaacaggcgtgcccagcagattttctggcagcggctctggcaccgactacaccctgacaatatccagcctccagcctgaggacttcgccacctactactgtcagcagagctggaacaccccttggacattcggccagggcaccaagctggaaatcaagagactcgaggacctgaagaacgtgttcccacctgaggtggccgtgttcgagcctagcgaggccgagatcagccacacccagaaagccaccctcgtgtgcctggctaccggcttctaccccgaccatgtggaactgtcttggtgggtcaacggcaaagaggtgcacagcggcgtgtctaccgacccccagccactgaaagaacagcccgccctgaacgacagccggtactgcctgagcagcagactgagagtgtccgccaccttctggcagaacccccggaaccacttcagatgccaggtgcagttctacggcctgagcgagaacgacgagtggacccaggacagagccaagcccgtgacccagatcgtgtctgccgaagcctggggcagagccgattgcggatcccagagcttcggcctgctggaccccaagctgtgctacctgctggatggcatcctgttcatctacggcgtgatcctgaccgccctgttcctgagagtgaagttcagcagaagcgccgacgcccctgcctaccagcagggacagaaccaactgtacaacgagctgaacctgggcagacgggaagagtacgacgtgctggacaagcggagaggcagggaccctgagatgggcggaaagccccagcggagaaagaacccccaggaaggactgtataacgaactccagaaagacaagatggccgaagcctacagcgagatcggcatgaagggcgagcggagaagaggcaagggccacgatggcctgtaccagggcctgagcaccgccaccaaggacacctatgacgccctgcacatgcaggccctgcctccaagaagggccaagcgatctggatctggagcaacaaacttctcactactcaaacaagcaggtgacgtggaggagaatcccgggcctactagtatggactggatttggcgcatccttttccttgtcggcgctgctaccggcgcgcattccttcgaacaagttcagcttcaacagcctggcgctgagctggtcaaacctggcgcttctgtgaagatgagctgcaaagccagcggctacgccttcagcagctactggatcaactggatgaagcagaaacccggccagggactcgaatggatcggccaaatctatcccggcgacggcgacaccaactacaacggcaagttcaagggcagagccacactgaccgccgatacctctagcagcacagcctacatgcagctgagcagcctgaccagcgaagatagcgccgtgtacttctgtgcccggtccatcacaacagtcgtgggctgcgctatggactattggggccagggaacaagcgtgaccgtgtctagtacgcgtgcctctacaaagggaccctccgtgtttcctctggctcccagcagcaagtctacaagcggaggaacagccgctctgggctgcctggtcaaggattactttcccgagcctgtgaccgtgtcctggaatagcggagcactgacaagcggcgtgcacacctttccagccgtgctgcaaagcagcggcctgtactctctgagcagcgtggtcacagtgcctagctctagcctgggcacccagacctacatctgcaatgtgaaccacaagcctagcaacaccaaggtggacaagagagtggaacccaagagctgtatccccgaggacacattcttcccaagccccgagagcagctgcgacgtgaagctggtggaaaagagcttcgagacagacaccaacctgaacttccagaacctgagcgtgatcggcttcagaatcctgctgctgaaagtggccggctttaacctgctgatgaccctgcggctgtggtccagcggtacccagagttttgggttgttggaccctaaattgtgctatctgttggacggaatcctgttcatttacggagtgatcctgaccgcattgttcctgcgggttaagttttccagatccgcagacgcacccgcttaccaacaagggcagaaccaactctacaatgaacttaatttggggcggagggaagagtacgacgttctggacaaaaggaggggacgagatcccgagatgggcggaaagcctcagcgaaggaagaatccgcaagaggggctttataacgaactccagaaagataaaatggcagaagcctatagtgagattgggatgaagggagaaaggaggaggggtaaaggtcacgatgggttgtaccaaggattgagcacagccactaaagatacctatgatgcgctccacatgcaggccctgccgccaagacgcgccaagagaagcggatctggcgtgaagcagaccctgaatttcgacctgctgaagctggctggcgacgtggaatccaacccaggcccttctagaggccatatgaccgagtacaagcccacggtgcgcctcgccacccgcgacgacgtccccagggccgtacgcaccctcgccgccgcgttcgccgactaccccgccacgcgccacaccgtcgatccggaccgccacatcgagcgggtcaccgagctgcaagaactcttcctcacgcgcgtcgggctcgacatcggcaaggtgtgggtcgcggacgacggcgccgcggtggcggtctggaccacgccggagagcgtcgaagcgggggcggtgttcgccgagatcggcccgcgcatggccgagttgagcggttcccggctggccgcgcagcaacagatggaaggcctcctggcgccgcaccggcccaaggagcccgcgtggttcctggccaccgtcggcgtctcgcccgaccaccagggcaagggtctgggcagcgccgtcgtgctccccggagtggaggcggccgagcgcgccggggtgcccgccttcctggagacctccgcgccccgcaacctccccttctacgagcggctcggcttcaccgtcaccgccgacgtcgaggtgcccgaaggaccgcgcacctggtgcatgacccgcaagcccggtgcctga

SEQ ID NO: 32523 - DNA, 3363 bp, synthetic construct; identical to SEQ ID NO: 32522
  source 1..3363: mol_type = other DNA

SEQ ID NO: 32524 - DNA, 3294 bp, synthetic construct; identical to SEQ ID NO: 32519
  source 1..3294: mol_type = other DNA

SEQ ID NO: 32525 - DNA, 3294 bp, synthetic construct; identical to SEQ ID NO: 32519
  source 1..3294: mol_type = other DNA

SEQ ID NO: 32526 - DNA, 2919 bp, synthetic construct
  source 1..2919: mol_type = other DNA
atggccttaccagtgaccgccttgctcctgccgctggccttgctgctccacgccgccaggccggacatccagatgacacagagccctagcagcctgtctgccagcgtgggagacagagtgaccatcacatgcaaggccagcgaccacatcaacaactggctggcctggtatcagcagaagcctggacaggcccctaagctgctgatctacggcgctaccacactggaaacaggcgtgcccagcagattttctggcagcggctctggcaccgactacaccctgacaatatccagcctccagcctgaggacttcgccacctactactgtcagcagagctggaacaccccttggacattcggccagggcaccaagctggaaatcaagagactcgagggacagcctaaggccaatcctaccgtgacactgttccctccaagcagcgaagaactccaggccaacaaggccacacttgtgtgcctgatctccgacttctaccctggggctgtgacagtggcttggaaggccgatggatctcctgtgaaagccggcgtggaaaccaccaagccatccaagcagagcaacaacaaatacgccgccagctcctacctgagcctgacacctgagcagtggaagtcccacagatcctacagctgccaagtgacccacgaaggcagcaccgtggaaaagacagtggcccctacagagtgcagcggcagagccgattgcggctttaccagcgagagctaccagcagggcgtgctgagcgccaccatcctgtacgagatcctgctgggcaaggccaccctgtacgccgtgctggtgtctgccctggtgctgatggctatggtcaagcggaaggacagccggggaagggccaagcgatctggatctggagcaacaaacttctcactactcaaacaagcaggtgacgtggaggagaatcccgggcctactagtatggactggatttggcgcatccttttccttgtcggcgctgctaccggcgcgcattccttcgaacaagttcagcttcaacagcctggcgctgagctggtcaaacctggcgcttctgtgaagatgagctgcaaagccagcggctacgccttcagcagctactggatcaactggatgaagcagaaacccggccagggactcgaatggatcggccaaatctatcccggcgacggcgacaccaactacaacggcaagttcaagggcagagccacactgaccgccgatacctctagcagcacagcctacatgcagctgagcagcctgaccagcgaagatagcgccgtgtacttctgtgcccggtccatcacaacagtcgtgggctgcgctatggactattggggccagggaacaagcgtgaccgtgtctagtacgcgtgcctctacaaagggaccctccgtgtttcctctggctcccagcagcaagtctacaagcggaggaacagccgctctgggctgcctggtcaaggattactttcccgagcctgtgaccgtgtcctggaatagcggagcactgacaagcggcgtgcacacctttccagccgtgctgcaaagcagcggcctgtactctctgagcagcgtggtcacagtgcctagctctagcctgggcacccagacctacatctgcaatgtgaaccacaagcctagcaacaccaaggtggacaagagagtggaacccaagagctgtatccccgaggacacattcttcccaagccccgagagcagctgcgacgtgaagctggtggaaaagagcttcgagacagacaccaacctgaacttccagaacctgagcgtgatcggcttcagaatcctgctgctgaaagtggccggctttaacctgctgatgaccctgcggctgtggtccagctctagacgggttaagttttccagatccgcagacgcacccgcttaccaacaagggcagaaccaactctacaatgaacttaatttggggcggagggaagagtacgacgttctggacaaaaggaggggacgagatcccgagatgggcggaaagcctcagcgaaggaagaatccgcaagaggggctttataacgaactccagaaagataaaatggcagaagcctatagtgagattgggatgaagggagaaaggaggaggggtaaaggtcacgatgggttgtaccaaggattgagcacagccactaaagatacctatgatgcgctccacatgcaggccctgccgccaagacgcgccaagagaagcggatctggcgtgaagcagaccctgaatttcgacctgctgaagctggctggcgacgtggaatccaacccaggccctggccatatgaccgagtacaagcccacggtgcgcctcgccacccgcgacgacgtccccagggccgtacgcaccctcgccgccgcgttcgccgactaccccgccacgcgccacaccgtcgatccggaccgccacatcgagcgggtcaccgagctgcaagaactcttcctcacgcgcgtcgggctcgacatcggcaaggtgtgggtcgcggacgacggcgccgcggtggcggtctggaccacgccggagagcgtcgaagcgggggcggtgttcgccgagatcggcccgcgcatggccgagttgagcggttcccggctggccgcgcagcaacagatggaaggcctcctggcgccgcaccggcccaaggagcccgcgtggttcctggccaccgtcggcgtctcgcccgaccaccagggcaagggtctgggcagcgccgtcgtgctccccggagtggaggcggccgagcgcgccggggtgcccgccttcctggagacctccgcgccccgcaacctccccttctacgagcggctcggcttcaccgtcaccgccgacgtcgaggtgcccgaaggaccgcgcacctggtgcatgacccgcaagcccggtgcctga

SEQ ID NO: 32527 - DNA, 3381 bp, synthetic construct
  source 1..3381: mol_type = other DNA
atggccttaccagtgaccgccttgctcctgccgctggccttgctgctccacgccgccaggccggacatccagatgacacagagccctagcagcctgtctgccagcgtgggagacagagtgaccatcacatgcaaggccagcgaccacatcaacaactggctggcctggtatcagcagaagcctggacaggcccctaagctgctgatctacggcgctaccacactggaaacaggcgtgcccagcagattttctggcagcggctctggcaccgactacaccctgacaatatccagcctccagcctgaggacttcgccacctactactgtcagcagagctggaacaccccttggacattcggccagggcaccaagctggaaatcaagagactcgagggacagcctaaggccaatcctaccgtgacactgttccctccaagcagcgaagaactccaggccaacaaggccacacttgtgtgcctgatctccgacttctaccctggggctgtgacagtggcttggaaggccgatggatctcctgtgaaagccggcgtggaaaccaccaagccatccaagcagagcaacaacaaatacgccgccagctcctacctgagcctgacacctgagcagtggaagtcccacagatcctacagctgccaagtgacccacgaaggcagcaccgtggaaaagacagtggcccctacagagtgcagccccatcaagaccgatgtgattacaatggaccccaaggacaactgctccaaggacgccaacgataccctgctgctccagctgaccaacaccagcgcctactacatgtacttgttgctgctgctgaagtccgtggtgtacttcgccatcatcacatgctgcctgctgcggagaaccgccttctgctgcaacggcgagaagtctagggccaagcgatctggatctggagcaacaaacttctcactactcaaacaagcaggtgacgtggaggagaatcccgggcctactagtagagtgaagttcagcagaagcgccgacgcccctgcctaccagcagggacagaaccaactgtacaacgagctgaacctgggcagacgggaagagtacgacgtgctggacaagcggagaggcagggaccctgagatgggcggaaagccccagcggagaaagaacccccaggaaggactgtataacgaactccagaaagacaagatggccgaagcctacagcgagatcggcatgaagggcgagcggagaagaggcaagggccacgatggcctgtaccagggcctgagcaccgccaccaaggacacctatgacgccctgcacatgcaggccctgcctccaagaagggccaagcgatctggatctggagcaacaaacttctcactactcaaacaagcaggtgacgtggaggagaatcccgggcctatggactggatttggcgcatccttttccttgtcggcgctgctaccggcgcgcattccttcgaacaagttcagcttcaacagcctggcgctgagctggtcaaacctggcgcttctgtgaagatgagctgcaaagccagcggctacgccttcagcagctactggatcaactggatgaagcagaaacccggccagggactcgaatggatcggccaaatctatcccggcgacggcgacaccaactacaacggcaagttcaagggcagagccacactgaccgccgatacctctagcagcacagcctacatgcagctgagcagcctgaccagcgaagatagcgccgtgtacttctgtgcccggtccatcacaacagtcgtgggctgcgctatggactattggggccagggaacaagcgtgaccgtgtctagtacgcgtgcctctacaaagggaccctccgtgtttcctctggctcccagcagcaagtctacaagcggaggaacagccgctctgggctgcctggtcaaggattactttcccgagcctgtgaccgtgtcctggaatagcggagcactgacaagcggcgtgcacacctttccagccgtgctgcaaagcagcggcctgtactctctgagcagcgtggtcacagtgcctagctctagcctgggcacccagacctacatctgcaatgtgaaccacaagcctagcaacaccaaggtggacaagagagtggaacccaagagctgtatccccgaggacacattcttcccaagccccgagagcagctgcgacgtgaagctggtggaaaagagcttcgagacagacaccaacctgaacttccagaacctgagcgtgatcggcttcagaatcctgctgctgaaagtggccggctttaacctgctgatgaccctgcggctgtggtccagctctagacgggttaagttttccagatccgcagacgcacccgcttaccaacaagggcagaaccaactctacaatgaacttaatttggggcggagggaagagtacgacgttctggacaaaaggaggggacgagatcccgagatgggcggaaagcctcagcgaaggaagaatccgcaagaggggctttataacgaactccagaaagataaaatggcagaagcctatagtgagattgggatgaagggagaaaggaggaggggtaaaggtcacgatgggttgtaccaaggattgagcacagccactaaagatacctatgatgcgctccacatgcaggccctgccgccaagacgcgccaagagaagcggatctggcgtgaagcagaccctgaatttcgacctgctgaagctggctggcgacgtggaatccaacccaggccctggccatatgaccgagtacaagcccacggtgcgcctcgccacccgcgacgacgtccccagggccgtacgcaccctcgccgccgcgttcgccgactaccccgccacgcgccacaccgtcgatccggaccgccacatcgagcgggtcaccgagctgcaagaactcttcctcacgcgcgtcgggctcgacatcggcaaggtgtgggtcgcggacgacggcgccgcggtggcggtctggaccacgccggagagcgtcgaagcgggggcggtgttcgccgagatcggcccgcgcatggccgagttgagcggttcccggctggccgcgcagcaacagatggaaggcctcctggcgccgcaccggcccaaggagcccgcgtggttcctggccaccgtcggcgtctcgcccgaccaccagggcaagggtctgggcagcgccgtcgtgctccccggagtggaggcggccgagcgcgccggggtgcccgccttcctggagacctccgcgccccgcaacctccccttctacgagcggctcggcttcaccgtcaccgccgacgtcgaggtgcccgaaggaccgcgcacctggtgcatgacccgcaagcccggtgcctga

SEQ ID NO: 32528 - DNA, 3246 bp, synthetic construct
  source 1..3246: mol_type = other DNA
atggccttaccagtgaccgccttgctcctgccgctggccttgctgctccacgccgccaggccggacatccagatgacacagagccctagcagcctgtctgccagcgtgggagacagagtgaccatcacatgcaaggccagcgaccacatcaacaactggctggcctggtatcagcagaagcctggacaggcccctaagctgctgatctacggcgctaccacactggaaacaggcgtgcccagcagattttctggcagcggctctggcaccgactacaccctgacaatatccagcctccagcctgaggacttcgccacctactactgtcagcagagctggaacaccccttggacattcggccagggcaccaagctggaaatcaagagactcgaggacctgaagaacgtgttcccacctgaggtggccgtgttcgagcctagcgaggccgagatcagccacacccagaaagccaccctcgtgtgcctggctaccggcttctaccccgaccatgtggaactgtcttggtgggtcaacggcaaagaggtgcacagcggcgtgtgtaccgacccccagccactgaaagaacagcccgccctgaacgacagccggtactgcctgagcagcagactgagagtgtccgccaccttctggcagaacccccggaaccacttcagatgccaggtgcagttctacggcctgagcgagaacgacgagtggacccaggacagagccaagcccgtgacccagatcgtgtctgccgaagcctggggcagagccgattgcggctttaccagcgagagctaccagcagggcgtgctgagcgccaccatcctgtacgagatcctgctgggcaaggccaccctgtacgccgtgctggtgtctgccctggtgctgatggctatggtcaagcggaaggacagccggggaactagtagagtgaagttcagcagaagcgccgacgcccctgcctaccagcagggacagaaccaactgtacaacgagctgaacctgggcagacgggaagagtacgacgtgctggacaagcggagaggcagggaccctgagatgggcggaaagccccagcggagaaagaacccccaggaaggactgtataacgaactccagaaagacaagatggccgaagcctacagcgagatcggcatgaagggcgagcggagaagaggcaagggccacgatggcctgtaccagggcctgagcaccgccaccaaggacacctatgacgccctgcacatgcaggccctgcctccaagaagggccaagcgatctggatctggagcaacaaacttctcactactcaaacaagcaggtgacgtggaggagaatcccgggcctatggactggatttggcgcatccttttccttgtcggcgctgctaccggcgcgcattccttcgaacaagttcagcttcaacagcctggcgctgagctggtcaaacctggcgcttctgtgaagatgagctgcaaagccagcggctacgccttcagcagctactggatcaactggatgaagcagaaacccggccagggactcgaatggatcggccaaatctatcccggcgacggcgacaccaactacaacggcaagttcaagggcagagccacactgaccgccgatacctctagcagcacagcctacatgcagctgagcagcctgaccagcgaagatagcgccgtgtacttctgtgcccggtccatcacaacagtcgtgggctgcgctatggactattggggccagggaacaagcgtgaccgtgtctagtacgcgtatccagaaccctgatcctgccgtgtaccagctgcgggatagcaagagcagcgacaagagcgtgtgtctgttcaccgacttcgacagccagaccaacgtgtcccagagcaaggactccgacgtgtacatcaccgataagtgcgtgctggacatgcggagcatggacttcaagagcaactccgccgtggcctggtccaacaagtccgatttcgcctgcgccaacgccttcaacaacagcattatccccgaggacacattcttcccaagccccgagagcagctgcgacgtgaagctggtggaaaagagcttcgagacagacaccaacctgaacttccagaacctgagcgtgatcggcttcagaatcctgctgctgaaagtggccggctttaacctgctgatgaccctgcggctgtggtccagctctagacgggttaagttttccagatccgcagacgcacccgcttaccaacaagggcagaaccaactctacaatgaacttaatttggggcggagggaagagtacgacgttctggacaaaaggaggggacgagatcccgagatgggcggaaagcctcagcgaaggaagaatccgcaagaggggctttataacgaactccagaaagataaaatggcagaagcctatagtgagattgggatgaagggagaaaggaggaggggtaaaggtcacgatgggttgtaccaaggattgagcacagccactaaagatacctatgatgcgctccacatgcaggccctgccgccaagacgcgccaagagaagcggatctggcgtgaagcagaccctgaatttcgacctgctgaagctggctggcgacgtggaatccaacccaggccctggccatatgaccgagtacaagcccacggtgcgcctcgccacccgcgacgacgtccccagggccgtacgcaccctcgccgccgcgttcgccgactaccccgccacgcgccacaccgtcgatccggaccgccacatcgagcgggtcaccgagctgcaagaactcttcctcacgcgcgtcgggctcgacatcggcaaggtgtgggtcgcggacgacggcgccgcggtggcggtctggaccacgccggagagcgtcgaagcgggggcggtgttcgccgagatcggcccgcgcatggccgagttgagcggttcccggctggccgcgcagcaacagatggaaggcctcctggcgccgcaccggcccaaggagcccgcgtggttcctggccaccgtcggcgtctcgcccgaccaccagggcaagggtctgggcagcgccgtcgtgctccccggagtggaggcggccgagcgcgccggggtgcccgccttcctggagacctccgcgccccgcaacctccccttctacgagcggctcggcttcaccgtcaccgccgacgtcgaggtgcccgaaggaccgcgcacctggtgcatgacccgcaagcccggtgcctga

SEQ ID NO: 32529 - DNA, 3246 bp, synthetic construct; identical to SEQ ID NO: 32528
  source 1..3246: mol_type = other DNA

SEQ ID NO: 32530 - DNA, 2907 bp, synthetic construct
  source 1..2907: mol_type = other DNA
atggccttaccagtgaccgccttgctcctgccgctggccttgctgctccacgccgccaggccggacatccagatgacacagagccctagcagcctgtctgccagcgtgggagacagagtgaccatcacatgcaaggccagcgaccacatcaacaactggctggcctggtatcagcagaagcctggacaggcccctaagctgctgatctacggcgctaccacactggaaacaggcgtgcccagcagattttctggcagcggctctggcaccgactacaccctgacaatatccagcctccagcctgaggacttcgccacctactactgtcagcagagctggaacaccccttggacattcggccagggcaccaagctggaaatcaagagactcgaggacctgaagaacgtgttcccacctgaggtggccgtgttcgagcctagcgaggccgagatcagccacacccagaaagccaccctcgtgtgcctggctaccggcttctaccccgaccatgtggaactgtcttggtgggtcaacggcaaagaggtgcacagcggcgtgtgtaccgacccccagccactgaaagaacagcccgccctgaacgacagccggtactgcctgagcagcagactgagagtgtccgccaccttctggcagaacccccggaaccacttcagatgccaggtgcagttctacggcctgagcgagaacgacgagtggacccaggacagagccaagcccgtgacccagatcgtgtctgccgaagcctggggcagagccgattgcggctttaccagcgagagctaccagcagggcgtgctgagcgccaccatcctgtacgagatcctgctgggcaaggccaccctgtacgccgtgctggtgtctgccctggtgctgatggctatggtcaagcggaaggacagccggggaactagtagagtgaagttcagcagaagcgccgacgcccctgcctaccagcagggacagaaccaactgtacaacgagctgaacctgggcagacgggaagagtacgacgtgctggacaagcggagaggcagggaccctgagatgggcggaaagccccagcggagaaagaacccccaggaaggactgtataacgaactccagaaagacaagatggccgaagcctacagcgagatcggcatgaagggcgagcggagaagaggcaagggccacgatggcctgtaccagggcctgagcaccgccaccaaggacacctatgacgccctgcacatgcaggccctgcctccaagaagggccaagcgatctggatctggagcaacaaacttctcactactcaaacaagcaggtgacgtggaggagaatcccgggcctatggactggatttggcgcatccttttccttgtcggcgctgctaccggcgcgcattccttcgaacaagttcagcttcaacagcctggcgctgagctggtcaaacctggcgcttctgtgaagatgagctgcaaagccagcggctacgccttcagcagctactggatcaactggatgaagcagaaacccggccagggactcgaatggatcggccaaatctatcccggcgacggcgacaccaactacaacggcaagttcaagggcagagccacactgaccgccgatacctctagcagcacagcctacatgcagctgagcagcctgaccagcgaagatagcgccgtgtacttctgtgcccggtccatcacaacagtcgtgggctgcgctatggactattggggccagggaacaagcgtgaccgtgtctagtacgcgtatccagaaccctgatcctgccgtgtaccagctgcgggatagcaagagcagcgacaagagcgtgtgtctgttcaccgacttcgacagccagaccaacgtgtcccagagcaaggactccgacgtgtacatcaccgataagtgcgtgctggacatgcggagcatggacttcaagagcaactccgccgtggcctggtccaacaagtccgatttcgcctgcgccaacgccttcaacaacagcattatccccgaggacacattcttcccaagccccgagagcagctgcgacgtgaagctggtggaaaagagcttcgagacagacaccaacctgaacttccagaacctgagcgtgatcggcttcagaatcctgctgctgaaagtggccggctttaacctgctgatgaccctgcggctgtggtccagccgcgccaagagaagcggatctggcgtgaagcagaccctgaatttcgacctgctgaagctggctggcgacgtggaatccaacccaggcccttctagaggccatatgaccgagtacaagcccacggtgcgcctcgccacccgcgacgacgtccccagggccgtacgcaccctcgccgccgcgttcgccgactaccccgccacgcgccacaccgtcgatccggaccgccacatcgagcgggtcaccgagctgcaagaactcttcctcacgcgcgtcgggctcgacatcggcaaggtgtgggtcgcggacgacggcgccgcggtggcggtctggaccacgccggagagcgtcgaagcgggggcggtgttcgccgagatcggcccgcgcatggccgagttgagcggttcccggctggccgcgcagcaacagatggaaggcctcctggcgccgcaccggcccaaggagcccgcgtggttcctggccaccgtcggcgtctcgcccgaccaccagggcaagggtctgggcagcgccgtcgtgctccccggagtggaggcggccgagcgcgccggggtgcccgccttcctggagacctccgcgccccgcaacctccccttctacgagcggctcggcttcaccgtcaccgccgacgtcgaggtgcccgaaggaccgcgcacctggtgcatgacccgcaagcccggtgcctga

SEQ ID NO: 32531 - DNA, 3132 bp, synthetic construct
  source 1..3132: mol_type = other DNA
atggccttaccagtgaccgccttgctcctgccgctggccttgctgctccacgccgccaggccggacatccagatgacacagagccctagcagcctgtctgccagcgtgggagacagagtgaccatcacatgcaaggccagcgaccacatcaacaactggctggcctggtatcagcagaagcctggacaggcccctaagctgctgatctacggcgctaccacactggaaacaggcgtgcccagcagattttctggcagcggctctggcaccgactacaccctgacaatatccagcctccagcctgaggacttcgccacctactactgtcagcagagctggaacaccccttggacattcggccagggcaccaagctggaaatcaagagactcgaggccgacgtgtcccccaagcctaccatcttcctgccctctatcgccgagacaaagctccagaaggccggcacctacctgtgcctgctggaaaagttcttcccagatgtgattaagatccactggcaggaaaagaagtccaacaccatcctgggcagccaggaaggcaacaccatgaagaccaacgacacctacatgaagttcagctggctgaccgtgcccgagaagtccctggacaaagaacacagatgcatcgtgcggcacgaaaacaacaagaacggcgtggaccaggaaatcatcttcccacccatcaagaccgatgtgattacaatggaccccaaggacggatcccagagcttcggcctgctggaccccaagctgtgctacctgctggatggcatcctgttcatctacggcgtgatcctgaccgccctgttcctgagagtgaagttcagcagaagcgccgacgcccctgcctaccagcagggacagaaccaactgtacaacgagctgaacctgggcagacgggaagagtacgacgtgctggacaagcggagaggcagggaccctgagatgggcggaaagccccagcggagaaagaacccccaggaaggactgtataacgaactccagaaagacaagatggccgaagcctacagcgagatcggcatgaagggcgagcggagaagaggcaagggccacgatggcctgtaccagggcctgagcaccgccaccaaggacacctatgacgccctgcacatgcaggccctgcctccaagaagggccaagcgatctggatctggagcaacaaacttctcactactcaaacaagcaggtgacgtggaggagaatcccgggcctactagtatggactggatttggcgcatccttttccttgtcggcgctgctaccggcgcgcattccttcgaacaagttcagcttcaacagcctggcgctgagctggtcaaacctggcgcttctgtgaagatgagctgcaaagccagcggctacgccttcagcagctactggatcaactggatgaagcagaaacccggccagggactcgaatggatcggccaaatctatcccggcgacggcgacaccaactacaacggcaagttcaagggcagagccacactgaccgccgatacctctagcagcacagcctacatgcagctgagcagcctgaccagcgaagatagcgccgtgtacttctgtgcccggtccatcacaacagtcgtgggctgcgctatggactattggggccagggaacaagcgtgaccgtgtctagtacgcgtgcgtccactaagggtccgtcagtcttcccgctggcgccctgttcccgcagcacgagtgaatctaccgccgcccttgggtgcttggtaaaagactattttcctgagcccgttacagtatcatggaacagcggggctctgactagcggggtgcatacgttccctgcggttctgcaatctagcggactgtattctctctccagtgttgtgaccgtgccaagctccagcctcggtactaaaacttatacatgtaatgtggatcataaaccttcaaataccaaggttgacaaaagggtagagagtaagtacggtggtacccagagttttgggttgttggaccctaaattgtgctatctgttggacggaatcctgttcatttacggagtgatcctgaccgcattgttcctgcgggttaagttttccagatccgcagacgcacccgcttaccaacaagggcagaaccaactctacaatgaacttaatttggggcggagggaagagtacgacgttctggacaaaaggaggggacgagatcccgagatgggcggaaagcctcgaaggaagaatccgcaagaggggctttataacgaactccagaaagataaaatggcagaagcctatagtgagattgggatgaagggagaaaggaggaggggtaaaggtcacgatgggttgtaccaaggattgagcacagccactaaagatacctatgatgcgctccacatgcaggccctgccgccaagacgcgccaagagaagcggatctggcgtgaagcagaccctgaatttcgacctgctgaagctggctggcgacgtggaatccaacccaggcccttctagaggccatatgaccgagtacaagcccacggtgcgcctcgccacccgcgacgacgtccccagggccgtacgcaccctcgccgccgcgttcgccgactaccccgccacgcgccacaccgtcgatccggaccgccacatcgagcgggtcaccgagctgcaagaactcttcctcacgcgcgtcgggctcgacatcggcaaggtgtgggtcgcggacgacggcgccgcggtggcggtctggaccacgccggagagcgtcgaagcgggggcggtgttcgccgagatcggcccgcgcatggccgagttgagcggttcccggctggccgcgcagcaacagatggaaggcctcctggcgccgcaccggcccaaggagcccgcgtggttcctggccaccgtcggcgtctcgcccgaccaccagggcaagggtctgggcagcgccgtcgtgctccccggagtggaggcggccgagcgcgccggggtgcccgccttcctggagacctccgcgccccgcaacctccccttctacgagcggctcggcttcaccgtcaccgccgacgtcgaggtgcccgaaggaccgcgcacctggtgcatgacccgcaagcccggtgcctga

SEQ ID NO: 32532 - DNA, 3096 bp, synthetic construct
  source 1..3096: mol_type = other DNA
atggccttaccagtgaccgccttgctcctgccgctggccttgctgctccacgccgccaggccggacatccagatgacacagagccctagcagcctgtctgccagcgtgggagacagagtgaccatcacatgcaaggccagcgaccacatcaacaactggctggcctggtatcagcagaagcctggacaggcccctaagctgctgatctacggcgctaccacactggaaacaggcgtgcccagcagattttctggcagcggctctggcaccgactacaccctgacaatatccagcctccagcctgaggacttcgccacctactactgtcagcagagctggaacaccccttggacattcggccagggcaccaagctggaaatcaagagactcgagggacagcctaaggccaatcctaccgtgacactgttccctccaagcagcgaagaactccaggccaacaaggccacacttgtgtgcctgatctccgacttctaccctggggctgtgacagtggcttggaaggccgatggatctcctgtgaaagccggcgtggaaaccaccaagccatccaagcagagcaacaacaaatacgccgccagctcctacctgagcctgacacctgagcagtggaagtcccacagatcctacagctgccaagtgacccacgaaggcagcaccgtggaaaagacagtggcccctacagagtgcagcggatccggcaagggaacacagctgagcgtggtggacttcctgcctactacagcccagcctaccaagaagtctaccctgaagaaaagagtgtgcaggctgcccagacctgagacacagaaaggccctctgtgcagccctatcacactgggattgctggtggctggcgtgctggtgctgctggtttctctgggagttgccatccacctgtgctgtagaagaaggcgggccagactgcggtttatgaagcagttctacaagagagcaaagcgaagtggtagcggagcaaccaacttttctctgctcaagcaagccggtgacgtggaagagaaccctggtcctactagtatggactggatttggcgcatccttttccttgtcggcgctgctaccggcgcgcattccttcgaacaagttcagcttcaacagcctggcgctgagctggtcaaacctggcgcttctgtgaagatgagctgcaaagccagcggctacgccttcagcagctactggatcaactggatgaagcagaaacccggccagggactcgaatggatcggccaaatctatcccggcgacggcgacaccaactacaacggcaagttcaagggcagagccacactgaccgccgatacctctagcagcacagcctacatgcagctgagcagcctgaccagcgaagatagcgccgtgtacttctgtgcccggtccatcacaacagtcgtgggctgcgctatggactattggggccagggaacaagcgtgaccgtgtctagtacgcgtgcctctacaaagggaccctccgtgtttcctctggctcccagcagcaagtctacaagcggaggaacagccgctctgggctgcctggtcaaggattactttcccgagcctgtgaccgtgtcctggaatagcggagcactgacaagcggcgtgcacacctttccagccgtgctgcaaagcagcggcctgtactctctgagcagcgtggtcacagtgcctagctctagcctgggcacccagacctacatctgcaatgtgaaccacaagcctagcaacaccaaggtggacaagagagtggaacccaagagctgtggtacctctggacaggtgctgctggaaagcaacatcaaggtgctgcccacctggtccacccccgtgcagcctatggctctgattgtgctgggcggagtggccggactgctgctgtttattggcctgggcatcttcttttgcgtgcggtgcagacaccggcggagacaggccgagagaatgagccagatcaagagactgctgtccgagaagaaaacctgccagtgcccccacagattccagaaaacatgcagccccatctctagacgggttaagttttccagatccgcagacgcacccgcttaccaacaagggcagaaccaactctacaatgaacttaatttggggcggagggaagagtacgacgttctggacaaaaggaggggacgagatcccgagatgggcggaaagcctcagcgaaggaagaatccgcaagaggggctttataacgaactccagaaagataaaatggcagaagcctatagtgagattgggatgaagggagaaaggaggaggggtaaaggtcacgatgggttgtaccaaggattgagcacagccactaaagatacctatgatgcgctccacatgcaggccctgccgccaagacgcgccaagagaagcggatctggcgtgaagcagaccctgaatttcgacctgctgaagctggctggcgacgtggaatccaacccaggccctggccatatgaccgagtacaagcccacggtgcgcctcgccacccgcgacgacgtccccagggccgtacgcaccctcgccgccgcgttcgccgactaccccgccacgcgccacaccgtcgatccggaccgccacatcgagcgggtcaccgagctgcaagaactcttcctcacgcgcgtcgggctcgacatcggcaaggtgtgggtcgcggacgacggcgccgcggtggcggtctggaccacgccggagagcgtcgaagcgggggcggtgttcgccgagatcggcccgcgcatggccgagttgagcggttcccggctggccgcgcagcaacagatggaaggcctcctggcgccgcaccggcccaaggagcccgcgtggttcctggccaccgtcggcgtctcgcccgaccaccagggcaagggtctgggcagcgccgtcgtgctccccggagtggaggcggccgagcgcgccggggtgcccgccttcctggagacctccgcgccccgcaacctccccttctacgagcggctcggcttcaccgtcaccgccgacgtcgaggtgcccgaaggaccgcgcacctggtgcatgacccgcaagcccggtgcctga

SEQ ID NO: 32533 - DNA, 3330 bp, synthetic construct
  source 1..3330: mol_type = other DNA
atggccttaccagtgaccgccttgctcctgccgctggccttgctgctccacgccgccaggccggacatccagatgacacagagccctagcagcctgtctgccagcgtgggagacagagtgaccatcacatgcaaggccagcgaccacatcaacaactggctggcctggtatcagcagaagcctggacaggcccctaagctgctgatctacggcgctaccacactggaaacaggcgtgcccagcagattttctggcagcggctctggcaccgactacaccctgacaatatccagcctccagcctgaggacttcgccacctactactgtcagcagagctggaacaccccttggacattcggccagggcaccaagctggaaatcaagagactcgagggacagcctaaggccaatcctaccgtgacactgttccctccaagcagcgaagaactccaggccaacaaggccacacttgtgtgcctgatctccgacttctaccctggggctgtgacagtggcttggaaggccgatggatctcctgtgaaagccggcgtggaaaccaccaagccatccaagcagagcaacaacaaatacgccgccagctcctacctgagcctgacacctgagcagtggaagtcccacagatcctacagctgccaagtgacccacgaaggcagcaccgtggaaaagacagtggcccctacagagtgcagccccatcaagaccgatgtgattacaatggaccccaaggacaactgctccaaggacgccaacgataccctgctgctccagctgaccaacaccagcgcctactacatgtacttgttgctgctgctgaagtccgtggtgtacttcgccatcatcacatgctgcctgctgcggagaaccgccttctgctgcaacggcgagaagtctggatccagagtgaagttcagcagaagcgccgacgcccctgcctaccagcagggacagaaccaactgtacaacgagctgaacctgggcagacgggaagagtacgacgtgctggacaagcggagaggcagggaccctgagatgggcggaaagccccggagaaagaacccccaggaaggactgtataacgaactccagaaagacaagatggccgaagcctacagcgagatcggcatgaagggcgagcggagaagaggcaagggccacgatggcctgtaccagggcctgagcaccgccaccaaggacacctatgacgccctgcacatgcaggccctgcctccaagaagggccaagcgatctggatctggagcaacaaacttctcactactcaaacaagcaggtgacgtggaggagaatcccgggcctactagtatggactggatttggcgcatccttttccttgtcggcgctgctaccggcgcgcattccttcgaacaagttcagcttcaacagcctggcgctgagctggtcaaacctggcgcttctgtgaagatgagctgcaaagccagcggctacgccttcagcagctactggatcaactggatgaagcagaaacccggccagggactcgaatggatcggccaaatctatcccggcgacggcgacaccaactacaacggcaagttcaagggcagagccacactgaccgccgatacctctagcagcacagcctacatgcagctgagcagcctgaccagcgaagatagcgccgtgtacttctgtgcccggtccatcacaacagtcgtgggctgcgctatggactattggggccagggaacaagcgtgaccgtgtctagtacgcgtgcctctacaaagggaccctccgtgtttcctctggctcccagcagcaagtctacaagcggaggaacagccgctctgggctgcctggtcaaggattactttcccgagcctgtgaccgtgtcctggaatagcggagcactgacaagcggcgtgcacacctttccagccgtgctgcaaagcagcggcctgtactctctgagcagcgtggtcacagtgcctagctctagcctgggcacccagacctacatctgcaatgtgaaccacaagcctagcaacaccaaggtggacaagagagtggaacccaagagctgtgaagtgaaaaccgactccaccgaccacgtgaagcccaaagagacagagaacaccaagcagcccagcaagagctgccacaagcccaaggccatcgtgcacaccgagaaagtgaacatgatgagcctgaccgtgctgggcctgcggatgctgttcgccaaaaccgtggccgtgaacttcctgctgaccgccaagctgttcttcctcggtaccagggttaagttttccagatccgcagacgcacccgcttaccaacaagggcagaaccaactctacaatgaacttaatttggggcggagggaagagtacgacgttctggacaaaaggaggggacgagatcccgagatgggcggaaagcctcgaaggaagaatccgcaagaggggctttataacgaactccagaaagataaaatggcagaagcctatagtgagattgggatgaagggagaaaggaggaggggtaaaggtcacgatgggttgtaccaaggattgagcacagccactaaagatacctatgatgcgctccacatgcaggccctgccgccaagacgcgccaagagaagcggatctggcgtgaagcagaccctgaatttcgacctgctgaagctggctggcgacgtggaatccaacccaggcccttctagaggccatatgaccgagtacaagcccacggtgcgcctcgccacccgcgacgacgtccccagggccgtacgcaccctcgccgccgcgttcgccgactaccccgccacgcgccacaccgtcgatccggaccgccacatcgagcgggtcaccgagctgcaagaactcttcctcacgcgcgtcgggctcgacatcggcaaggtgtgggtcgcggacgacggcgccgcggtggcggtctggaccacgccggagagcgtcgaagcgggggcggtgttcgccgagatcggcccgcgcatggccgagttgagcggttcccggctggccgcgcagcaacagatggaaggcctcctggcgccgcaccggcccaaggagcccgcgtggttcctggccaccgtcggcgtctcgcccgaccaccagggcaagggtctgggcagcgccgtcgtgctccccggagtggaggcggccgagcgcgccggggtgcccgccttcctggagacctccgcgccccgcaacctccccttctacgagcggctcggcttcaccgtcaccgccgacgtcgaggtgcccgaaggaccgcgcacctggtgcatgacccgcaagcccggtgcctga

SEQ ID NO: 32534 - DNA, 3255 bp, synthetic construct
  source 1..3255: mol_type = other DNA
atggccttaccagtgaccgccttgctcctgccgctggccttgctgctccacgccgccaggccggacatccagatgacacagagccctagcagcctgtctgccagcgtgggagacagagtgaccatcacatgcaaggccagcgaccacatcaacaactggctggcctggtatcagcagaagcctggacaggcccctaagctgctgatctacggcgctaccacactggaaacaggcgtgcccagcagattttctggcagcggctctggcaccgactacaccctgacaatatccagcctccagcctgaggacttcgccacctactactgtcagcagagctggaacaccccttggacattcggccagggcaccaagctggaaatcaagagactcgaggccgacgtgtcccccaagcctaccatcttcctgccctctatcgccgagacaaagctccagaaggccggcacctacctgtgcctgctggaaaagttcttcccagatgtgattaagatccactggcaggaaaagaagtccaacaccatcctgggcagccaggaaggcaacaccatgaagaccaacgacacctacatgaagttcagctggctgaccgtgcccgagaagtccctggacaaagaacacagatgcatcgtgcggcacgaaaacaacaagaacggcgtggaccaggaaatcatcttcccacccatcaagaccgatgtgattacaatggaccccaaggacaactgctccaaggacgccaacgataccctgctgctccagctgaccaacaccagcgcctactacatgtacttgttgctgctgctgaagtccgtggtgtacttcgccatcatcacatgctgcctgctgcggagaaccgccttctgctgcaacggcgagaagtctggatccagagtgaagttcagcagaagcgccgacgcccctgcctaccagcagggacagaaccaactgtacaacgagctgaacctgggcagacgggaagagtacgacgtgctggacaagcggagaggcagggaccctgagatgggcggaaagccccggagaaagaacccccaggaaggactgtataacgaactccagaaagacaagatggccgaagcctacagcgagatcggcatgaagggcgagcggagaagaggcaagggccacgatggcctgtaccagggcctgagcaccgccaccaaggacacctatgacgccctgcacatgcaggccctgcctccaagaagggccaagcgatctggatctggagcaacaaacttctcactactcaaacaagcaggtgacgtggaggagaatcccgggcctactagtatggactggatttggcgcatccttttccttgtcggcgctgctaccggcgcgcattccttcgaacaagttcagcttcaacagcctggcgctgagctggtcaaacctggcgcttctgtgaagatgagctgcaaagccagcggctacgccttcagcagctactggatcaactggatgaagcagaaacccggccagggactcgaatggatcggccaaatctatcccggcgacggcgacaccaactacaacggcaagttcaagggcagagccacactgaccgccgatacctctagcagcacagcctacatgcagctgagcagcctgaccagcgaagatagcgccgtgtacttctgtgcccggtccatcacaacagtcgtgggctgcgctatggactattggggccagggaacaagcgtgaccgtgtctagtacgcgtcctcacaccaagcccagcgtgttcgtgatgaagaacggcaccaacgtggcctgcctcgtgaaagagttctaccccaaggacatcaggatcaacctggtgtccagcaagaagatcaccgagttcgaccccgccatcgtgatctcccccagcggcaagtacaacgccgtgaagctggggaagtacgaggacagcaacagcgtgacctgctccgtgcagcacgacaacaagaccgtgcacagcaccgactttgaagtgaaaaccgactccaccgaccacgtgaagcccaaagagacagagaacaccaagcagcccagcaagagctgccacaagcccaaggccatcgtgcacaccgagaaagtgaacatgatgagcctgaccgtgctgggcctgcggatgctgttcgccaaaaccgtggccgtgaacttcctgctgaccgccaagctgttcttcctcggtaccagggttaagttttccagatccgcagacgcacccgcttaccaacaagggcagaaccaactctacaatgaacttaatttggggcggagggaagagtacgacgttctggacaaaaggaggggacgagatcccgagatgggcggaaagcctcgaaggaagaatccgcaagaggggctttataacgaactccagaaagataaaatggcagaagcctatagtgagattgggatgaagggagaaaggaggaggggtaaaggtcacgatgggttgtaccaaggattgagcacagccactaaagatacctatgatgcgctccacatgcaggccctgccgccaagacgcgccaagagaagcggatctggcgtgaagcagaccctgaatttcgacctgctgaagctggctggcgacgtggaatccaacccaggcccttctagaggccatatgaccgagtacaagcccacggtgcgcctcgccacccgcgacgacgtccccagggccgtacgcaccctcgccgccgcgttcgccgactaccccgccacgcgccacaccgtcgatccggaccgccacatcgagcgggtcaccgagctgcaagaactcttcctcacgcgcgtcgggctcgacatcggcaaggtgtgggtcgcggacgacggcgccgcggtggcggtctggaccacgccggagagcgtcgaagcgggggcggtgttcgccgagatcggcccgcgcatggccgagttgagcggttcccggctggccgcgcagcaacagatggaaggcctcctggcgccgcaccggcccaaggagcccgcgtggttcctggccaccgtcggcgtctcgcccgaccaccagggcaagggtctgggcagcgccgtcgtgctccccggagtggaggcggccgagcgcgccggggtgcccgccttcctggagacctccgcgccccgcaacctccccttctacgagcggctcggcttcaccgtcaccgccgacgtcgaggtgcccgaaggaccgcgcacctggtgcatgacccgcaagcccggtgcctga

SEQ ID NO: 32535 - DNA, 3039 bp, synthetic construct; identical to SEQ ID NO: 32321
  source 1..3039: mol_type = other DNA

SEQ ID NO: 32536 - DNA, 3333 bp, synthetic construct
  source 1..3333: mol_type = other DNA
atggccttaccagtgaccgccttgctcctgccgctggccttgctgctccacgccgccaggccggacatccagatgacacagagccctagcagcctgtctgccagcgtgggagacagagtgaccatcacatgcaaggccagcgaccacatcaacaactggctggcctggtatcagcagaagcctggacaggcccctaagctgctgatctacggcgctaccacactggaaacaggcgtgcccagcagattttctggcagcggctctggcaccgactacaccctgacaatatccagcctccagcctgaggacttcgccacctactactgtcagcagagctggaacaccccttggacattcggccagggcaccaagctggaaatcaagagactcgaggacctgaagaacgtgttcccacctgaggtggccgtgttcgagcctagcgaggccgagatcagccacacccagaaagccaccctcgtgtgcctggctaccggcttctaccccgaccatgtggaactgtcttggtgggtcaacggcaaagaggtgcacagcggcgtgtctaccgacccccagccactgaaagaacagcccgccctgaacgacagccggtactgcctgagcagcagactgagagtgtccgccaccttctggcagaacccccggaaccacttcagatgccaggtgcagttctacggcctgagcgagaacgacgagtggacccaggacagagccaagcccgtgacccagatcgtgtctgccgaagcctggggcagagccgattgcggatcccagagcttcggcctgctggaccccaagctgtgctacctgctggatggcatcctgttcatctacggcgtgatcctgaccgccctgttcctgagagtgaagttcagcagaagcgccgacgcccctgcctaccagcagggacagaaccaactgtacaacgagctgaacctgggcagacgggaagagtacgacgtgctggacaagcggagaggcagggaccctgagatgggcggaaagccccagcggagaaagaacccccaggaaggactgtataacgaactccagaaagacaagatggccgaagcctacagcgagatcggcatgaagggcgagcggagaagaggcaagggccacgatggcctgtaccagggcctgagcaccgccaccaaggacacctatgacgccctgcacatgcaggccctgcctccaagaagggccaagcgatctggatctggagcaacaaacttctcactactcaaacaagcaggtgacgtggaggagaatcccgggcctactagtatggactggatttggcgcatccttttccttgtcggcgctgctaccggcgcgcattccttcgaacaagttcagcttcaacagcctggcgctgagctggtcaaacctggcgcttctgtgaagatgagctgcaaagccagcggctacgccttcagcagctactggatcaactggatgaagcagaaacccggccagggactcgaatggatcggccaaatctatcccggcgacggcgacaccaactacaacggcaagttcaagggcagagccacactgaccgccgatacctctagcagcacagcctacatgcagctgagcagcctgaccagcgaagatagcgccgtgtacttctgtgcccggtccatcacaacagtcgtgggctgcgctatggactattggggccagggaacaagcgtgaccgtgtctagtacgcgtatccagaaccctgatcctgccgtgtaccagctgcgggatagcaagagcagcgacaagagcgtgtgtctgttcaccgacttcgacagccagaccaacgtgtcccagagcaaggactccgacgtgtacatcaccgataagaccgtgctggacatgcggagcatggacttcaagagcaactccgccgtggcctggtccaacaagtccgatttcgcctgcgccaacgccttcaacaacagcattatccccgaggacacattcttcccaagccccgagagcagctgcggtacccagagttttgggttgttggaccctaaattgtgctatctgttggacggaatcctgttcatttacggagtgatcctgaccgcattgttcctgcactgtcacagactgcctggcagctacgatagcaccagcagcgacagcctgtatcctcggggcatccagttcaagaggccacacacagttgccccttggcctccagcttaccctcctgtgacaagctaccctccactgagccagcctgacctgctgcctattcctagaagccctcagcctctcggcggcagccatagaacacctagcagcagaagagacagcgacggggccaatagcgtggcctcctatgagaatgagggcgcttccggcattaggggcgctcaagctggatggggagtttggggacctagctggacaagactgacccctgtgtctctgcctcctgaacctgcctgcgaagatgccgacgaggacgaggatgactatcacaaccctggctacctggtggtgctgcctgatagcacaccagccacatctacagccgctccatctgctccagctctgagcacacctggcatcagagatagcgccttcagcatggaatccatcgacgaccgcgccaagagaagcggatctggcgtgaagcagaccctgaatttcgacctgctgaagctggctggcgacgtggaatccaacccaggcccttctagaggccatatgaccgagtacaagcccacggtgcgccccgccacccgcgacgacgtccccagggccgtacgcaccctcgccgccgcgttcgccgactaccccgccacgcgccacaccgtcgatccggaccgccacatcgagcgggtcaccgagctgcaagaactcttcctcacgcgcgtcgggctcgacatcggcaaggtgtgggtcgcggacgacggcgccgcggtggcggtctggaccacgccggagagcgtcgaagcgggggcggtgttcgccgagatcggcccgcgcatggccgagttgagcggttcccggctggccgcgcagcaacagatggaaggcctcctggcgccgcaccggcccaaggagcccgcgtggttcctggccaccgtcggcgtctcgcccgaccaccagggcaagggtctgggcagcgccgtcgtgctccccggagtggaggcggccgagcgcgccggggtgcccgccttcctggagacctccgcgccccgcaacctccccttctacgagcggctcggcttcaccgtcaccgccgacgtcgaggtgcccgaaggaccgcgcacctggtgcatgacccgcaagcccggtgcctga

SEQ ID NO: 32537 - DNA, 3363 bp, synthetic construct
  source 1..3363: mol_type = other DNA
atggccttaccagtgaccgccttgctcctgccgctggccttgctgctccacgccgccaggccggacatccagatgacacagagccctagcagcctgtctgccagcgtgggagacagagtgaccatcacatgcaaggccagcgaccacatcaacaactggctggcctggtatcagcagaagcctggacaggcccctaagctgctgatctacggcgctaccacactggaaacaggcgtgcccagcagattttctggcagcggctctggcaccgactacaccctgacaatatccagcctccagcctgaggacttcgccacctactactgtcagcagagctggaacaccccttggacattcggccagggcaccaagctggaaatcaagagactcgaggacctgaagaacgtgttcccacctgaggtggccgtgttcgagcctagcgaggccgagatcagccacacccagaaagccaccctcgtgtgcctggctaccggcttctaccccgaccatgtggaactgtcttggtgggtcaacggcaaagaggtgcacagcggcgtgtctaccgacccccagccactgaaagaacagcccgccctgaacgacagccggtactgcctgagcagcagactgagagtgtccgccaccttctggcagaacccccggaaccacttcagatgccaggtgcagttctacggcctgagcgagaacgacgagtggacccaggacagagccaagcccgtgacccagatcgtgtctgccgaagcctggggcagagccgattgcggatcccagagcttcggcctgctggaccccaagctgtgctacctgctggatggcatcctgttcatctacggcgtgatcctgaccgccctgttcctgagagtgaagttcagcagaagcgccgacgcccctgcctaccagcagggacagaaccaactgtacaacgagctgaacctgggcagacgggaagagtacgacgtgctggacaagcggagaggcagggaccctgagatgggcggaaagccccagcggagaaagaacccccaggaaggactgtataacgaactccagaaagacaagatggccgaagcctacagcgagatcggcatgaagggcgagcggagaagaggcaagggccacgatggcctgtaccagggcctgagcaccgccaccaaggacacctatgacgccctgcacatgcaggccctgcctccaagaagggccaagcgatctggatctggagcaacaaacttctcactactcaaacaagcaggtgacgtggaggagaatcccgggcctactagtatggactggatttggcgcatccttttccttgtcggcgctgctaccggcgcgcattccttcgaacaagttcagcttcaacagcctggcgctgagctggtcaaacctggcgcttctgtgaagatgagctgcaaagccagcggctacgccttcagcagctactggatcaactggatgaagcagaaacccggccagggactcgaatggatcggccaaatctatcccggcgacggcgacaccaactacaacggcaagttcaagggcagagccacactgaccgccgatacctctagcagcacagcctacatgcagctgagcagcctgaccagcgaagatagcgccgtgtacttctgtgcccggtccatcacaacagtcgtgggctgcgctatggactattggggccagggaacaagcgtgaccgtgtctagtacgcgtatccagaaccctgatcctgccgtgtaccagctgcgggatagcaagagcagcgacaagagcgtgtgtctgttcaccgacttcgacagccagaccaacgtgtcccagagcaaggactccgacgtgtacatcaccgataagaccgtgctggacatgcggagcatggacttcaagagcaactccgccgtggcctggtccaacaagtccgatttcgcctgcgccaacgccttcaacaacagcattatccccgaggacacattcttcccaagccccgagagcagctgcggtaccatcactcaaggtttggcagtgtcaaccatctcatcattctttccacctggctaccaagtgtccttctgcctggtcatggtgctgctgttcgccgtggataccggcctgtacttcagcgtccactgtcacagactgcctggcagctacgatagcaccagcagcgacagcctgtatcctcggggcatccagttcaagaggccacacacagttgccccttggcctccagcttaccctcctgtgacaagctaccctccactgagccagcctgacctgctgcctattcctagaagccctcagcctctcggcggcagccatagaacacctagcagcagaagagacagcgacggggccaatagcgtggcctcctatgagaatgagggcgcttccggcattaggggcgctcaagctggatggggagtttggggacctagctggacaagactgacccctgtgtctctgcctcctgaacctgcctgcgaagatgccgacgaggacgaggatgactatcacaaccctggctacctggtggtgctgcctgatagcacaccagccacatctacagccgctccatctgctccagctctgagcacacctggcatcagagatagcgccttcagcatggaatccatcgacgaccgcgccaagagaagcggatctggcgtgaagcagaccctgaatttcgacctgctgaagctggctggcgacgtggaatccaacccaggcccttctagaggccatatgaccgagtacaagcccacggtgcgccccgccacccgcgacgacgtccccagggccgtacgcaccctcgccgccgcgttcgccgactaccccgccacgcgccacaccgtcgatccggaccgccacatcgagcgggtcaccgagctgcaagaactcttcctcacgcgcgtcgggctcgacatcggcaaggtgtgggtcgcggacgacggcgccgcggtggcggtctggaccacgccggagagcgtcgaagcgggggcggtgttcgccgagatcggcccgcgcatggccgagttgagcggttcccggctggccgcgcagcaacagatggaaggcctcctggcgccgcaccggcccaaggagcccgcgtggttcctggccaccgtcggcgtctcgcccgaccaccagggcaagggtctgggcagcgccgtcgtgctccccggagtggaggcggccgagcgcgccggggtgcccgccttcctggagacctccgcgccccgcaacctccccttctacgagcggctcggcttcaccgtcaccgccgacgtcgaggtgcccgaaggaccgcgcacctggtgcatgacccgcaagcccggtgcctga

SEQ ID NO: 32538 - DNA, 3186 bp, synthetic construct
  source 1..3186: mol_type = other DNA
atggccttaccagtgaccgccttgctcctgccgctggccttgctgctccacgccgccaggccggacatccagatgacacagagccctagcagcctgtctgccagcgtgggagacagagtgaccatcacatgcaaggccagcgaccacatcaacaactggctggcctggtatcagcagaagcctggacaggcccctaagctgctgatctacggcgctaccacactggaaacaggcgtgcccagcagattttctggcagcggctctggcaccgactacaccctgacaatatccagcctccagcctgaggacttcgccacctactactgtcagcagagctggaacaccccttggacattcggccagggcaccaagctggaaatcaagagactcgaggacctgaagaacgtgttcccacctgaggtggccgtgttcgagcctagcgaggccgagatcagccacacccagaaagccaccctcgtgtgcctggctaccggcttctaccccgaccatgtggaactgtcttggtgggtcaacggcaaagaggtgcacagcggcgtgtctaccgacccccagccactgaaagaacagcccgccctgaacgacagccggtactgcctgagcagcagactgagagtgtccgccaccttctggcagaacccccggaaccacttcagatgccaggtgcagttctacggcctgagcgagaacgacgagtggacccaggacagagccaagcccgtgacccagatcgtgtctgccgaagcctggggcagagccgattgcggatcccagagcttcggcctgctggaccccaagctgtgctacctgctggatggcatcctgttcatctacggcgtgatcctgaccgccctgttcctgagagtgaagttcagcagaagcgccgacgcccctgcctaccagcagggacagaaccaactgtacaacgagctgaacctgggcagacgggaagagtacgacgtgctggacaagcggagaggcagggaccctgagatgggcggaaagccccagcggagaaagaacccccaggaaggactgtataacgaactccagaaagacaagatggccgaagcctacagcgagatcggcatgaagggcgagcggagaagaggcaagggccacgatggcctgtaccagggcctgagcaccgccaccaaggacacctatgacgccctgcacatgcaggccctgcctccaagaagggccaagcgatctggatctggagcaacaaacttctcactactcaaacaagcaggtgacgtggaggagaatcccgggcctactagtatggactggatttggcgcatccttttccttgtcggcgctgctaccggcgcgcattccttcgaacaagttcagcttcaacagcctggcgctgagctggtcaaacctggcgcttctgtgaagatgagctgcaaagccagcggctacgccttcagcagctactggatcaactggatgaagcagaaacccggccagggactcgaatggatcggccaaatctatcccggcgacggcgacaccaactacaacggcaagttcaagggcagagccacactgaccgccgatacctctagcagcacagcctacatgcagctgagcagcctgaccagcgaagatagcgccgtgtacttctgtgcccggtccatcacaacagtcgtgggctgcgctatggactattggggccagggaacaagcgtgaccgtgtctagtacgcgtatccagaaccctgatcctgccgtgtaccagctgcgggatagcaagagcagcgacaagagcgtgtgtctgttcaccgacttcgacagccagaccaacgtgtcccagagcaaggactccgacgtgtacatcaccgataagaccgtgctggacatgcggagcatggacttcaagagcaactccgccgtggcctggtccaacaagtccgatttcgcctgcgccaacgccttcaacaacagcattatccccgaggacacattcttcccaagccccgagagcagctgcggtaccattacccaaggactggctgtgcctacaatctctagcttctttccgcctggataccaagtctccttctgtcttgtgatggtcctcctgtttgctgtggacacaggactgtacttttccgtgaaatctagaggaggcagcctcgagggaggaggcgtccaagtcgaaaccattagtcccggcgatggcagaacatttcctaaaaggggacaaacatgtgtcgtccattatacaggcatgttggaggacggcaaaaaggtggacagtagtagagatcgcaataaacctttcaaattcatgttgggaaaacaagaagtcattaggggatgggaggagggcgtggctcaaatgtccgtcggccaacgcgctaagctcaccatcagccccgactacgcatacggcgctaccggacatcccggaattattccccctcacgctaccttggtgtttgacgtcgaactgttgaagctcgggactagtagagcaaagcgaagtggtagcggagcaaccaacttttctctgctcaagcaagccggtgacgtggaagagaaccctggtcctcatatgaccgagtacaagcccacggtgcgcctcgccacccgcgacgacgtccccagggccgtacgcaccctcgccgccgcgttcgccgactaccccgccacgcgccacaccgtcgatccggaccgccacatcgagcgggtcaccgagctgcaagaactcttcctcacgcgcgtcgggctcgacatcggcaaggtgtgggtcgcggacgacggcgccgcggtggcggtctggaccacgccggagagcgtcgaagcgggggcggtgttcgccgagatcggcccgcgcatggccgagttgagcggttcccggctggccgcgcagcaacagatggaaggcctcctggcgccgcaccggcccaaggagcccgcgtggttcctggccaccgtcggcgtctcgcccgaccaccagggcaagggtctgggcagcgccgtcgtgctccccggagtggaggcggccgagcgcgccggggtgcccgccttcctggagacctccgcgccccgcaacctccccttctacgagcggctcggcttcaccgtcaccgccgacgtcgaggtgcccgaaggaccgcgcacctggtgcatgacccgcaagcccggtgcctga

SEQ ID NO: 32539 - DNA, 3183 bp, synthetic construct
  source 1..3183: mol_type = other DNA
atggccttaccagtgaccgccttgctcctgccgctggccttgctgctccacgccgccaggccggacatccagatgacacagagccctagcagcctgtctgccagcgtgggagacagagtgaccatcacatgcaaggccagcgaccacatcaacaactggctggcctggtatcagcagaagcctggacaggcccctaagctgctgatctacggcgctaccacactggaaacaggcgtgcccagcagattttctggcagcggctctggcaccgactacaccctgacaatatccagcctccagcctgaggacttcgccacctactactgtcagcagagctggaacaccccttggacattcggccagggcaccaagctggaaatcaagagactcgaggacctgaagaacgtgttcccacctgaggtggccgtgttcgagcctagcgaggccgagatcagccacacccagaaagccaccctcgtgtgcctggctaccggcttctaccccgaccatgtggaactgtcttggtgggtcaacggcaaagaggtgcacagcggcgtgtctaccgacccccagccactgaaagaacagcccgccctgaacgacagccggtactgcctgagcagcagactgagagtgtccgccaccttctggcagaacccccggaaccacttcagatgccaggtgcagttctacggcctgagcgagaacgacgagtggacccaggacagagccaagcccgtgacccagatcgtgtctgccgaagcctggggcagagccgattgcggatcccagagcttcggcctgctggaccccaagctgtgctacctgctggatggcatcctgttcatctacggcgtgatcctgaccgccctgttcctgagagtgaagttcagcagaagcgccgacgcccctgcctaccagcagggacagaaccaactgtacaacgagctgaacctgggcagacgggaagagtacgacgtgctggacaagcggagaggcagggaccctgagatgggcggaaagccccagcggagaaagaacccccaggaaggactgtataacgaactccagaaagacaagatggccgaagcctacagcgagatcggcatgaagggcgagcggagaagaggcaagggccacgatggcctgtaccagggcctgagcaccgccaccaaggacacctatgacgccctgcacatgcaggccctgcctccaagaagggccaagcgatctggatctggagcaacaaacttctcactactcaaacaagcaggtgacgtggaggagaatcccgggcctactagtatggactggatttggcgcatccttttccttgtcggcgctgctaccggcgcgcattccttcgaacaagttcagcttcaacagcctggcgctgagctggtcaaacctggcgcttctgtgaagatgagctgcaaagccagcggctacgccttcagcagctactggatcaactggatgaagcagaaacccggccagggactcgaatggatcggccaaatctatcccggcgacggcgacaccaactacaacggcaagttcaagggcagagccacactgaccgccgatacctctagcagcacagcctacatgcagctgagcagcctgaccagcgaagatagcgccgtgtacttctgtgcccggtccatcacaacagtcgtgggctgcgctatggactattggggccagggaacaagcgtgaccgtgtctagtacgcgtatccagaaccctgatcctgccgtgtaccagctgcgggatagcaagagcagcgacaagagcgtgtgtctgttcaccgacttcgacagccagaccaacgtgtcccagagcaaggactccgacgtgtacatcaccgataagaccgtgctggacatgcggagcatggacttcaagagcaactccgccgtggcctggtccaacaagtccgatttcgcctgcgccaacgccttcaacaacagcattatccccgaggacacattcttcccaagccccgagagcagctgcggtaccattacccaaggactggctgtgcctacaatctctagcttctttccgcctggataccaagtctccttctgtcttgtgatggtcctcctgtttgctgtggacacaggactgtacttttccgtgtctagaggaggcagcctcgagggaggaggcgtccaagtcgaaaccattagtcccggcgatggcagaacatttcctaaaaggggacaaacatgtgtcgtccattatacaggcatgttggaggacggcaaaaaggtggacagtagtagagatcgcaataaacctttcaaattcatgttgggaaaacaagaagtcattaggggatgggaggagggcgtggctcaaatgtccgtcggccaacgcgctaagctcaccatcagccccgactacgcatacggcgctaccggacatcccggaattattccccctcacgctaccttggtgtttgacgtcgaactgttgaagctcgggactagtagagcaaagcgaagtggtagcggagcaaccaacttttctctgctcaagcaagccggtgacgtggaagagaaccctggtcctcatatgaccgagtacaagcccacggtgcgcctcgccacccgcgacgacgtccccagggccgtacgcaccctcgccgccgcgttcgccgactaccccgccacgcgccacaccgtcgatccggaccgccacatcgagcgggtcaccgagctgcaagaactcttcctcacgcgcgtcgggctcgacatcggcaaggtgtgggtcgcggacgacggcgccgcggtggcggtctggaccacgccggagagcgtcgaagcgggggcggtgttcgccgagatcggcccgcgcatggccgagttgagcggttcccggctggccgcgcagcaacagatggaaggcctcctggcgccgcaccggcccaaggagcccgcgtggttcctggccaccgtcggcgtctcgcccgaccaccagggcaagggtctgggcagcgccgtcgtgctccccggagtggaggcggccgagcgcgccggggtgcccgccttcctggagacctccgcgccccgcaacctccccttctacgagcggctcggcttcaccgtcaccgccgacgtcgaggtgcccgaaggaccgcgcacctggtgcatgacccgcaagcccggtgcctga

SEQ ID NO: 32540 - DNA, 3075 bp, synthetic construct; identical to SEQ ID NO: 32320
  source 1..3075: mol_type = other DNA

SEQ ID NO: 32541 - DNA, 2988 bp, synthetic construct
  source 1..2988: mol_type = other DNA
atggccttaccagtgaccgccttgctcctgccgctggccttgctgctccacgccgccaggccggacatccagatgacacagagccctagcagcctgtctgccagcgtgggagacagagtgaccatcacatgcaaggccagcgaccacatcaacaactggctggcctggtatcagcagaagcctggacaggcccctaagctgctgatctacggcgctaccacactggaaacaggcgtgcccagcagattttctggcagcggctctggcaccgactacaccctgacaatatccagcctccagcctgaggacttcgccacctactactgtcagcagagctggaacaccccttggacattcggccagggcaccaagctggaaatcaagagactcgaggacctgaagaacgtgttcccacctgaggtggccgtgttcgagcctagcgaggccgagatcagccacacccagaaagccaccctcgtgtgcctggctaccggcttctaccccgaccatgtggaactgtcttggtgggtcaacggcaaagaggtgcacagcggcgtgtgtaccgacccccagccactgaaagaacagcccgccctgaacgacagccggtactgcctgagcagcagactgagagtgtccgccaccttctggcagaacccccggaaccacttcagatgccaggtgcagttctacggcctgagcgagaacgacgagtggacccaggacagagccaagcccgtgacccagatcgtgtctgccgaagcctggggcagagccgattgcggctttaccagcgagagctaccagcagggcgtgctgagcgccggatcccagagcttcggcctgctggaccccaagctgtgctacctgctggatggcatcctgttcatctacggcgtgatcctgaccgccctgttcctgagagtgaagttcagcagaagcgccgacgcccctgcctaccagcagggacagaaccaactgtacaacgagctgaacctgggcagacgggaagagtacgacgtgctggacaagcggagaggcagggaccctgagatgggcggaaagccccggagaaagaacccccaggaaggactgtataacgaactccagaaagacaagatggccgaagcctacagcgagatcggcatgaagggcgagcggagaagaggcaagggccacgatggcctgtaccagggcctgagcaccgccaccaaggacacctatgacgccctgcacatgcaggccctgcctccaagaagggccaagcgatctggatctggagcaacaaacttctcactactcaaacaagcaggtgacgtggaggagaatcccgggcctactagtatggactggatttggcgcatccttttccttgtcggcgctgctaccggcgcgcattccttcgaacaagttcagcttcaacagcctggcgctgagctggtcaaacctggcgcttctgtgaagatgagctgcaaagccagcggctacgccttcagcagctactggatcaactggatgaagcagaaacccggccagggactcgaatggatcggccaaatctatcccggcgacggcgacaccaactacaacggcaagttcaagggcagagccacactgaccgccgatacctctagcagcacagcctacatgcagctgagcagcctgaccagcgaagatagcgccgtgtacttctgtgcccggtccatcacaacagtcgtgggctgcgctatggactattggggccagggaacaagcgtgaccgtgtctagtacgcgtatccagaaccctgatcctgccgtgtaccagctgcgggatagcaagagcagcgacaagagcgtgtgtctgttcaccgacttcgacagccagaccaacgtgtcccagagcaaggactccgacgtgtacatcaccgataagtgcgtgctggacatgcggagcatggacttcaagagcaactccgccgtggcctggtccaacaagtccgatttcgcctgcgccaacgccttcaacaacagcattatccccgaggacacattcttcccaagccccgagagcagctgcgacgtgaagctggtggaaaagagcttcgagacagacggtaccatcactcaaggtttggcagtgtcaaccatctcatcattctttccacctggctaccaagtgtccttctgcctggtcatggtgctgctgttcgccgtggataccggcctgtacttcagcgtcaagaccaacatccggtccagcaccagagactggaaggaccacaagttcaagtggcggaaggaccctcaggacaagagggccaagcgatctggatctggagcaacaaacttctcactactcaaacaagcaggtgacgtggaggagaatcccgggccttctagaggccatatgaccgagtacaagcccacggtgcgcctcgccacccgcgacgacgtccccagggccgtacgcaccctcgccgccgcgttcgccgactaccccgccacgcgccacaccgtcgatccggaccgccacatcgagcgggtcaccgagctgcaagaactcttcctcacgcgcgtcgggctcgacatcggcaaggtgtgggtcgcggacgacggcgccgcggtggcggtctggaccacgccggagagcgtcgaagcgggggcggtgttcgccgagatcggcccgcgcatggccgagttgagcggttcccggctggccgcgcagcaacagatggaaggcctcctggcgccgcaccggcccaaggagcccgcgtggttcctggccaccgtcggcgtctcgcccgaccaccagggcaagggtctgggcagcgccgtcgtgctccccggagtggaggcggccgagcgcgccggggtgcccgccttcctggagacctccgcgccccgcaacctccccttctacgagcggctcggcttcaccgtcaccgccgacgtcgaggtgcccgaaggaccgcgcacctggtgcatgacccgcaagcccggtgcctga

SEQ ID NO: 32542 - DNA, 2298 bp, synthetic construct
  source 1..2298: mol_type = other DNA
atggccttaccagtgaccgccttgctcctgccgctggccttgctgctccacgccgccaggccggacatccagatgacacagagccctagcagcctgtctgccagcgtgggagacagagtgaccatcacatgcaaggccagcgaccacatcaacaactggctggcctggtatcagcagaagcctggacaggcccctaagctgctgatctacggcgctaccacactggaaacaggcgtgcccagcagattttctggcagcggctctggcaccgactacaccctgacaatatccagcctccagcctgaggacttcgccacctactactgtcagcagagctggaacaccccttggacattcggccagggcaccaagctggaaatcaagagactcgaggacctgaagaacgtgttcccacctgaggtggccgtgttcgagcctagcgaggccgagatcagccacacccagaaagccaccctcgtgtgcctggctaccggcttctaccccgaccatgtggaactgtcttggtgggtcaacggcaaagaggtgcacagcggcgtgtgtaccgacccccagccactgaaagaacagcccgccctgaacgacagccggtactgcctgagcagcagactgagagtgtccgccaccttctggcagaacccccggaaccacttcagatgccaggtgcagttctacggcctgagcgagaacgacgagtggacccaggacagagccaagcccgtgacccagatcgtgtctgccgaagcctggggcagagccgattgcggctttaccagcgagagctaccagcagggcgtgctgagcgccggatcccagagcttcggcctgctggaccccaagctgtgctacctgctggatggcatcctgttcatctacggcgtgatcctgaccgccctgttcctgagagtgaagttcagcagaagcgccgacgcccctgcctaccagcagggacagaaccaactgtacaacgagctgaacctgggcagacgggaagagtacgacgtgctggacaagcggagaggcagggaccctgagatgggcggaaagccccggagaaagaacccccaggaaggactgtataacgaactccagaaagacaagatggccgaagcctacagcgagatcggcatgaagggcgagcggagaagaggcaagggccacgatggcctgtaccagggcctgagcaccgccaccaaggacacctatgacgccctgcacatgcaggccctgcctccaagaagggccaagcgatctggatctggagcaacaaacttctcactactcaaacaagcaggtgacgtggaggagaatcccgggcctactagtatggactggatttggcgcatccttttccttgtcggcgctgctaccggcgcgcattccttcgaacaagttcagcttcaacagcctggcgctgagctggtcaaacctggcgcttctgtgaagatgagctgcaaagccagcggctacgccttcagcagctactggatcaactggatgaagcagaaacccggccagggactcgaatggatcggccaaatctatcccggcgacggcgacaccaactacaacggcaagttcaagggcagagccacactgaccgccgatacctctagcagcacagcctacatgcagctgagcagcctgaccagcgaagatagcgccgtgtacttctgtgcccggtccatcacaacagtcgtgggctgcgctatggactattggggccagggaacaagcgtgaccgtgtctagtacgcgtatccagaaccctgatcctgccgtgtaccagctgcgggatagcaagagcagcgacaagagcgtgtgtctgttcaccgacttcgacagccagaccaacgtgtcccagagcaaggactccgacgtgtacatcaccgataagtgcgtgctggacatgcggagcatggacttcaagagcaactccgccgtggcctggtccaacaagtccgatttcgcctgcgccaacgccttcaacaacagcattatccccgaggacacattcttcccaagccccgagagcagctgcgacgtgaagctggtggaaaagagcttcgagacagacggtaccatcactcaaggtttggcagtgtcaaccatctcatcattctttccacctggctaccaagtgtccttctgcctggtcatggtgctgctgttcgccgtggataccggcctgtacttcagcgtcaagaccaacatccggtccagcaccagagactggaaggaccacaagttcaagtggcggaaggaccctcaggacaagtaa

SEQ ID NO: 32543 - DNA, 2223 bp, synthetic construct
  source 1..2223: mol_type = other DNA
atggccttaccagtgaccgccttgctcctgccgctggccttgctgctccacgccgccaggccggacatccagatgacacagagccctagcagcctgtctgccagcgtgggagacagagtgaccatcacatgcaaggccagcgaccacatcaacaactggctggcctggtatcagcagaagcctggacaggcccctaagctgctgatctacggcgctaccacactggaaacaggcgtgcccagcagattttctggcagcggctctggcaccgactacaccctgacaatatccagcctccagcctgaggacttcgccacctactactgtcagcagagctggaacaccccttggacattcggccagggcaccaagctggaaatcaagagactcgaggacctgaagaacgtgttcccacctgaggtggccgtgttcgagcctagcgaggccgagatcagccacacccagaaagccaccctcgtgtgcctggctaccggcttctaccccgaccatgtggaactgtcttggtgggtcaacggcaaagaggtgcacagcggcgtgtgtaccgacccccagccactgaaagaacagcccgccctgaacgacagccggtactgcctgagcagcagactgagagtgtccgccaccttctggcagaacccccggaaccacttcagatgccaggtgcagttctacggcctgagcgagaacgacgagtggacccaggacagagccaagcccgtgacccagatcgtgtctgccgaagcctggggcagagccgattgcggctttaccagcgagagctaccagcagggcgtgctgagcgccggatcccagagcttcggcctgctggaccccaagctgtgctacctgctggatggcatcctgttcatctacggcgtgatcctgaccgccctgttcctgagagtgaagttcagcagaagcgccgacgcccctgcctaccagcagggacagaaccaactgtacaacgagctgaacctgggcagacgggaagagtacgacgtgctggacaagcggagaggcagggaccctgagatgggcggaaagccccggagaaagaacccccaggaaggactgtataacgaactccagaaagacaagatggccgaagcctacagcgagatcggcatgaagggcgagcggagaagaggcaagggccacgatggcctgtaccagggcctgagcaccgccaccaaggacacctatgacgccctgcacatgcaggccctgcctccaagaagggccaagcgatctggatctggagcaacaaacttctcactactcaaacaagcaggtgacgtggaggagaatcccgggcctactagtatggactggatttggcgcatccttttccttgtcggcgctgctaccggcgcgcattccttcgaacaagttcagcttcaacagcctggcgctgagctggtcaaacctggcgcttctgtgaagatgagctgcaaagccagcggctacgccttcagcagctactggatcaactggatgaagcagaaacccggccagggactcgaatggatcggccaaatctatcccggcgacggcgacaccaactacaacggcaagttcaagggcagagccacactgaccgccgatacctctagcagcacagcctacatgcagctgagcagcctgaccagcgaagatagcgccgtgtacttctgtgcccggtccatcacaacagtcgtgggctgcgctatggactattggggccagggaacaagcgtgaccgtgtctagtacgcgtatccagaaccctgatcctgccgtgtaccagctgcgggatagcaagagcagcgacaagagcgtgtgtctgttcaccgacttcgacagccagaccaacgtgtcccagagcaaggactccgacgtgtacatcaccgataagtgcgtgctggacatgcggagcatggacttcaagagcaactccgccgtggcctggtccaacaagtccgatttcgcctgcgccaacgccttcaacaacagcattatccccgaggacacattcttcccaagccccgagagcagctgcgacgtgaagctggtggaaaagagcttcgagacagacggtaccattacccaaggactggctgtgcctacaatctctagcttctttccgcctggataccaagtctccttctgtcttgtgatggtcctcctgtttgctgtggacacaggactgtacttttccgtgtaa

SEQ ID NO: 32544 - DNA, 3153 bp, synthetic construct
  source 1..3153: mol_type = other DNA
atggccttaccagtgaccgccttgctcctgccgctggccttgctgctccacgccgccaggccggacatccagatgacacagagccctagcagcctgtctgccagcgtgggagacagagtgaccatcacatgcaaggccagcgaccacatcaacaactggctggcctggtatcagcagaagcctggacaggcccctaagctgctgatctacggcgctaccacactggaaacaggcgtgcccagcagattttctggcagcggctctggcaccgactacaccctgacaatatccagcctccagcctgaggacttcgccacctactactgtcagcagagctggaacaccccttggacattcggccagggcaccaagctggaaatcaagagactcgaggacctgaagaacgtgttcccacctgaggtggccgtgttcgagcctagcgaggccgagatcagccacacccagaaagccaccctcgtgtgcctggctaccggcttctaccccgaccatgtggaactgtcttggtgggtcaacggcaaagaggtgcacagcggcgtgtgtaccgacccccagccactgaaagaacagcccgccctgaacgacagccggtactgcctgagcagcagactgagagtgtccgccaccttctggcagaacccccggaaccacttcagatgccaggtgcagttctacggcctgagcgagaacgacgagtggacccaggacagagccaagcccgtgacccagatcgtgtctgccgaagcctggggcagagccgattgcggctttaccagcgagagctaccagcagggcgtgctgagcgccggatcccagagcttcggcctgctggaccccaagctgtgctacctgctggatggcatcctgttcatctacggcgtgatcctgaccgccctgttcctgagagtgaagttcagcagaagcgccgacgcccctgcctaccagcagggacagaaccaactgtacaacgagctgaacctgggcagacgggaagagtacgacgtgctggacaagcggagaggcagggaccctgagatgggcggaaagccccggagaaagaacccccaggaaggactgtataacgaactccagaaagacaagatggccgaagcctacagcgagatcggcatgaagggcgagcggagaagaggcaagggccacgatggcctgtaccagggcctgagcaccgccaccaaggacacctatgacgccctgcacatgcaggccctgcctccaagaagggccaagcgatctggatctggagcaacaaacttctcactactcaaacaagcaggtgacgtggaggagaatcccgggcctactagtatggactggatttggcgcatccttttccttgtcggcgctgctaccggcgcgcattccttcgaacaagttcagcttcaacagcctggcgctgagctggtcaaacctggcgcttctgtgaagatgagctgcaaagccagcggctacgccttcagcagctactggatcaactggatgaagcagaaacccggccagggactcgaatggatcggccaaatctatcccggcgacggcgacaccaactacaacggcaagttcaagggcagagccacactgaccgccgatacctctagcagcacagcctacatgcagctgagcagcctgaccagcgaagatagcgccgtgtacttctgtgcccggtccatcacaacagtcgtgggctgcgctatggactattggggccagggaacaagcgtgaccgtgtctagtacgcgtatccagaaccctgatcctgccgtgtaccagctgcgggatagcaagagcagcgacaagagcgtgtgtctgttcaccgacttcgacagccagaccaacgtgtcccagagcaaggactccgacgtgtacatcaccgataagtgcgtgctggacatgcggagcatggacttcaagagcaactccgccgtggcctggtccaacaagtccgatttcgcctgcgccaacgccttcaacaacagcattatccccgaggacacattcttcccaagccccgagagcagctgcgacgtgaagctggtggaaaagagcttcgagacagacggtaccatcactcaaggtttggcagtgtcaaccatctcatcattctttccacctggctaccaagtgtccttctgcctggtcatggtgctgctgttcgccgtggataccggcctgtacttcagcgtcaagaccaacatccggtccagcaccagagactggaaggaccacaagttcaagtggcggaaggaccctcaggacaagagggccaagcgatctggatctggagcaacaaacttctcactactcaaacaagcaggtgacgtggaggagaatcccgggccttctagaatggaatacgcctctgacgcttcactggaccccgaagccccgtggcctcccgcgccccgcgctcgcgcctgccgcgtactgccttgggccctggtcgcggggctgctgctgctgctgctgctcgctgccgcctgcgccgtcttcctcgcctgcccctgggccgtgtccggggctcgcgcctcgcccggctccgcggccagcccgagactccgcgagggtcccgagctttcgcccgacgatcccgccggcctcttggacctgcggcagggcatgtttgcgcagctggtggcccaaaatgttctgctgatcgatgggcccctgagctggtacagtgacccaggcctggcaggcgtgtccctgacggggggcctgagctacaaagaggacacgaaggagctggtggtggccaaggctggagtctactatgtcttctttcaactagagctgcggcgcgtggtggccggcgagggctcaggctccgtttcacttgcgctgcacctgcagccactgcgctctgctgctggggccgccgccctggctttgaccgtggacctgccacccgcctcctccgaggctcggaactcggccttcggtttccagggccgcttgctgcacctgagtgccggccagcgcctgggcgtccatcttcacactgaggccagggcacgccatgcctggcagcttacccagggcgccacagtcttgggactcttccgggtgacccccgaaatcccagccggactcccttcaccgaggtcggaacatatgtga

SEQ ID NO: 32545 - DNA, 2964 bp, synthetic construct
  source 1..2964: mol_type = other DNA
atggccttaccagtgaccgccttgctcctgccgctggccttgctgctccacgccgccaggccggacatccagatgacacagagccctagcagcctgtctgccagcgtgggagacagagtgaccatcacatgcaaggccagcgaccacatcaacaactggctggcctggtatcagcagaagcctggacaggcccctaagctgctgatctacggcgctaccacactggaaacaggcgtgcccagcagattttctggcagcggctctggcaccgactacaccctgacaatatccagcctccagcctgaggacttcgccacctactactgtcagcagagctggaacaccccttggacattcggccagggcaccaagctggaaatcaagagactcgaggccgacgtgtcccccaagcctaccatcttcctgccctctatcgccgagacaaagctccagaaggccggcacctacctgtgcctgctggaaaagttcttcccagatgtgattaagatccactggcaggaaaagaagtccaacaccatcctgggcagccaggaaggcaacaccatgaagaccaacgacacctacatgaagttcagctggctgaccgtgcccgagaagtccctggacaaagaacacagatgcatcgtgcggcacgaaaacaacaagaacggcgtggaccaggaaatcatcttcccacccatcaagaccgatgtgattacaatggaccccaaggacggatcccagagcttcggcctgctggaccccaagctgtgctacctgctggatggcatcctgttcatctacggcgtgatcctgaccgccctgttcctgagagtgaagttcagcagaagcgccgacgcccctgcctaccagcagggacagaaccaactgtacaacgagctgaacctgggcagacgggaagagtacgacgtgctggacaagcggagaggcagggaccctgagatgggcggaaagccccggagaaagaacccccaggaaggactgtataacgaactccagaaagacaagatggccgaagcctacagcgagatcggcatgaagggcgagcggagaagaggcaagggccacgatggcctgtaccagggcctgagcaccgccaccaaggacacctatgacgccctgcacatgcaggccctgcctccaagaagggccaagcgatctggatctggagcaacaaacttctcactactcaaacaagcaggtgacgtggaggagaatcccgggcctactagtatggactggatttggcgcatccttttccttgtcggcgctgctaccggcgcgcattccttcgaacaagttcagcttcaacagcctggcgctgagctggtcaaacctggcgcttctgtgaagatgagctgcaaagccagcggctacgccttcagcagctactggatcaactggatgaagcagaaacccggccagggactcgaatggatcggccaaatctatcccggcgacggcgacaccaactacaacggcaagttcaagggcagagccacactgaccgccgatacctctagcagcacagcctacatgcagctgagcagcctgaccagcgaagatagcgccgtgtacttctgtgcccggtccatcacaacagtcgtgggctgcgctatggactattggggccagggaacaagcgtgaccgtgtctagtacgcgtcctcacaccaagcccagcgtgttcgtgatgaagaacggcaccaacgtggcctgcctcgtgaaagagttctaccccaaggacatcaggatcaacctggtgtccagcaagaagatcaccgagttcgaccccgccatcgtgatctcccccagcggcaagtacaacgccgtgaagctggggaagtacgaggacagcaacagcgtgacctgctccgtgcagcacgacaacaagaccgtgcacagcaccgactttggtaccatcactcaaggtttggcagtgtcaaccatctcatcattctttccacctggctaccaagtgtccttctgcctggtcatggtgctgctgttcgccgtggataccggcctgtacttcagcgtcaagaccaacatccggtccagcaccagagactggaaggaccacaagttcaagtggcggaaggaccctcaggacaagaagagaggccggaagaagctgctgtacatcttcaagcagcctttcatgcggcccgtgcagaccacccaggaagaggacggctgctcctgccggttccccgaggaagaagaaggcggctgcgagctgcgcgccaagagaagcggatctggcgtgaagcagaccctgaatttcgacctgctgaagctggctggcgacgtggaatccaacccaggcccttctagaggccatatgaccgagtacaagcccacggtgcgcctcgccacccgcgacgacgtccccagggccgtacgcaccctcgccgccgcgttcgccgactaccccgccacgcgccacaccgtcgatccggaccgccacatcgagcgggtcaccgagctgcaagaactcttcctcacgcgcgtcgggctcgacatcggcaaggtgtgggtcgcggacgacggcgccgcggtggcggtctggaccacgccggagagcgtcgaagcgggggcggtgttcgccgagatcggcccgcgcatggccgagttgagcggttcccggctggccgcgcagcaacagatggaaggcctcctggcgccgcaccggcccaaggagcccgcgtggttcctggccaccgtcggcgtctcgcccgaccaccagggcaagggtctgggcagcgccgtcgtgctccccggagtggaggcggccgagcgcgccggggtgcccgccttcctggagacctccgcgccccgcaacctccccttctacgagcggctcggcttcaccgtcaccgccgacgtcgaggtgcccgaaggaccgcgcacctggtgcatgacccgcaagcccggtgcctga

SEQ ID NO: 32546 - DNA, 2994 bp, synthetic construct
  source 1..2994: mol_type = other DNA
atggccttaccagtgaccgccttgctcctgccgctggccttgctgctccacgccgccaggccggacatccagatgacacagagccctagcagcctgtctgccagcgtgggagacagagtgaccatcacatgcaaggccagcgaccacatcaacaactggctggcctggtatcagcagaagcctggacaggcccctaagctgctgatctacggcgctaccacactggaaacaggcgtgcccagcagattttctggcagcggctctggcaccgactacaccctgacaatatccagcctccagcctgaggacttcgccacctactactgtcagcagagctggaacaccccttggacattcggccagggcaccaagctggaaatcaagagactcgaggccgacgtgtcccccaagcctaccatcttcctgccctctatcgccgagacaaagctccagaaggccggcacctacctgtgcctgctggaaaagttcttcccagatgtgattaagatccactggcaggaaaagaagtccaacaccatcctgggcagccaggaaggcaacaccatgaagaccaacgacacctacatgaagttcagctggctgaccgtgcccgagaagtccctggacaaagaacacagatgcatcgtgcggcacgaaaacaacaagaacggcgtggaccaggaaatcatcttcccacccatcaagaccgatgtgattacaatggaccccaaggacggatcccagagcttcggcctgctggaccccaagctgtgctacctgctggatggcatcctgttcatctacggcgtgatcctgaccgccctgttcctgagagtgaagttcagcagaagcgccgacgcccctgcctaccagcagggacagaaccaactgtacaacgagctgaacctgggcagacgggaagagtacgacgtgctggacaagcggagaggcagggaccctgagatgggcggaaagccccggagaaagaacccccaggaaggactgtataacgaactccagaaagacaagatggccgaagcctacagcgagatcggcatgaagggcgagcggagaagaggcaagggccacgatggcctgtaccagggcctgagcaccgccaccaaggacacctatgacgccctgcacatgcaggccctgcctccaagaagggccaagcgatctggatctggagcaacaaacttctcactactcaaacaagcaggtgacgtggaggagaatcccgggcctactagtatggactggatttggcgcatccttttccttgtcggcgctgctaccggcgcgcattccttcgaacaagttcagcttcaacagcctggcgctgagctggtcaaacctggcgcttctgtgaagatgagctgcaaagccagcggctacgccttcagcagctactggatcaactggatgaagcagaaacccggccagggactcgaatggatcggccaaatctatcccggcgacggcgacaccaactacaacggcaagttcaagggcagagccacactgaccgccgatacctctagcagcacagcctacatgcagctgagcagcctgaccagcgaagatagcgccgtgtacttctgtgcccggtccatcacaacagtcgtgggctgcgctatggactattggggccagggaacaagcgtgaccgtgtctagtacgcgtcctcacaccaagcccagcgtgttcgtgatgaagaacggcaccaacgtggcctgcctcgtgaaagagttctaccccaaggacatcaggatcaacctggtgtccagcaagaagatcaccgagttcgaccccgccatcgtgatctcccccagcggcaagtacaacgccgtgaagctggggaagtacgaggacagcaacagcgtgacctgctccgtgcagcacgacaacaagaccgtgcacagcaccgactttggtaccatcactcaaggtttggcagtgtcaaccatctcatcattctttccacctggctaccaagtgtccttctgcctggtcatggtgctgctgttcgccgtggataccggcctgtacttcagcgtcaagaccaacatccggtccagcaccagagactggaaggaccacaagttcaagtggcggaaggaccctcaggacaagagggccaagcgatctggatctggagcaacaaacttctcactactcaaacaagcaggtgacgtggaggagaatcccgggccttctagaatggaatacgcctctgacgcttcactggaccccgaagccccgtggcctcccgcgccccgcgctcgcgcctgccgcgtactgccttgggccctggtcgcggggctgctgctgctgctgctgctcgctgccgcctgcgccgtcttcctcgcctgcccctgggccgtgtccggggctcgcgcctcgcccggctccgcggccagcccgagactccgcgagggtcccgagctttcgcccgacgatcccgccggcctcttggacctgcggcagggcatgtttgcgcagctggtggcccaaaatgttctgctgatcgatgggcccctgagctggtacagtgacccaggcctggcaggcgtgtccctgacggggggcctgagctacaaagaggacacgaaggagctggtggtggccaaggctggagtctactatgtcttctttcaactagagctgcggcgcgtggtggccggcgagggctcaggctccgtttcacttgcgctgcacctgcagccactgcgctctgctgctggggccgccgccctggctttgaccgtggacctgccacccgcctcctccgaggctcggaactcggccttcggtttccagggccgcttgctgcacctgagtgccggccagcgcctgggcgtccatcttcacactgaggccagggcacgccatgcctggcagcttacccagggcgccacagtcttgggactcttccgggtgacccccgaaatcccagccggactcccttcaccgaggtcggaacatatgtga

SEQ ID NO: 32547 - DNA, 3198 bp, synthetic construct
  source 1..3198: mol_type = other DNA
atggccttaccagtgaccgccttgctcctgccgctggccttgctgctccacgccgccaggccggacatccagatgacacagagccctagcagcctgtctgccagcgtgggagacagagtgaccatcacatgcaaggccagcgaccacatcaacaactggctggcctggtatcagcagaagcctggacaggcccctaagctgctgatctacggcgctaccacactggaaacaggcgtgcccagcagattttctggcagcggctctggcaccgactacaccctgacaatatccagcctccagcctgaggacttcgccacctactactgtcagcagagctggaacaccccttggacattcggccagggcaccaagctggaaatcaagagactcgaggccgacgtgtcccccaagcctaccatcttcctgccctctatcgccgagacaaagctccagaaggccggcacctacctgtgcctgctggaaaagttcttcccagatgtgattaagatccactggcaggaaaagaagtccaacaccatcctgggcagccaggaaggcaacaccatgaagaccaacgacacctacatgaagttcagctggctgaccgtgcccgagaagtccctggacaaagaacacagatgcatcgtgcggcacgaaaacaacaagaacggcgtggaccaggaaatcatcttcccacccatcaagaccgatgtgattacaatggaccccaaggacggatcccagagcttcggcctgctggaccccaagctgtgctacctgctggatggcatcctgttcatctacggcgtgatcctgaccgccctgttcctgagagtgaagttcagcagaagcgccgacgcccctgcctaccagcagggacagaaccaactgtacaacgagctgaacctgggcagacgggaagagtacgacgtgctggacaagcggagaggcagggaccctgagatgggcggaaagccccggagaaagaacccccaggaaggactgtataacgaactccagaaagacaagatggccgaagcctacagcgagatcggcatgaagggcgagcggagaagaggcaagggccacgatggcctgtaccagggcctgagcaccgccaccaaggacacctatgacgccctgcacatgcaggccctgcctccaagaagggccaagcgatctggatctggagcaacaaacttctcactactcaaacaagcaggtgacgtggaggagaatcccgggcctactagtatggactggatttggcgcatccttttccttgtcggcgctgctaccggcgcgcattccttcgaacaagttcagcttcaacagcctggcgctgagctggtcaaacctggcgcttctgtgaagatgagctgcaaagccagcggctacgccttcagcagctactggatcaactggatgaagcagaaacccggccagggactcgaatggatcggccaaatctatcccggcgacggcgacaccaactacaacggcaagttcaagggcagagccacactgaccgccgatacctctagcagcacagcctacatgcagctgagcagcctgaccagcgaagatagcgccgtgtacttctgtgcccggtccatcacaacagtcgtgggctgcgctatggactattggggccagggaacaagcgtgaccgtgtctagtacgcgtcctcacaccaagcccagcgtgttcgtgatgaagaacggcaccaacgtggcctgcctcgtgaaagagttctaccccaaggacatcaggatcaacctggtgtccagcaagaagatcaccgagttcgaccccgccatcgtgatctcccccagcggcaagtacaacgccgtgaagctggggaagtacgaggacagcaacagcgtgacctgctccgtgcagcacgacaacaagaccgtgcacagcaccgactttggtaccatcactcaaggtttggcagtgtcaaccatctcatcattctttccacctggctaccaagtgtccttctgcctggtcatggtgctgctgttcgccgtggataccggcctgtacttcagcgtcaagaccaacatccggtccagcaccagagactggaaggaccacaagttcaagtggcggaaggaccctcaggacaagtggcgacgcaagcgcaaagaaaagcaaagcgagacaagcccaaaagaatttctcactatatacgaggacgtgaaagatttgaagacgaggcggaatcatgagcaagagcagacatttcctggcgggggctctactatctactcaatgattcaatcccaaagctccgctccgacttcccaagagcccgcttacactctctactcactgatacagccttcaagaaaatcaggctctcggaaacggaatcattccccatccttcaatagtaccatctatgaagtaatcggtaagagtcaacctaaagctcaaaaccccgctcgcttgagccgcaaggagctggaaaacttcgatgtatatagccgcgccaagagaagcggatctggcgtgaagcagaccctgaatttcgacctgctgaagctggctggcgacgtggaatccaacccaggcccttctagaggccatatgaccgagtacaagcccacggtgcgcctcgccacccgcgacgacgtccccagggccgtacgcaccctcgccgccgcgttcgccgactaccccgccacgcgccacaccgtcgatccggaccgccacatcgagcgggtcaccgagctgcaagaactcttcctcacgcgcgtcgggctcgacatcggcaaggtgtgggtcgcggacgacggcgccgcggtggcggtctggaccacgccggagagcgtcgaagcgggggcggtgttcgccgagatcggcccgcgcatggccgagttgagcggttcccggctggccgcgcagcaacagatggaaggcctcctggcgccgcaccggcccaaggagcccgcgtggttcctggccaccgtcggcgtctcgcccgaccaccagggcaagggtctgggcagcgccgtcgtgctccccggagtggaggcggccgagcgcgccggggtgcccgccttcctggagacctccgcgccccgcaacctccccttctacgagcggctcggcttcaccgtcaccgccgacgtcgaggtgcccgaaggaccgcgcacctggtgcatgacccgcaagcccggtgcctga

SEQ ID NO: 32548 - DNA, 3357 bp, synthetic construct
  source 1..3357: mol_type = other DNA
atggccttaccagtgaccgccttgctcctgccgctggccttgctgctccacgccgccaggccggacatccagatgacacagagccctagcagcctgtctgccagcgtgggagacagagtgaccatcacatgcaaggccagcgaccacatcaacaactggctggcctggtatcagcagaagcctggacaggcccctaagctgctgatctacggcgctaccacactggaaacaggcgtgcccagcagattttctggcagcggctctggcaccgactacaccctgacaatatccagcctccagcctgaggacttcgccacctactactgtcagcagagctggaacaccccttggacattcggccagggcaccaagctggaaatcaagagactcgaggacctgaagaacgtgttcccacctgaggtggccgtgttcgagcctagcgaggccgagatcagccacacccagaaagccaccctcgtgtgcctggctaccggcttctaccccgaccatgtggaactgtcttggtgggtcaacggcaaagaggtgcacagcggcgtgtgtaccgacccccagccactgaaagaacagcccgccctgaacgacagccggtactgcctgagcagcagactgagagtgtccgccaccttctggcagaacccccggaaccacttcagatgccaggtgcagttctacggcctgagcgagaacgacgagtggacccaggacagagccaagcccgtgacccagatcgtgtctgccgaagcctggggcagagccgattgcggctttaccagcgagagctaccagcagggcgtgctgagcgccggatcccagagcttcggcctgctggaccccaagctgtgctacctgctggatggcatcctgttcatctacggcgtgatcctgaccgccctgttcctgagagtgaagttcagcagaagcgccgacgcccctgcctaccagcagggacagaaccaactgtacaacgagctgaacctgggcagacgggaagagtacgacgtgctggacaagcggagaggcagggaccctgagatgggcggaaagccccggagaaagaacccccaggaaggactgtataacgaactccagaaagacaagatggccgaagcctacagcgagatcggcatgaagggcgagcggagaagaggcaagggccacgatggcctgtaccagggcctgagcaccgccaccaaggacacctatgacgccctgcacatgcaggccctgcctccaagaagggccaagcgatctggatctggagcaacaaacttctcactactcaaacaagcaggtgacgtggaggagaatcccgggcctactagtatggactggatttggcgcatccttttccttgtcggcgctgctaccggcgcgcattccttcgaacaagttcagcttcaacagcctggcgctgagctggtcaaacctggcgcttctgtgaagatgagctgcaaagccagcggctacgccttcagcagctactggatcaactggatgaagcagaaacccggccagggactcgaatggatcggccaaatctatcccggcgacggcgacaccaactacaacggcaagttcaagggcagagccacactgaccgccgatacctctagcagcacagcctacatgcagctgagcagcctgaccagcgaagatagcgccgtgtacttctgtgcccggtccatcacaacagtcgtgggctgcgctatggactattggggccagggaacaagcgtgaccgtgtctagtacgcgtatccagaaccctgatcctgccgtgtaccagctgcgggatagcaagagcagcgacaagagcgtgtgtctgttcaccgacttcgacagccagaccaacgtgtcccagagcaaggactccgacgtgtacatcaccgataagtgcgtgctggacatgcggagcatggacttcaagagcaactccgccgtggcctggtccaacaagtccgatttcgcctgcgccaacgccttcaacaacagcattatccccgaggacacattcttcccaagccccgagagcagctgcgacgtgaagctggtggaaaagagcttcgagacagacggtaccatcactcaaggtttggcagtgtcaaccatctcatcattctttccacctggctaccaagtgtccttctgcctggtcatggtgctgctgttcgccgtggataccggcctgtacttcagcgtcaagaccaacatccggtccagcaccagagactggaaggaccacaagttcaagtggcggaaggaccctcaggacaagtggcgacgcaagcgcaaagaaaagcaaagcgagacaagcccaaaagaatttctcactatatacgaggacgtgaaagatttgaagacgaggcggaatcatgagcaagagcagacatttcctggcgggggctctactatctactcaatgattcaatcccaaagctccgctccgacttcccaagagcccgcttacactctctactcactgatacagccttcaagaaaatcaggctctcggaaacggaatcattccccatccttcaatagtaccatctatgaagtaatcggtaagagtcaacctaaagctcaaaaccccgctcgcttgagccgcaaggagctggaaaacttcgatgtatatagccgcgccaagagaagcggatctggcgtgaagcagaccctgaatttcgacctgctgaagctggctggcgacgtggaatccaacccaggcccttctagaggccatatgaccgagtacaagcccacggtgcgcctcgccacccgcgacgacgtccccagggccgtacgcaccctcgccgccgcgttcgccgactaccccgccacgcgccacaccgtcgatccggaccgccacatcgagcgggtcaccgagctgcaagaactcttcctcacgcgcgtcgggctcgacatcggcaaggtgtgggtcgcggacgacggcgccgcggtggcggtctggaccacgccggagagcgtcgaagcgggggcggtgttcgccgagatcggcccgcgcatggccgagttgagcggttcccggctggccgcgcagcaacagatggaaggcctcctggcgccgcaccggcccaaggagcccgcgtggttcctggccaccgtcggcgtctcgcccgaccaccagggcaagggtctgggcagcgccgtcgtgctccccggagtggaggcggccgagcgcgccggggtgcccgccttcctggagacctccgcgccccgcaacctccccttctacgagcggctcggcttcaccgtcaccgccgacgtcgaggtgcccgaaggaccgcgcacctggtgcatgacccgcaagcccggtgcctga

SEQ ID NO: 32549 - DNA, 2829 bp, synthetic construct
  source 1..2829: mol_type = other DNA
atggccttaccagtgaccgccttgctcctgccgctggccttgctgctccacgccgccaggccggacatccagatgacacagagccctagcagcctgtctgccagcgtgggagacagagtgaccatcacatgcaaggccagcgaccacatcaacaactggctggcctggtatcagcagaagcctggacaggcccctaagctgctgatctacggcgctaccacactggaaacaggcgtgcccagcagattttctggcagcggctctggcaccgactacaccctgacaatatccagcctccagcctgaggacttcgccacctactactgtcagcagagctggaacaccccttggacattcggccagggcaccaagctggaaatcaagagactcgaggccgacgtgtcccccaagcctaccatcttcctgccctctatcgccgagacaaagctccagaaggccggcacctacctgtgcctgctggaaaagttcttcccagatgtgattaagatccactggcaggaaaagaagtccaacaccatcctgggcagccaggaaggcaacaccatgaagaccaacgacacctacatgaagttcagctggctgaccgtgcccgagaagtccctggacaaagaacacagatgcatcgtgcggcacgaaaacaacaagaacggcgtggaccaggaaatcatcttcccacccatcaagaccgatgtgattacaatggaccccaaggacggatcccagagcttcggcctgctggaccccaagctgtgctacctgctggatggcatcctgttcatctacggcgtgatcctgaccgccctgttcctgagagtgaagttcagcagaagcgccgacgcccctgcctaccagcagggacagaaccaactgtacaacgagctgaacctgggcagacgggaagagtacgacgtgctggacaagcggagaggcagggaccctgagatgggcggaaagccccggagaaagaacccccaggaaggactgtataacgaactccagaaagacaagatggccgaagcctacagcgagatcggcatgaagggcgagcggagaagaggcaagggccacgatggcctgtaccagggcctgagcaccgccaccaaggacacctatgacgccctgcacatgcaggccctgcctccaagaagggccaagcgatctggatctggagcaacaaacttctcactactcaaacaagcaggtgacgtggaggagaatcccgggcctactagtatggactggatttggcgcatccttttccttgtcggcgctgctaccggcgcgcattccttcgaacaagttcagcttcaacagcctggcgctgagctggtcaaacctggcgcttctgtgaagatgagctgcaaagccagcggctacgccttcagcagctactggatcaactggatgaagcagaaacccggccagggactcgaatggatcggccaaatctatcccggcgacggcgacaccaactacaacggcaagttcaagggcagagccacactgaccgccgatacctctagcagcacagcctacatgcagctgagcagcctgaccagcgaagatagcgccgtgtacttctgtgcccggtccatcacaacagtcgtgggctgcgctatggactattggggccagggaacaagcgtgaccgtgtctagtacgcgtcctcacaccaagcccagcgtgttcgtgatgaagaacggcaccaacgtggcctgcctcgtgaaagagttctaccccaaggacatcaggatcaacctggtgtccagcaagaagatcaccgagttcgaccccgccatcgtgatctcccccagcggcaagtacaacgccgtgaagctggggaagtacgaggacagcaacagcgtgacctgctccgtgcagcacgacaacaagaccgtgcacagcaccgactttggtaccatcactcaaggtttggcagtgtcaaccatctcatcattctttccacctggctaccaagtgtccttctgcctggtcatggtgctgctgttcgccgtggataccggcctgtacttcagcgtcaagaccaacatccggtccagcaccagagactggaaggaccacaagttcaagtggcggaaggaccctcaggacaagagggccaagcgatctggatctggagcaacaaacttctcactactcaaacaagcaggtgacgtggaggagaatcccgggccttctagaggccatatgaccgagtacaagcccacggtgcgcctcgccacccgcgacgacgtccccagggccgtacgcaccctcgccgccgcgttcgccgactaccccgccacgcgccacaccgtcgatccggaccgccacatcgagcgggtcaccgagctgcaagaactcttcctcacgcgcgtcgggctcgacatcggcaaggtgtgggtcgcggacgacggcgccgcggtggcggtctggaccacgccggagagcgtcgaagcgggggcggtgttcgccgagatcggcccgcgcatggccgagttgagcggttcccggctggccgcgcagcaacagatggaaggcctcctggcgccgcaccggcccaaggagcccgcgtggttcctggccaccgtcggcgtctcgcccgaccaccagggcaagggtctgggcagcgccgtcgtgctccccggagtggaggcggccgagcgcgccggggtgcccgccttcctggagacctccgcgccccgcaacctccccttctacgagcggctcggcttcaccgtcaccgccgacgtcgaggtgcccgaaggaccgcgcacctggtgcatgacccgcaagcccggtgcctga

SEQ ID NO: 32550 - DNA, 2145 bp, synthetic construct
  source 1..2145: mol_type = other DNA
atggccttaccagtgaccgccttgctcctgccgctggccttgctgctccacgccgccaggccggacatccagatgacacagagccctagcagcctgtctgccagcgtgggagacagagtgaccatcacatgcaaggccagcgaccacatcaacaactggctggcctggtatcagcagaagcctggacaggcccctaagctgctgatctacggcgctaccacactggaaacaggcgtgcccagcagattttctggcagcggctctggcaccgactacaccctgacaatatccagcctccagcctgaggacttcgccacctactactgtcagcagagctggaacaccccttggacattcggccagggcaccaagctggaaatcaagagactcgaggacctgaagaacgtgttcccacctgaggtggccgtgttcgagcctagcgaggccgagatcagccacacccagaaagccaccctcgtgtgcctggctaccggcttctaccccgaccatgtggaactgtcttggtgggtcaacggcaaagaggtgcacagcggcgtgtctaccgacccccagccactgaaagaacagcccgccctgaacgacagccggtactgcctgagcagcagactgagagtgtccgccaccttctggcagaacccccggaaccacttcagatgccaggtgcagttctacggcctgagcgagaacgacgagtggacccaggacagagccaagcccgtgacccagatcgtgtctgccgaagcctggggcagagccgattgcggatcccagagcttcggcctgctggaccccaagctgtgctacctgctggatggcatcctgttcatctacggcgtgatcctgaccgccctgttcctgagagtgaagttcagcagaagcgccgacgcccctgcctaccagcagggacagaaccaactgtacaacgagctgaacctgggcagacgggaagagtacgacgtgctggacaagcggagaggcagggaccctgagatgggcggaaagccccggagaaagaacccccaggaaggactgtataacgaactccagaaagacaagatggccgaagcctacagcgagatcggcatgaagggcgagcggagaagaggcaagggccacgatggcctgtaccagggcctgagcaccgccaccaaggacacctatgacgccctgcacatgcaggccctgcctccaagaagggccaagcgatctggatctggagcaacaaacttctcactactcaaacaagcaggtgacgtggaggagaatcccgggcctactagtatggactggatttggcgcatccttttccttgtcggcgctgctaccggcgcgcattccttcgaacaagttcagcttcaacagcctggcgctgagctggtcaaacctggcgcttctgtgaagatgagctgcaaagccagcggctacgccttcagcagctactggatcaactggatgaagcagaaacccggccagggactcgaatggatcggccaaatctatcccggcgacggcgacaccaactacaacggcaagttcaagggcagagccacactgaccgccgatacctctagcagcacagcctacatgcagctgagcagcctgaccagcgaagatagcgccgtgtacttctgtgcccggtccatcacaacagtcgtgggctgcgctatggactattggggccagggaacaagcgtgaccgtgtctagtacgcgtatccagaaccctgatcctgccgtgtaccagctgcgggatagcaagagcagcgacaagagcgtgtgtctgttcaccgacttcgacagccagaccaacgtgtcccagagcaaggactccgacgtgtacatcaccgataagaccgtgctggacatgcggagcatggacttcaagagcaactccgccgtggcctggtccaacaagtccgatttcgcctgcgccaacgccttcaacaacagcattatccccgaggacacattcttcccaagccccgagagcagctgcggtaccatcactcaaggtttggcagtgtcaaccatctcatcattctttccacctggctaccaagtgtccttctgcctggtcatggtgctgctgttcgccgtggataccggcctgtacttcagcgtctaa

SEQ ID NO: 32551 - DNA, 2553 bp, synthetic construct
  source 1..2553: mol_type = other DNA
atggccttaccagtgaccgccttgctcctgccgctggccttgctgctccacgccgccaggccggacatccagatgacacagagccctagcagcctgtctgccagcgtgggagacagagtgaccatcacatgcaaggccagcgaccacatcaacaactggctggcctggtatcagcagaagcctggacaggcccctaagctgctgatctacggcgctaccacactggaaacaggcgtgcccagcagattttctggcagcggctctggcaccgactacaccctgacaatatccagcctccagcctgaggacttcgccacctactactgtcagcagagctggaacaccccttggacattcggccagggcaccaagctggaaatcaagagactcgaggatctgcggaacgtgaccccacccaaggtgtccctgttcgagcccagcaaggccgagatcgccaataaacagaaggccaccctcgtgtgcctggccagaggcttcttccccgaccacgtggaactgtcttggtgggtcaacggcaaagaggtgcacagcggcgtcagcaccgaccctcaggcctacaaagagagcaactacagctactgcctgagcagtcggctgcgggtgtccgccaccttctggcacaacccccggaaccacttcagatgccaggtgcagttccacggcctgagcgaagaggacaagtggcccgagggcagccccaagcctgtcacccagaacatcagcgccgaggcctggggcagagcctgtggcatcaccagcagctaccagcagggcgtgctgagcgcctactacatgtacttgttgctgctgctgaagtccgtggtgtacttcgccatcatcacatgctgcctgctgcggagaaccgccttctgctgcaacggcgagaagtctagggccaagcgatctggatctggagcaacaaacttctcactactcaaacaagcaggtgacgtggaggagaatcccgggcctactagtatggactggatttggcgcatccttttccttgtcggcgctgctaccggcgcgcattccttcgaacaagttcagcttcaacagcctggcgctgagctggtcaaacctggcgcttctgtgaagatgagctgcaaagccagcggctacgccttcagcagctactggatcaactggatgaagcagaaacccggccagggactcgaatggatcggccaaatctatcccggcgacggcgacaccaactacaacggcaagttcaagggcagagccacactgaccgccgatacctctagcagcacagcctacatgcagctgagcagcctgaccagcgaagatagcgccgtgtacttctgtgcccggtccatcacaacagtcgtgggctgcgctatggactattggggccagggaacaagcgtgaccgtgtctagtacgcgtatccagaaccctgatcctgccgtgtaccagctgcgggatagcaagagcagcgacaagagcgtgtgtctgttcaccgacttcgacagccagaccaacgtgtcccagagcaaggactccgacgtgtacatcaccgataagtgcgtgctggacatgcggagcatggacttcaagagcaactccgccgtggcctggtccaacaagtccgatttcgcctgcgccaacgccttcaacaacagcattatccccgaggacacattcttcccaagccccgagagcagctgcgacgtgaagctggtggaaaagagcttcgagacagacaccaacctgaacttccagaacctgagcgtgatcggcttcagaatcctgctgctgaaagtggccggctttaacctgctgatgaccctgcggctgtggtccagccgcgccaagagaagcggatctggcgtgaagcagaccctgaatttcgacctgctgaagctggctggcgacgtggaatccaacccaggcccttctagaggccatatgaccgagtacaagcccacggtgcgcctcgccacccgcgacgacgtccccagggccgtacgcaccctcgccgccgcgttcgccgactaccccgccacgcgccacaccgtcgatccggaccgccacatcgagcgggtcaccgagctgcaagaactcttcctcacgcgcgtcgggctcgacatcggcaaggtgtgggtcgcggacgacggcgccgcggtggcggtctggaccacgccggagagcgtcgaagcgggggcggtgttcgccgagatcggcccgcgcatggccgagttgagcggttcccggctggccgcgcagcaacagatggaaggcctcctggcgccgcaccggcccaaggagcccgcgtggttcctggccaccgtcggcgtctcgcccgaccaccagggcaagggtctgggcagcgccgtcgtgctccccggagtggaggcggccgagcgcgccggggtgcccgccttcctggagacctccgcgccccgcaacctccccttctacgagcggctcggcttcaccgtcaccgccgacgtcgaggtgcccgaaggaccgcgcacctggtgcatgacccgcaagcccggtgcctga

SEQ ID NO: 32552 - DNA, 2604 bp, synthetic construct
  source 1..2604: mol_type = other DNA
atggccttaccagtgaccgccttgctcctgccgctggccttgctgctccacgccgccaggccggacatccagatgacacagagccctagcagcctgtctgccagcgtgggagacagagtgaccatcacatgcaaggccagcgaccacatcaacaactggctggcctggtatcagcagaagcctggacaggcccctaagctgctgatctacggcgctaccacactggaaacaggcgtgcccagcagattttctggcagcggctctggcaccgactacaccctgacaatatccagcctccagcctgaggacttcgccacctactactgtcagcagagctggaacaccccttggacattcggccagggcaccaagctggaaatcaagagactcgaggacctgaagaacgtgttcccacctgaggtggccgtgttcgagcctagcgaggccgagatcagccacacccagaaagccaccctcgtgtgcctggctaccggcttctaccccgaccatgtggaactgtcttggtgggtcaacggcaaagaggtgcacagcggcgtgtgtaccgacccccagccactgaaagaacagcccgccctgaacgacagccggtactgcctgagcagcagactgagagtgtccgccaccttctggcagaacccccggaaccacttcagatgccaggtgcagttctacggcctgagcgagaacgacgagtggacccaggacagagccaagcccgtgacccagatcgtgtctgccgaagcctggggcagagccgattgcggctttaccagcgagagctaccagcagggcgtgctgagcgcctactacacatacctgctgctgctcctcaagagcgtgatctacctggccatcatcagcttcagcctgctgcggagaacaagcgtgtgcggcaacgagaagaagtccagggccaagcgatctggatctggagcaacaaacttctcactactcaaacaagcaggtgacgtggaggagaatcccgggcctactagtatggactggatttggcgcatccttttccttgtcggcgctgctaccggcgcgcattccttcgaacaagttcagcttcaacagcctggcgctgagctggtcaaacctggcgcttctgtgaagatgagctgcaaagccagcggctacgccttcagcagctactggatcaactggatgaagcagaaacccggccagggactcgaatggatcggccaaatctatcccggcgacggcgacaccaactacaacggcaagttcaagggcagagccacactgaccgccgatacctctagcagcacagcctacatgcagctgagcagcctgaccagcgaagatagcgccgtgtacttctgtgcccggtccatcacaacagtcgtgggctgcgctatggactattggggccagggaacaagcgtgaccgtgtctagtacgcgtcctcacaccaagcccagcgtgttcgtgatgaagaacggcaccaacgtggcctgcctcgtgaaagagttctaccccaaggacatcaggatcaacctggtgtccagcaagaagatcaccgagttcgaccccgccatcgtgatctcccccagcggcaagtacaacgccgtgaagctggggaagtacgaggacagcaacagcgtgacctgctccgtgcagcacgacaacaagaccgtgcacagcaccgactttgaagtgaaaaccgactccaccgaccacgtgaagcccaaagagacagagaacaccaagcagcccagcaagagctgccacaagcccaaggccatcgtgcacaccgagaaagtgaacatgatgagcctgaccgtgctgggcctgcggatgctgttcgccaaaaccgtggccgtgaacttcctgctgaccgccaagctgttcttcctccgcgccaagagaagcggatctggcgtgaagcagaccctgaatttcgacctgctgaagctggctggcgacgtggaatccaacccaggcccttctagaggccatatgaccgagtacaagcccacggtgcgcctcgccacccgcgacgacgtccccagggccgtacgcaccctcgccgccgcgttcgccgactaccccgccacgcgccacaccgtcgatccggaccgccacatcgagcgggtcaccgagctgcaagaactcttcctcacgcgcgtcgggctcgacatcggcaaggtgtgggtcgcggacgacggcgccgcggtggcggtctggaccacgccggagagcgtcgaagcgggggcggtgttcgccgagatcggcccgcgcatggccgagttgagcggttcccggctggccgcgcagcaacagatggaaggcctcctggcgccgcaccggcccaaggagcccgcgtggttcctggccaccgtcggcgtctcgcccgaccaccagggcaagggtctgggcagcgccgtcgtgctccccggagtggaggcggccgagcgcgccggggtgcccgccttcctggagacctccgcgccccgcaacctccccttctacgagcggctcggcttcaccgtcaccgccgacgtcgaggtgcccgaaggaccgcgcacctggtgcatgacccgcaagcccggtgcctga

SEQ ID NO: 32553 - DNA, 3045 bp, synthetic construct
  source 1..3045: mol_type = other DNA
atggccttaccagtgaccgccttgctcctgccgctggccttgctgctccacgccgccaggccggacatccagatgacacagagccctagcagcctgtctgccagcgtgggagacagagtgaccatcacatgcaaggccagcgaccacatcaacaactggctggcctggtatcagcagaagcctggacaggcccctaagctgctgatctacggcgctaccacactggaaacaggcgtgcccagcagattttctggcagcggctctggcaccgactacaccctgacaatatccagcctccagcctgaggacttcgccacctactactgtcagcagagctggaacaccccttggacattcggccagggcaccaagctggaaatcaagagactcgaggacctgaagaacgtgttcccacctgaggtggccgtgttcgagcctagcgaggccgagatcagccacacccagaaagccaccctcgtgtgcctggctaccggcttctaccccgaccatgtggaactgtcttggtgggtcaacggcaaagaggtgcacagcggcgtgtgtaccgacccccagccactgaaagaacagcccgccctgaacgacagccggtactgcctgagcagcagactgagagtgtccgccaccttctggcagaacccccggaaccacttcagatgccaggtgcagttctacggcctgagcgagaacgacgagtggacccaggacagagccaagcccgtgacccagatcgtgtctgccgaagcctggggcagagccgattgcggctttaccagcgagagctaccagcagggcgtgctgagcgccggatcccagagcttcggcctgctggaccccaagctgtgctacctgctggatggcatcctgttcatctacggcgtgatcctgaccgccctgttcctgagagtgaagttcagcagaagcgccgacgcccctgcctaccagcagggacagaaccaactgtacaacgagctgaacctgggcagacgggaagagtacgacgtgctggacaagcggagaggcagggaccctgagatgggcggaaagccccggagaaagaacccccaggaaggactgtataacgaactccagaaagacaagatggccgaagcctacagcgagatcggcatgaagggcgagcggagaagaggcaagggccacgatggcctgtaccagggcctgagcaccgccaccaaggacacctatgacgccctgcacatgcaggccctgcctccaagaagggccaagcgatctggatctggagcaacaaacttctcactactcaaacaagcaggtgacgtggaggagaatcccgggcctactagtatggactggatttggcgcatccttttccttgtcggcgctgctaccggcgcgcattccttcgaacaagttcagcttcaacagcctggcgctgagctggtcaaacctggcgcttctgtgaagatgagctgcaaagccagcggctacgccttcagcagctactggatcaactggatgaagcagaaacccggccagggactcgaatggatcggccaaatctatcccggcgacggcgacaccaactacaacggcaagttcaagggcagagccacactgaccgccgatacctctagcagcacagcctacatgcagctgagcagcctgaccagcgaagatagcgccgtgtacttctgtgcccggtccatcacaacagtcgtgggctgcgctatggactattggggccagggaacaagcgtgaccgtgtctagtacgcgtatccagaaccctgatcctgccgtgtaccagctgcgggatagcaagagcagcgacaagagcgtgtgtctgttcaccgacttcgacagccagaccaacgtgtcccagagcaaggactccgacgtgtacatcaccgataagtgcgtgctggacatgcggagcatggacttcaagagcaactccgccgtggcctggtccaacaagtccgatttcgcctgcgccaacgccttcaacaacagcattatccccgaggacacattcttcccaagccccgagagcagctgcgacgtgaagctggtggaaaagagcttcgagacagacggtaccatcactcaaggtttggcagtgtcaaccatctcatcattctttccacctggctaccaagtgtccttctgcctggtcatggtgctgctgttcgccgtggataccggcctgtacttcagcgtcaggagcaagcggtcacggctgctccacagcgattacatgaatatgacaccacgaagaccgggtcctactcgcaaacactaccaaccctacgcacctccccgcgactttgcagcgtaccgatctcgcgccaagagaagcggatctggcgtgaagcagaccctgaatttcgacctgctgaagctggctggcgacgtggaatccaacccaggcccttctagaggccatatgaccgagtacaagcccacggtgcgcctcgccacccgcgacgacgtccccagggccgtacgcaccctcgccgccgcgttcgccgactaccccgccacgcgccacaccgtcgatccggaccgccacatcgagcgggtcaccgagctgcaagaactcttcctcacgcgcgtcgggctcgacatcggcaaggtgtgggtcgcggacgacggcgccgcggtggcggtctggaccacgccggagagcgtcgaagcgggggcggtgttcgccgagatcggcccgcgcatggccgagttgagcggttcccggctggccgcgcagcaacagatggaaggcctcctggcgccgcaccggcccaaggagcccgcgtggttcctggccaccgtcggcgtctcgcccgaccaccagggcaagggtctgggcagcgccgtcgtgctccccggagtggaggcggccgagcgcgccggggtgcccgccttcctggagacctccgcgccccgcaacctccccttctacgagcggctcggcttcaccgtcaccgccgacgtcgaggtgcccgaaggaccgcgcacctggtgcatgacccgcaagcccggtgcctga

SEQ ID NO: 32554 - DNA, 2559 bp, synthetic construct
  source 1..2559: mol_type = other DNA
atggccttaccagtgaccgccttgctcctgccgctggccttgctgctccacgccgccaggccggacatccagatgacacagagccctagcagcctgtctgccagcgtgggagacagagtgaccatcacatgcaaggccagcgaccacatcaacaactggctggcctggtatcagcagaagcctggacaggcccctaagctgctgatctacggcgctaccacactggaaacaggcgtgcccagcagattttctggcagcggctctggcaccgactacaccctgacaatatccagcctccagcctgaggacttcgccacctactactgtcagcagagctggaacaccccttggacattcggccagggcaccaagctggaaatcaagagactcgaggtgttcccacctgaggtggccgtgttcgagcctagcgaggccgagatcagccacacccagaaagccaccctcgtgtgcctggctaccggcttctaccccgaccatgtggaactgtcttggtgggtcaacggcaaagaggtgcacagcggcgtgtgtaccgacccccagccactgaaagaacagcccgccctgaacgacagccggtactgcctgagcagcagactgagagtgtccgccaccttctggcagaacccccggaaccacttcagatgccaggtgcagttctacggcctgagcgagaacgacgagtggacccaggacagagccaagcccgtgacccagatcgtgtctgccgaagcctggggcagagccgattgcggctttaccagcgagagctaccagcagggcgtgctgagcgcctactacatgtacttgttgctgctgctgaagtccgtggtgtacttcgccatcatcacatgctgcctgctgcggagaaccgccttctgctgcaacggcgagaagtctagggccaagcgatctggatctggagcaacaaacttctcactactcaaacaagcaggtgacgtggaggagaatcccgggcctactagtatggactggatttggcgcatccttttccttgtcggcgctgctaccggcgcgcattccttcgaacaagttcagcttcaacagcctggcgctgagctggtcaaacctggcgcttctgtgaagatgagctgcaaagccagcggctacgccttcagcagctactggatcaactggatgaagcagaaacccggccagggactcgaatggatcggccaaatctatcccggcgacggcgacaccaactacaacggcaagttcaagggcagagccacactgaccgccgatacctctagcagcacagcctacatgcagctgagcagcctgaccagcgaagatagcgccgtgtacttctgtgcccggtccatcacaacagtcgtgggctgcgctatggactattggggccagggaacaagcgtgaccgtgtctagtacgcgtatccagaaccctgatcctgccgtgtaccagctgcgggatagcaagagcagcgacaagagcgtgtgtctgttcaccgacttcgacagccagaccaacgtgtcccagagcaaggactccgacgtgtacatcaccgataagtgcgtgctggacatgcggagcatggacttcaagagcaactccgccgtggcctggtccaacaagtccgatttcgcctgcgccaacgccttcaacaacagcattatccccgaggacacattcttcccaagccccgagagcagctgcgacgtgaagctggtggaaaagagcttcgagacagacaccaacctgaacttccagaacctgagcgtgatcggcttcagaatcctgctgctgaaagtggccggctttaacctgctgatgaccctgcggctgtggtccagccgcgccaagagaagcggatctggcgtgaagcagaccctgaatttcgacctgctgaagctggctggcgacgtggaatccaacccaggcccttctagaggccatatgaccgagtacaagcccacggtgcgcctcgccacccgcgacgacgtccccagggccgtacgcaccctcgccgccgcgttcgccgactaccccgccacgcgccacaccgtcgatccggaccgccacatcgagcgggtcaccgagctgcaagaactcttcctcacgcgcgtcgggctcgacatcggcaaggtgtgggtcgcggacgacggcgccgcggtggcggtctggaccacgccggagagcgtcgaagcgggggcggtgttcgccgagatcggcccgcgcatggccgagttgagcggttcccggctggccgcgcagcaacagatggaaggcctcctggcgccgcaccggcccaaggagcccgcgtggttcctggccaccgtcggcgtctcgcccgaccaccagggcaagggtctgggcagcgccgtcgtgctccccggagtggaggcggccgagcgcgccggggtgcccgccttcctggagacctccgcgccccgcaacctccccttctacgagcggctcggcttcaccgtcaccgccgacgtcgaggtgcccgaaggaccgcgcacctggtgcatgacccgcaagcccggtgcctga

SEQ ID NO: 32555 - DNA, 2568 bp, synthetic construct
  source 1..2568: mol_type = other DNA
atggccttaccagtgaccgccttgctcctgccgctggccttgctgctccacgccgccaggccggacatccagatgacacagagccctagcagcctgtctgccagcgtgggagacagagtgaccatcacatgcaaggccagcgaccacatcaacaactggctggcctggtatcagcagaagcctggacaggcccctaagctgctgatctacggcgctaccacactggaaacaggcgtgcccagcagattttctggcagcggctctggcaccgactacaccctgacaatatccagcctccagcctgaggacttcgccacctactactgtcagcagagctggaacaccccttggacattcggccagggcaccaagctggaaatcaagagactcgaggacctgaagaacgtgttcccacctgaggtggccgtgttcgagcctagcgaggccgagatcagccacacccagaaagccaccctcgtgtgcctggctaccggcttctaccccgaccatgtggaactgtcttggtgggtcaacggcaaagaggtgcacagcggcgtgtgtaccgacccccagccactgaaagaacagcccgccctgaacgacagccggtactgcctgagcagcagactgagagtgtccgccaccttctggcagaacccccggaaccacttcagatgccaggtgcagttctacggcctgagcgagaacgacgagtggacccaggacagagccaagcccgtgacccagatcgtgtctgccgaagcctggggcagagccgattgcggctttaccagcgagagctaccagcagggcgtgctgagcgcctactacatgtacttgttgctgctgctgaagtccgtggtgtacttcgccatcatcacatgctgcctgctgatggctatggtcaagcggaaggacagccggggaagggccaagcgatctggatctggagcaacaaacttctcactactcaaacaagcaggtgacgtggaggagaatcccgggcctactagtatggactggatttggcgcatccttttccttgtcggcgctgctaccggcgcgcattccttcgaacaagttcagcttcaacagcctggcgctgagctggtcaaacctggcgcttctgtgaagatgagctgcaaagccagcggctacgccttcagcagctactggatcaactggatgaagcagaaacccggccagggactcgaatggatcggccaaatctatcccggcgacggcgacaccaactacaacggcaagttcaagggcagagccacactgaccgccgatacctctagcagcacagcctacatgcagctgagcagcctgaccagcgaagatagcgccgtgtacttctgtgcccggtccatcacaacagtcgtgggctgcgctatggactattggggccagggaacaagcgtgaccgtgtctagtacgcgtatccagaaccctgatcctgccgtgtaccagctgcgggatagcaagagcagcgacaagagcgtgtgtctgttcaccgacttcgacagccagaccaacgtgtcccagagcaaggactccgacgtgtacatcaccgataagtgcgtgctggacatgcggagcatggacttcaagagcaactccgccgtggcctggtccaacaagtccgatttcgcctgcgccaacgccttcaacaacagcattatccccgaggacacattcttcccaagccccgagagcagctgcgacgtgaagctggtggaaaagagcttcgagacagacaccaacctgaacttccagaacctgagcgtgatcggcttcagaatcctgctgctgaaagtggccggctttaacctgctgatgaccctgcggctgtggtccagccgcgccaagagaagcggatctggcgtgaagcagaccctgaatttcgacctgctgaagctggctggcgacgtggaatccaacccaggcccttctagaggccatatgaccgagtacaagcccacggtgcgcctcgccacccgcgacgacgtccccagggccgtacgcaccctcgccgccgcgttcgccgactaccccgccacgcgccacaccgtcgatccggaccgccacatcgagcgggtcaccgagctgcaagaactcttcctcacgcgcgtcgggctcgacatcggcaaggtgtgggtcgcggacgacggcgccgcggtggcggtctggaccacgccggagagcgtcgaagcgggggcggtgttcgccgagatcggcccgcgcatggccgagttgagcggttcccggctggccgcgcagcaacagatggaaggcctcctggcgccgcaccggcccaaggagcccgcgtggttcctggccaccgtcggcgtctcgcccgaccaccagggcaagggtctgggcagcgccgtcgtgctccccggagtggaggcggccgagcgcgccggggtgcccgccttcctggagacctccgcgccccgcaacctccccttctacgagcggctcggcttcaccgtcaccgccgacgtcgaggtgcccgaaggaccgcgcacctggtgcatgacccgcaagcccggtgcctga

SEQ ID NO: 32556 - DNA, 2571 bp, synthetic construct
  source 1..2571: mol_type = other DNA
atggccttaccagtgaccgccttgctcctgccgctggccttgctgctccacgccgccaggccggacatccagatgacacagagccctagcagcctgtctgccagcgtgggagacagagtgaccatcacatgcaaggccagcgaccacatcaacaactggctggcctggtatcagcagaagcctggacaggcccctaagctgctgatctacggcgctaccacactggaaacaggcgtgcccagcagattttctggcagcggctctggcaccgactacaccctgacaatatccagcctccagcctgaggacttcgccacctactactgtcagcagagctggaacaccccttggacattcggccagggcaccaagctggaaatcaagagactcgaggacctgaagaacgtgttcccacctgaggtggccgtgttcgagcctagcgaggccgagatcagccacacccagaaagccaccctcgtgtgcctggctaccggcttctaccccgaccatgtggaactgtcttggtgggtcaacggcaaagaggtgcacagcggcgtgtgtaccgacccccagccactgaaagaacagcccgccctgaacgacagccggtactgcctgagcagcagactgagagtgtccgccaccttctggcagaacccccggaaccacttcagatgccaggtgcagttctacggcctgagcgagaacgacgagtggacccaggacagagccaagcccgtgacccagatcgtgtctgccgaagcctggggcagagccgattgcggctttaccagcgagagctaccagcagggcgtgctgagcgccaccatcctgtacttgttgctgctgctgaagtccgtggtgtacctggccatcatcagcttcagcctgctgcggagaaccgccttctgctgcaacggcgagaagtctagggccaagcgatctggatctggagcaacaaacttctcactactcaaacaagcaggtgacgtggaggagaatcccgggcctactagtatggactggatttggcgcatccttttccttgtcggcgctgctaccggcgcgcattccttcgaacaagttcagcttcaacagcctggcgctgagctggtcaaacctggcgcttctgtgaagatgagctgcaaagccagcggctacgccttcagcagctactggatcaactggatgaagcagaaacccggccagggactcgaatggatcggccaaatctatcccggcgacggcgacaccaactacaacggcaagttcaagggcagagccacactgaccgccgatacctctagcagcacagcctacatgcagctgagcagcctgaccagcgaagatagcgccgtgtacttctgtgcccggtccatcacaacagtcgtgggctgcgctatggactattggggccagggaacaagcgtgaccgtgtctagtacgcgtatccagaaccctgatcctgccgtgtaccagctgcgggatagcaagagcagcgacaagagcgtgtgtctgttcaccgacttcgacagccagaccaacgtgtcccagagcaaggactccgacgtgtacatcaccgataagtgcgtgctggacatgcggagcatggacttcaagagcaactccgccgtggcctggtccaacaagtccgatttcgcctgcgccaacgccttcaacaacagcattatccccgaggacacattcttcccaagccccgagagcagctgcgacgtgaagctggtggaaaagagcttcgagacagacaccaacctgaacttccagaacctgagcgtgatcggcttcagaatcctgctgctgaaagtggccggctttaacctgctgatgaccctgcggctgtggtccagccgcgccaagagaagcggatctggcgtgaagcagaccctgaatttcgacctgctgaagctggctggcgacgtggaatccaacccaggcccttctagaggccatatgaccgagtacaagcccacggtgcgcctcgccacccgcgacgacgtccccagggccgtacgcaccctcgccgccgcgttcgccgactaccccgccacgcgccacaccgtcgatccggaccgccacatcgagcgggtcaccgagctgcaagaactcttcctcacgcgcgtcgggctcgacatcggcaaggtgtgggtcgcggacgacggcgccgcggtggcggtctggaccacgccggagagcgtcgaagcgggggcggtgttcgccgagatcggcccgcgcatggccgagttgagcggttcccggctggccgcgcagcaacagatggaaggcctcctggcgccgcaccggcccaaggagcccgcgtggttcctggccaccgtcggcgtctcgcccgaccaccagggcaagggtctgggcagcgccgtcgtgctccccggagtggaggcggccgagcgcgccggggtgcccgccttcctggagacctccgcgccccgcaacctccccttctacgagcggctcggcttcaccgtcaccgccgacgtcgaggtgcccgaaggaccgcgcacctggtgcatgacccgcaagcccggtgcctga

SEQ ID NO: 32557 - DNA, 2604 bp, synthetic construct
  source 1..2604: mol_type = other DNA
atggccttaccagtgaccgccttgctcctgccgctggccttgctgctccacgccgccaggccggacatccagatgacacagagccctagcagcctgtctgccagcgtgggagacagagtgaccatcacatgcaaggccagcgaccacatcaacaactggctggcctggtatcagcagaagcctggacaggcccctaagctgctgatctacggcgctaccacactggaaacaggcgtgcccagcagattttctggcagcggctctggcaccgactacaccctgacaatatccagcctccagcctgaggacttcgccacctactactgtcagcagagctggaacaccccttggacattcggccagggcaccaagctggaaatcaagagactcgaggacctgaagaacgtgttcccacctgaggtggccgtgttcgagcctagcgaggccgagatcagccacacccagaaagccaccctcgtgtgcctggctaccggcttctaccccgaccatgtggaactgtcttggtgggtcaacggcaaagaggtgcacagcggcgtgtctaccgacccccagccactgaaagaacagcccgccctgaacgacagccggtactgcctgagcagcagactgagagtgtccgccaccttctggcagaacccccggaaccacttcagatgccaggtgcagttctacggcctgagcgagaacgacgagtggacccaggacagagccaagcccgtgacccagatcgtgtctgccgaagcctggggcagagccgattgcggctttaccagcgagagctaccagcagggcgtgctgagcgcctactacatgtacttgttgctgctgctgaagtccgtggtgtacttcgccatcatcacatgctgcctgctgcggagaaccgccttctgctgcaacggcgagaagtctagggccaagcgatctggatctggagcaacaaacttctcactactcaaacaagcaggtgacgtggaggagaatcccgggcctactagtatggactggatttggcgcatccttttccttgtcggcgctgctaccggcgcgcattccttcgaacaagttcagcttcaacagcctggcgctgagctggtcaaacctggcgcttctgtgaagatgagctgcaaagccagcggctacgccttcagcagctactggatcaactggatgaagcagaaacccggccagggactcgaatggatcggccaaatctatcccggcgacggcgacaccaactacaacggcaagttcaagggcagagccacactgaccgccgatacctctagcagcacagcctacatgcagctgagcagcctgaccagcgaagatagcgccgtgtacttctgtgcccggtccatcacaacagtcgtgggctgcgctatggactattggggccagggaacaagcgtgaccgtgtctagtacgcgtcctcacaccaagcccagcgtgttcgtgatgaagaacggcaccaacgtggcctgcctcgtgaaagagttctaccccaaggacatcaggatcaacctggtgtccagcaagaagatcaccgagttcgaccccgccatcgtgatctcccccagcggcaagtacaacgccgtgaagctggggaagtacgaggacagcaacagcgtgacctgctccgtgcagcacgacaacaagaccgtgcacagcaccgactttgaagtgaaaaccgactccaccgaccacgtgaagcccaaagagacagagaacaccaagcagcccagcaagagctgccacaagcccaaggccatcgtgcacaccgagaaagtgaacatgatgagcctgaccgtgctgggcctgcggatgctgttcgccaaaaccgtggccgtgaacttcctgctgaccgccaagctgttcttcctccgcgccaagagaagcggatctggcgtgaagcagaccctgaatttcgacctgctgaagctggctggcgacgtggaatccaacccaggcccttctagaggccatatgaccgagtacaagcccacggtgcgcctcgccacccgcgacgacgtccccagggccgtacgcaccctcgccgccgcgttcgccgactaccccgccacgcgccacaccgtcgatccggaccgccacatcgagcgggtcaccgagctgcaagaactcttcctcacgcgcgtcgggctcgacatcggcaaggtgtgggtcgcggacgacggcgccgcggtggcggtctggaccacgccggagagcgtcgaagcgggggcggtgttcgccgagatcggcccgcgcatggccgagttgagcggttcccggctggccgcgcagcaacagatggaaggcctcctggcgccgcaccggcccaaggagcccgcgtggttcctggccaccgtcggcgtctcgcccgaccaccagggcaagggtctgggcagcgccgtcgtgctccccggagtggaggcggccgagcgcgccggggtgcccgccttcctggagacctccgcgccccgcaacctccccttctacgagcggctcggcttcaccgtcaccgccgacgtcgaggtgcccgaaggaccgcgcacctggtgcatgacccgcaagcccggtgcctga

SEQ ID NO: 32558 - DNA, 2586 bp, synthetic construct
  source 1..2586: mol_type = other DNA
atggccttaccagtgaccgccttgctcctgccgctggccttgctgctccacgccgccaggccggacatccagatgacacagagccctagcagcctgtctgccagcgtgggagacagagtgaccatcacatgcaaggccagcgaccacatcaacaactggctggcctggtatcagcagaagcctggacaggcccctaagctgctgatctacggcgctaccacactggaaacaggcgtgcccagcagattttctggcagcggctctggcaccgactacaccctgacaatatccagcctccagcctgaggacttcgccacctactactgtcagcagagctggaacaccccttggacattcggccagggcaccaagctggaaatcaagagactcgaggatctgcggaacgtgaccccacccaaggtgtccctgttcgagcccagcaaggccgagatcgccaataaacagaaggccaccctcgtgtgcctggccagaggcttcttccccgaccacgtggaactgtcttggtgggtcaacggcaaagaggtgcacagcggcgtcagcaccgaccctcaggcctacaaagagagcaactacagctactgcctgagcagtcggctgcgggtgtccgccaccttctggcacaacccccggaaccacttcagatgccaggtgcagttccacggcctgagcgaagaggacaagtggcccgagggcagccccaagcctgtcacccagaacatcagcgccgaggcctggggcagagcctgtggcatcaccagcagctaccagcagggcgtgctgagcgcctactacacatacctgctgctgctcctcaagagcgtgatctacctggccatcatcagcttcagcctgctgcggagaacaagcgtgtgcggcaacgagaagaagtccagggccaagcgatctggatctggagcaacaaacttctcactactcaaacaagcaggtgacgtggaggagaatcccgggcctactagtatggactggatttggcgcatccttttccttgtcggcgctgctaccggcgcgcattccttcgaacaagttcagcttcaacagcctggcgctgagctggtcaaacctggcgcttctgtgaagatgagctgcaaagccagcggctacgccttcagcagctactggatcaactggatgaagcagaaacccggccagggactcgaatggatcggccaaatctatcccggcgacggcgacaccaactacaacggcaagttcaagggcagagccacactgaccgccgatacctctagcagcacagcctacatgcagctgagcagcctgaccagcgaagatagcgccgtgtacttctgtgcccggtccatcacaacagtcgtgggctgcgctatggactattggggccagggaacaagcgtgaccgtgtctagtacgcgtcctcacaccaagcccagcgtgttcgtgatgaagaacggcaccaacgtggcctgcctcgtgaaagagttctaccccaaggacatcaggatcaacctggtgtccagcaagaagatcaccgagttcgaccccgccatcgtgatctcccccagcggcaagtacaacgccgtgaagctggggaagtacgaggacagcaacagcgtgacctgctccgtgcagcacgacaacaagaccgtgcacagcaccgactttgaagtgaaaaccgactccaccgaccacgtgaagcccaaagagacagagaacaccaagcagcccagcaagagctgccacaagcccaaggccatcgtgcacaccgagaaagtgaacatgatgagcctgaccgtgctgggcctgcggatgctgttcgccaaaaccgtggccgtgaacttcctgctgaccgccaagctgttcttcctccgcgccaagagaagcggatctggcgtgaagcagaccctgaatttcgacctgctgaagctggctggcgacgtggaatccaacccaggcccttctagaggccatatgaccgagtacaagcccacggtgcgcctcgccacccgcgacgacgtccccagggccgtacgcaccctcgccgccgcgttcgccgactaccccgccacgcgccacaccgtcgatccggaccgccacatcgagcgggtcaccgagctgcaagaactcttcctcacgcgcgtcgggctcgacatcggcaaggtgtgggtcgcggacgacggcgccgcggtggcggtctggaccacgccggagagcgtcgaagcgggggcggtgttcgccgagatcggcccgcgcatggccgagttgagcggttcccggctggccgcgcagcaacagatggaaggcctcctggcgccgcaccggcccaaggagcccgcgtggttcctggccaccgtcggcgtctcgcccgaccaccagggcaagggtctgggcagcgccgtcgtgctccccggagtggaggcggccgagcgcgccggggtgcccgccttcctggagacctccgcgccccgcaacctccccttctacgagcggctcggcttcaccgtcaccgccgacgtcgaggtgcccgaaggaccgcgcacctggtgcatgacccgcaagcccggtgcctga

SEQ ID NO: 32559 - DNA, 2601 bp, synthetic construct
  source 1..2601: mol_type = other DNA
atggccttaccagtgaccgccttgctcctgccgctggccttgctgctccacgccgccaggccggacatccagatgacacagagccctagcagcctgtctgccagcgtgggagacagagtgaccatcacatgcaaggccagcgaccacatcaacaactggctggcctggtatcagcagaagcctggacaggcccctaagctgctgatctacggcgctaccacactggaaacaggcgtgcccagcagattttctggcagcggctctggcaccgactacaccctgacaatatccagcctccagcctgaggacttcgccacctactactgtcagcagagctggaacaccccttggacattcggccagggcaccaagctggaaatcaagagactcgaggacctgaagaacgtgttcccacctgaggtggccgtgttcgagcctagcgaggccgagatcagccacacccagaaagccaccctcgtgtgcctggctaccggcttctaccccgaccatgtggaactgtcttggtgggtcaacggcaaagaggtgcacagcggcgtgtgtaccgacccccagccactgaaagaacagcccgccctgaacgacagccggtactgcctgagcagcagactgagagtgtccgccaccttctggcagaacccccggaaccacttcagatgccaggtgcagttctacggcctgagcgagaacgacgagtggacccaggacagagccaagcccgtgacccagatcgtgtctgccgaagcctggggcagagccgattgcggctttaccagcgagagctaccagcagggcgtgctgagcgcctactacatgtacttgttgctgctgctgaagtccgtggtgtacttcgccatcatcacatgctgcctgctgatggctatggtcaagcggaaggacagccggggaagggccaagcgatctggatctggagcaacaaacttctcactactcaaacaagcaggtgacgtggaggagaatcccgggcctactagtatggactggatttggcgcatccttttccttgtcggcgctgctaccggcgcgcattccttcgaacaagttcagcttcaacagcctggcgctgagctggtcaaacctggcgcttctgtgaagatgagctgcaaagccagcggctacgccttcagcagctactggatcaactggatgaagcagaaacccggccagggactcgaatggatcggccaaatctatcccggcgacggcgacaccaactacaacggcaagttcaagggcagagccacactgaccgccgatacctctagcagcacagcctacatgcagctgagcagcctgaccagcgaagatagcgccgtgtacttctgtgcccggtccatcacaacagtcgtgggctgcgctatggactattggggccagggaacaagcgtgaccgtgtctagtacgcgtcctcacaccaagcccagcgtgttcgtgatgaagaacggcaccaacgtggcctgcctcgtgaaagagttctaccccaaggacatcaggatcaacctggtgtccagcaagaagatcaccgagttcgaccccgccatcgtgatctcccccagcggcaagtacaacgccgtgaagctggggaagtacgaggacagcaacagcgtgacctgctccgtgcagcacgacaacaagaccgtgcacagcaccgactttgaagtgaaaaccgactccaccgaccacgtgaagcccaaagagacagagaacaccaagcagcccagcaagagctgccacaagcccaaggccatcgtgcacaccgagaaagtgaacatgatgagcctgaccgtgctgggcctgcggatgctgttcgccaaaaccgtggccgtgaacttcctgctgaccgccaagctgttcttcctccgcgccaagagaagcggatctggcgtgaagcagaccctgaatttcgacctgctgaagctggctggcgacgtggaatccaacccaggcccttctagaggccatatgaccgagtacaagcccacggtgcgcctcgccacccgcgacgacgtccccagggccgtacgcaccctcgccgccgcgttcgccgactaccccgccacgcgccacaccgtcgatccggaccgccacatcgagcgggtcaccgagctgcaagaactcttcctcacgcgcgtcgggctcgacatcggcaaggtgtgggtcgcggacgacggcgccgcggtggcggtctggaccacgccggagagcgtcgaagcgggggcggtgttcgccgagatcggcccgcgcatggccgagttgagcggttcccggctggccgcgcagcaacagatggaaggcctcctggcgccgcaccggcccaaggagcccgcgtggttcctggccaccgtcggcgtctcgcccgaccaccagggcaagggtctgggcagcgccgtcgtgctccccggagtggaggcggccgagcgcgccggggtgcccgccttcctggagacctccgcgccccgcaacctccccttctacgagcggctcggcttcaccgtcaccgccgacgtcgaggtgcccgaaggaccgcgcacctggtgcatgacccgcaagcccggtgcctga

SEQ ID NO: 32560 - DNA, 2604 bp, synthetic construct
  source 1..2604: mol_type = other DNA
atggccttaccagtgaccgccttgctcctgccgctggccttgctgctccacgccgccaggccggacatccagatgacacagagccctagcagcctgtctgccagcgtgggagacagagtgaccatcacatgcaaggccagcgaccacatcaacaactggctggcctggtatcagcagaagcctggacaggcccctaagctgctgatctacggcgctaccacactggaaacaggcgtgcccagcagattttctggcagcggctctggcaccgactacaccctgacaatatccagcctccagcctgaggacttcgccacctactactgtcagcagagctggaacaccccttggacattcggccagggcaccaagctggaaatcaagagactcgaggacctgaagaacgtgttcccacctgaggtggccgtgttcgagcctagcgaggccgagatcagccacacccagaaagccaccctcgtgtgcctggctaccggcttctaccctgaccatgtggaactgtcttggtgggtcaacggcaaagaggtgcacagcggcgtgtgtaccgacccccagccactgaaagaacagcccgccctgaacgacagccggtactgcctgagcagcagactgagagtgtccgccaccttctggcagaacccccggaaccacttcagatgccaggtgcagttctacggcctgagcgagaacgacgagtggacccaggacagagccaagcccgtgacccagatcgtgtctgccgaagcctggggcagagccgattgcggctttaccagcgagagctaccagcagggcgtgctgagcgccaccatcctgtacttgttgctgctgctgaagtccgtggtgtacctggccatcatcagcttcagcctgctgcggagaaccgccttctgctgcaacggcgagaagtctagggccaagcgatctggatctggagcaacaaacttctcactactcaaacaagcaggtgacgtggaggagaatcccgggcctactagtatggactggatttggcgcatccttttccttgtcggcgctgctaccggcgcgcattccttcgaacaagttcagcttcaacagcctggcgctgagctggtcaaacctggcgcttctgtgaagatgagctgcaaagccagcggctacgccttcagcagctactggatcaactggatgaagcagaaacccggccagggactcgaatggatcggccaaatctatcccggcgacggcgacaccaactacaacggcaagttcaagggcagagccacactgaccgccgatacctctagcagcacagcctacatgcagctgagcagcctgaccagcgaagatagcgccgtgtacttctgtgcccggtccatcacaacagtcgtgggctgcgctatggactattggggccagggaacaagcgtgaccgtgtctagtacgcgtcctcacaccaagcccagcgtgttcgtgatgaagaacggcaccaacgtggcctgcctcgtgaaagagttctaccccaaggacatcaggatcaacctggtgtccagcaagaagatcaccgagttcgaccccgccatcgtgatctcccccagcggcaagtacaacgccgtgaagctggggaagtacgaggacagcaacagcgtgacctgctccgtgcagcacgacaacaagaccgtgcacagcaccgactttgaagtgaaaaccgactccaccgaccacgtgaagcccaaagagacagagaacaccaagcagcccagcaagagctgccacaagcccaaggccatcgtgcacaccgagaaagtgaacatgatgagcctgaccgtgctgggcctgcggatgctgttcgccaaaaccgtggccgtgaacttcctgctgaccgccaagctgttcttcctccgcgccaagagaagcggatctggcgtgaagcagaccctgaatttcgacctgctgaagctggctggcgacgtggaatccaacccaggcccttctagaggccatatgaccgagtacaagcccacggtgcgcctcgccacccgcgacgacgtccccagggccgtacgcaccctcgccgccgcgttcgccgactaccccgccacgcgccacaccgtcgatccggaccgccacatcgagcgggtcaccgagctgcaagaactcttcctcacgcgcgtcgggctcgacatcggcaaggtgtgggtcgcggacgacggcgccgcggtggcggtctggaccacgccggagagcgtcgaagcgggggcggtgttcgccgagatcggcccgcgcatggccgagttgagcggttcccggctggccgcgcagcaacagatggaaggcctcctggcgccgcaccggcccaaggagcccgcgtggttcctggccaccgtcggcgtctcgcccgaccaccagggcaagggtctgggcagcgccgtcgtgctccccggagtggaggcggccgagcgcgccggggtgcccgccttcctggagacctccgcgccccgcaacctccccttctacgagcggctcggcttcaccgtcaccgccgacgtcgaggtgcccgaaggaccgcgcacctggtgcatgacccgcaagcccggtgcctga

SEQ ID NO: 32561 - DNA, 2583 bp, synthetic construct
  source 1..2583: mol_type = other DNA
atggccttaccagtgaccgccttgctcctgccgctggccttgctgctccacgccgccaggccggacatccagatgacacagagccctagcagcctgtctgccagcgtgggagacagagtgaccatcacatgcaaggccagcgaccacatcaacaactggctggcctggtatcagcagaagcctggacaggcccctaagctgctgatctacggcgctaccacactggaaacaggcgtgcccagcagattttctggcagcggctctggcaccgactacaccctgacaatatccagcctccagcctgaggacttcgccacctactactgtcagcagagctggaacaccccttggacattcggccagggcaccaagctggaaatcaagagactcgaggacaagcagctggacgccgacgtgtcccccaagcctaccatcttcctgccctctatcgccgagacaaagctccagaaggccggcacctacctgtgcctgctggaaaagttcttcccagatgtgattaagatccactggcaggaaaagaagtccaacaccatcctgggcagccaggaaggcaacaccatgaagaccaacgacacctacatgaagttcagctggctgaccgtgcccgagaagtccctggacaaagaacacagatgcatcgtgcggcacgaaaacaacaagaacggcgtggaccaggaaatcatcttcccgagcatcaagaaagtggccgtgtccaccaagccaaccacctgttggcaggacaagaacgacgtgctccagctccagttcaccatcaccagcgcctactacacatacctgctgctgctcctcaagagcgtgatctacctggccatcatcagcttcagcctgctgcggagaacaagcgtgtgcggcaacgagaagaagtccagggccaagcgatctggatctggagcaacaaacttctcactactcaaacaagcaggtgacgtggaggagaatcccgggcctactagtatggactggatttggcgcatccttttccttgtcggcgctgctaccggcgcgcattccttcgaacaagttcagcttcaacagcctggcgctgagctggtcaaacctggcgcttctgtgaagatgagctgcaaagccagcggctacgccttcagcagctactggatcaactggatgaagcagaaacccggccagggactcgaatggatcggccaaatctatcccggcgacggcgacaccaactacaacggcaagttcaagggcagagccacactgaccgccgatacctctagcagcacagcctacatgcagctgagcagcctgaccagcgaagatagcgccgtgtacttctgtgcccggtccatcacaacagtcgtgggctgcgctatggactattggggccagggaacaagcgtgaccgtgtctagtacgcgtcctcacaccaagcccagcgtgttcgtgatgaagaacggcaccaacgtggcctgcctcgtgaaagagttctaccccaaggacatcaggatcaacctggtgtccagcaagaagatcaccgagttcgaccccgccatcgtgatctcccccagcggcaagtacaacgccgtgaagctggggaagtacgaggacagcaacagcgtgacctgctccgtgcagcacgacaacaagaccgtgcacagcaccgactttgaagtgaaaaccgactccaccgaccacgtgaagcccaaagagacagagaacaccaagcagcccagcaagagctgccacaagcccaaggccatcgtgcacaccgagaaagtgaacatgatgagcctgaccgtgctgggcctgcggatgctgttcgccaaaaccgtggccgtgaacttcctgctgaccgccaagctgttcttcctccgcgccaagagaagcggatctggcgtgaagcagaccctgaatttcgacctgctgaagctggctggcgacgtggaatccaacccaggcccttctagaggccatatgaccgagtacaagcccacggtgcgcctcgccacccgcgacgacgtccccagggccgtacgcaccctcgccgccgcgttcgccgactaccccgccacgcgccacaccgtcgatccggaccgccacatcgagcgggtcaccgagctgcaagaactcttcctcacgcgcgtcgggctcgacatcggcaaggtgtgggtcgcggacgacggcgccgcggtggcggtctggaccacgccggagagcgtcgaagcgggggcggtgttcgccgagatcggcccgcgcatggccgagttgagcggttcccggctggccgcgcagcaacagatggaaggcctcctggcgccgcaccggcccaaggagcccgcgtggttcctggccaccgtcggcgtctcgcccgaccaccagggcaagggtctgggcagcgccgtcgtgctccccggagtggaggcggccgagcgcgccggggtgcccgccttcctggagacctccgcgccccgcaacctccccttctacgagcggctcggcttcaccgtcaccgccgacgtcgaggtgcccgaaggaccgcgcacctggtgcatgacccgcaagcccggtgcctga

SEQ ID NO: 32562 - DNA, 2586 bp, synthetic construct
  source 1..2586: mol_type = other DNA
atggccttaccagtgaccgccttgctcctgccgctggccttgctgctccacgccgccaggccggacatccagatgacacagagccctagcagcctgtctgccagcgtgggagacagagtgaccatcacatgcaaggccagcgaccacatcaacaactggctggcctggtatcagcagaagcctggacaggcccctaagctgctgatctacggcgctaccacactggaaacaggcgtgcccagcagattttctggcagcggctctggcaccgactacaccctgacaatatccagcctccagcctgaggacttcgccacctactactgtcagcagagctggaacaccccttggacattcggccagggcaccaagctggaaatcaagagactcgaggacaagcagctggacgccgacgtgtcccccaagcctaccatcttcctgccctctatcgccgagacaaagctccagaaggccggcacctacctgtgcctgctggaaaagttcttcccagatgtgattaagatccactggcaggaaaagaagtccaacaccatcctgggcagccaggaaggcaacaccatgaagaccaacgacacctacatgaagttcagctggctgaccgtgcccgagaagtccctggacaaagaacacagatgcatcgtgcggcacgaaaacaacaagaacggcgtggaccaggaaatcatcttcccacccatcaagaccgatgtgattacaatggaccccaaggacaactgctccaaggacgccaacgataccctgctgctccagctgaccaacaccagcgcctactacacatacctgctgctgctcctcaagagcgtgatctacctggccatcatcagcttcagcctgctgcggagaacaagcgtgtgcggcaacgagaagaagtccagggccaagcgatctggatctggagcaacaaacttctcactactcaaacaagcaggtgacgtggaggagaatcccgggcctactagtatggactggatttggcgcatccttttccttgtcggcgctgctaccggcgcgcattccttcgaacaagttcagcttcaacagcctggcgctgagctggtcaaacctggcgcttctgtgaagatgagctgcaaagccagcggctacgccttcagcagctactggatcaactggatgaagcagaaacccggccagggactcgaatggatcggccaaatctatcccggcgacggcgacaccaactacaacggcaagttcaagggcagagccacactgaccgccgatacctctagcagcacagcctacatgcagctgagcagcctgaccagcgaagatagcgccgtgtacttctgtgcccggtccatcacaacagtcgtgggctgcgctatggactattggggccagggaacaagcgtgaccgtgtctagtacgcgtcctcacaccaagcccagcgtgttcgtgatgaagaacggcaccaacgtggcctgcctcgtgaaagagttctaccccaaggacatcaggatcaacctggtgtccagcaagaagatcaccgagttcgaccccgccatcgtgatctcccccagcggcaagtacaacgccgtgaagctggggaagtacgaggacagcaacagcgtgacctgctccgtgcagcacgacaacaagaccgtgcacagcaccgactttgaagtgaaaaccgactccaccgaccacgtgaagcccaaagagacagagaacaccaagcagcccagcaagagctgccacaagcccaaggccatcgtgcacaccgagaaagtgaacatgatgagcctgaccgtgctgggcctgcggatgctgttcgccaaaaccgtggccgtgaacttcctgctgaccgccaagctgttcttcctccgcgccaagagaagcggatctggcgtgaagcagaccctgaatttcgacctgctgaagctggctggcgacgtggaatccaacccaggcccttctagaggccatatgaccgagtacaagcccacggtgcgcctcgccacccgcgacgacgtccccagggccgtacgcaccctcgccgccgcgttcgccgactaccccgccacgcgccacaccgtcgatccggaccgccacatcgagcgggtcaccgagctgcaagaactcttcctcacgcgcgtcgggctcgacatcggcaaggtgtgggtcgcggacgacggcgccgcggtggcggtctggaccacgccggagagcgtcgaagcgggggcggtgttcgccgagatcggcccgcgcatggccgagttgagcggttcccggctggccgcgcagcaacagatggaaggcctcctggcgccgcaccggcccaaggagcccgcgtggttcctggccaccgtcggcgtctcgcccgaccaccagggcaagggtctgggcagcgccgtcgtgctccccggagtggaggcggccgagcgcgccggggtgcccgccttcctggagacctccgcgccccgcaacctccccttctacgagcggctcggcttcaccgtcaccgccgacgtcgaggtgcccgaaggaccgcgcacctggtgcatgacccgcaagcccggtgcctga

SEQ ID NO: 32563 - DNA, 2607 bp, synthetic construct
  source 1..2607: mol_type = other DNA
atggccttaccagtgaccgccttgctcctgccgctggccttgctgctccacgccgccaggccggacatccagatgacacagagccctagcagcctgtctgccagcgtgggagacagagtgaccatcacatgcaaggccagcgaccacatcaacaactggctggcctggtatcagcagaagcctggacaggcccctaagctgctgatctacggcgctaccacactggaaacaggcgtgcccagcagattttctggcagcggctctggcaccgactacaccctgacaatatccagcctccagcctgaggacttcgccacctactactgtcagcagagctggaacaccccttggacattcggccagggcaccaagctggaaatcaagagactcgaggacctgaagaacgtgttcccacctgaggtggccgtgttcgagcctagcgaggccgagatcagccacacccagaaagccaccctcgtgtgcctggctaccggcttctaccccgaccatgtggaactgtcttggtgggtcaacggcaaagaggtgcacagcggcgtgtgtaccgacccccagccactgaaagaacagcccgccctgaacgacagccggtactgcctgagcagcagactgagagtgtccgccaccttctggcagaacccccggaaccacttcagatgccaggtgcagttctacggcctgagcgagaacgacgagtggacccaggacagagccaagcccgtgacccagatcgtgtctgccgaagcctggggcagagccgattgcggctttaccagcgagagctaccagcagggcgtgctgagcgcctactacatgtacttgttgctgctgctgaagtccgtggtgtacttcgccatcatcacatgctgcctgctgcggagaaccgccttctgctgcaacggcgagaagtctagggccaagcgatctggatctggagcaacaaacttctcactactcaaacaagcaggtgacgtggaggagaatcccgggcctactagtatggactggatttggcgcatccttttccttgtcggcgctgctaccggcgcgcattccttcgaacaagttcagcttcaacagcctggcgctgagctggtcaaacctggcgcttctgtgaagatgagctgcaaagccagcggctacgccttcagcagctactggatcaactggatgaagcagaaacccggccagggactcgaatggatcggccaaatctatcccggcgacggcgacaccaactacaacggcaagttcaagggcagagccacactgaccgccgatacctctagcagcacagcctacatgcagctgagcagcctgaccagcgaagatagcgccgtgtacttctgtgcccggtccatcacaacagtcgtgggctgcgctatggactattggggccagggaacaagcgtgaccgtgtctagtacgcgtgagcagaaactgatctcggaagaggatgggagcggcatccagaaccctgaccctgccgtgtaccagctgagagactctaaatccagtgacaagtctgtctgcctattcaccgattttgattctcaaacaaatgtgtcacaaagtaaggattctgatgtgtatatcacagacaaaactgtgctagacatgaggtctatggacttcaagagcaacagtgctgtggcctggagcaacaaatctgactttgcatgtgcaaacgccttcaacaacagcattattccagaagacaccttcttccccagcccagaaagttcctgtgatgtcaagctggtcgagaaaagctttgaaacagatacgaacctaaactttcaaaacctgtcagtgattgggttccgaatcctcctcctgaaagtggccgggtttaatctgctcatgacgctgcggctgtggtccagccgcgccaagagaagcggatctggcgtgaagcagaccctgaatttcgacctgctgaagctggctggcgacgtggaatccaacccaggcccttctagaggccatatgaccgagtacaagcccacggtgcgcctcgccacccgcgacgacgtccccagggccgtacgcaccctcgccgccgcgttcgccgactaccccgccacgcgccacaccgtcgatccggaccgccacatcgagcgggtcaccgagctgcaagaactcttcctcacgcgcgtcgggctcgacatcggcaaggtgtgggtcgcggacgacggcgccgcggtggcggtctggaccacgccggagagcgtcgaagcgggggcggtgttcgccgagatcggcccgcgcatggccgagttgagcggttcccggctggccgcgcagcaacagatggaaggcctcctggcgccgcaccggcccaaggagcccgcgtggttcctggccaccgtcggcgtctcgcccgaccaccagggcaagggtctgggcagcgccgtcgtgctccccggagtggaggcggccgagcgcgccggggtgcccgccttcctggagacctccgcgccccgcaacctccccttctacgagcggctcggcttcaccgtcaccgccgacgtcgaggtgcccgaaggaccgcgcacctggtgcatgacccgcaagcccggtgcctga

SEQ ID NO: 32564 - DNA, 2553 bp, synthetic construct
  source 1..2553: mol_type = other DNA
atggccttaccagtgaccgccttgctcctgccgctggccttgctgctccacgccgccaggccggacatccagatgacacagagccctagcagcctgtctgccagcgtgggagacagagtgaccatcacatgcaaggccagcgaccacatcaacaactggctggcctggtatcagcagaagcctggacaggcccctaagctgctgatctacggcgctaccacactggaaacaggcgtgcccagcagattttctggcagcggctctggcaccgactacaccctgacaatatccagcctccagcctgaggacttcgccacctactactgtcagcagagctggaacaccccttggacattcggccagggcaccaagctggaaatcaagagactcgaggatctgcggaacgtgaccccacccaaggtgtccctgttcgagcccagcaaggccgagatcgccaataaacagaaggccaccctcgtgtgcctggccagaggcttcttccccgaccacgtggaactgtcttggtgggtcaacggcaaagaggtgcacagcggcgtcagcaccgaccctcaggcctacaaagagagcaactacagctactgcctgagcagtcggctgcgggtgtccgccaccttctggcacaacccccggaaccacttcagatgccaggtgcagttccacggcctgagcgaagaggacaagtggcccgagggcagccccaagcctgtcacccagaacatcagcgccgaggcctggggcagagcctgtggcatcaccagcagctaccagcagggcgtgctgagcgcctactacacatacctgctgctgctcctcaagagcgtgatctacctggccatcatcagcttcagcctgctgcggagaacaagcgtgtgcggcaacgagaagaagtccagggccaagcgatctggatctggagcaacaaacttctcactactcaaacaagcaggtgacgtggaggagaatcccgggcctactagtatggactggatttggcgcatccttttccttgtcggcgctgctaccggcgcgcattccttcgaacaagttcagcttcaacagcctggcgctgagctggtcaaacctggcgcttctgtgaagatgagctgcaaagccagcggctacgccttcagcagctactggatcaactggatgaagcagaaacccggccagggactcgaatggatcggccaaatctatcccggcgacggcgacaccaactacaacggcaagttcaagggcagagccacactgaccgccgatacctctagcagcacagcctacatgcagctgagcagcctgaccagcgaagatagcgccgtgtacttctgtgcccggtccatcacaacagtcgtgggctgcgctatggactattggggccagggaacaagcgtgaccgtgtctagtacgcgtatccagaaccctgatcctgccgtgtaccagctgcgggatagcaagagcagcgacaagagcgtgtgtctgttcaccgacttcgacagccagaccaacgtgtcccagagcaaggactccgacgtgtacatcaccgataagtgcgtgctggacatgcggagcatggacttcaagagcaactccgccgtggcctggtccaacaagtccgatttcgcctgcgccaacgccttcaacaacagcattatccccgaggacacattcttcccaagccccgagagcagctgcgacgtgaagctggtggaaaagagcttcgagacagacaccaacctgaacttccagaacctgagcgtgatcggcttcagaatcctgctgctgaaagtggccggctttaacctgctgatgaccctgcggctgtggtccagccgcgccaagagaagcggatctggcgtgaagcagaccctgaatttcgacctgctgaagctggctggcgacgtggaatccaacccaggcccttctagaggccatatgaccgagtacaagcccacggtgcgcctcgccacccgcgacgacgtccccagggccgtacgcaccctcgccgccgcgttcgccgactaccccgccacgcgccacaccgtcgatccggaccgccacatcgagcgggtcaccgagctgcaagaactcttcctcacgcgcgtcgggctcgacatcggcaaggtgtgggtcgcggacgacggcgccgcggtggcggtctggaccacgccggagagcgtcgaagcgggggcggtgttcgccgagatcggcccgcgcatggccgagttgagcggttcccggctggccgcgcagcaacagatggaaggcctcctggcgccgcaccggcccaaggagcccgcgtggttcctggccaccgtcggcgtctcgcccgaccaccagggcaagggtctgggcagcgccgtcgtgctccccggagtggaggcggccgagcgcgccggggtgcccgccttcctggagacctccgcgccccgcaacctccccttctacgagcggctcggcttcaccgtcaccgccgacgtcgaggtgcccgaaggaccgcgcacctggtgcatgacccgcaagcccggtgcctga

SEQ ID NO: 32565 - DNA, 2553 bp, synthetic construct
  source 1..2553: mol_type = other DNA
atggccttaccagtgaccgccttgctcctgccgctggccttgctgctccacgccgccaggccggacatccagatgacacagagccctagcagcctgtctgccagcgtgggagacagagtgaccatcacatgcaaggccagcgaccacatcaacaactggctggcctggtatcagcagaagcctggacaggcccctaagctgctgatctacggcgctaccacactggaaacaggcgtgcccagcagattttctggcagcggctctggcaccgactacaccctgacaatatccagcctccagcctgaggacttcgccacctactactgtcagcagagctggaacaccccttggacattcggccagggcaccaagctggaaatcaagagactcgaggacaagcagctggacgccgacgtgtcccccaagcctaccatcttcctgccctctatcgccgagacaaagctccagaaggccggcacctacctgtgcctgctggaaaagttcttcccagatgtgattaagatccactggcaggaaaagaagtccaacaccatcctgggcagccaggaaggcaacaccatgaagaccaacgacacctacatgaagttcagctggctgaccgtgcccgagaagtccctggacaaagaacacagatgcatcgtgcggcacgaaaacaacaagaacggcgtggaccaggaaatcatcttcccacccatcaagaccgatgtgattacaatggaccccaaggacaactgctccaaggacgccaacgataccctgctgctccagctgaccaacaccagcgcctactacacatacctgctgctgctcctcaagagcgtgatctacctggccatcatcagcttcagcctgctgcggagaacaagcgtgtgcggcaacgagaagaagtccagggccaagcgatctggatctggagcaacaaacttctcactactcaaacaagcaggtgacgtggaggagaatcccgggcctactagtatggactggatttggcgcatccttttccttgtcggcgctgctaccggcgcgcattccttcgaacaagttcagcttcaacagcctggcgctgagctggtcaaacctggcgcttctgtgaagatgagctgcaaagccagcggctacgccttcagcagctactggatcaactggatgaagcagaaacccggccagggactcgaatggatcggccaaatctatcccggcgacggcgacaccaactacaacggcaagttcaagggcagagccacactgaccgccgatacctctagcagcacagcctacatgcagctgagcagcctgaccagcgaagatagcgccgtgtacttctgtgcccggtccatcacaacagtcgtgggctgcgctatggactattggggccagggaacaagcgtgaccgtgtctagtacgcgtatccagaaccctgatcctgccgtgtaccagctgcgggatagcaagagcagcgacaagagcgtgtgtctgttcaccgacttcgacagccagaccaacgtgtcccagagcaaggactccgacgtgtacatcaccgataagtgcgtgctggacatgcggagcatggacttcaagagcaactccgccgtggcctggtccaacaagtccgatttcgcctgcgccaacgccttcaacaacagcattatccccgaggacacattcttcccaagccccgagagcagctgcgacgtgaagctggtggaaaagagcttcgagacagacaccaacctgaacttccagaacctgagcgtgatcggcttcagaatcctgctgctgaaagtggccggctttaacctgctgatgaccctgcggctgtggtccagccgcgccaagagaagcggatctggcgtgaagcagaccctgaatttcgacctgctgaagctggctggcgacgtggaatccaacccaggcccttctagaggccatatgaccgagtacaagcccacggtgcgcctcgccacccgcgacgacgtccccagggccgtacgcaccctcgccgccgcgttcgccgactaccccgccacgcgccacaccgtcgatccggaccgccacatcgagcgggtcaccgagctgcaagaactcttcctcacgcgcgtcgggctcgacatcggcaaggtgtgggtcgcggacgacggcgccgcggtggcggtctggaccacgccggagagcgtcgaagcgggggcggtgttcgccgagatcggcccgcgcatggccgagttgagcggttcccggctggccgcgcagcaacagatggaaggcctcctggcgccgcaccggcccaaggagcccgcgtggttcctggccaccgtcggcgtctcgcccgaccaccagggcaagggtctgggcagcgccgtcgtgctccccggagtggaggcggccgagcgcgccggggtgcccgccttcctggagacctccgcgccccgcaacctccccttctacgagcggctcggcttcaccgtcaccgccgacgtcgaggtgcccgaaggaccgcgcacctggtgcatgacccgcaagcccggtgcctga

SEQ ID NO: 32566 - DNA, 2589 bp, synthetic construct
  source 1..2589: mol_type = other DNA
atggccttaccagtgaccgccttgctcctgccgctggccttgctgctccacgccgccaggccggacatccagatgacacagagccctagcagcctgtctgccagcgtgggagacagagtgaccatcacatgcaaggccagcgaccacatcaacaactggctggcctggtatcagcagaagcctggacaggcccctaagctgctgatctacggcgctaccacactggaaacaggcgtgcccagcagattttctggcagcggctctggcaccgactacaccctgacaatatccagcctccagcctgaggacttcgccacctactactgtcagcagagctggaacaccccttggacattcggccagggcaccaagctggaaatcaagagactcgaggacaagcagctggacgccgacgtgtcccccaagcctaccatcttcctgccctctatcgccgagacaaagctccagaaggccggcacctacctgtgcctgctggaaaagttcttcccagatgtgattaagatccactggcaggaaaagaagtccaacaccatcctgggcagccaggaaggcaacaccatgaagaccaacgacacctacatgaagttcagctggctgaccgtgcccgagaagtccctggacaaagaacacagatgcatcgtgcggcacgaaaacaacaagaacggcgtggaccaggaaatcatcttcccacccatcaagaccgatgtgattacaatggaccccaaggacaactgctccaaggacgccaacgataccctgctgctccagctgaccaacaccagcgcctactacatgtacgagatcctgctgggcaaggccaccctgtacgccgtgctggtgtctgccctggtgctgatggctatggtcaagcggaaggacagccggggaagggccaagcgatctggatctggagcaacaaacttctcactactcaaacaagcaggtgacgtggaggagaatcccgggcctactagtatggactggatttggcgcatccttttccttgtcggcgctgctaccggcgcgcattccttcgaacaagttcagcttcaacagcctggcgctgagctggtcaaacctggcgcttctgtgaagatgagctgcaaagccagcggctacgccttcagcagctactggatcaactggatgaagcagaaacccggccagggactcgaatggatcggccaaatctatcccggcgacggcgacaccaactacaacggcaagttcaagggcagagccacactgaccgccgatacctctagcagcacagcctacatgcagctgagcagcctgaccagcgaagatagcgccgtgtacttctgtgcccggtccatcacaacagtcgtgggctgcgctatggactattggggccagggaacaagcgtgaccgtgtctagtacgcgtagccagcctcacaccaagcccagcgtgttcgtgatgaagaacggcaccaacgtggcctgcctcgtgaaagagttctaccccaaggacatcaggatcaacctggtgtccagcaagaagatcaccgagttcgaccccgccatcgtgatctcccccagcggcaagtacaacgccgtgaagctggggaagtacgaggacagcaacagcgtgacctgctccgtgcagcacgacaacaagaccgtgcacagcaccgactttgaagtgaaaaccgactccaccgaccacgtgaagcccaaagagacagagaacaccaagcagcccagcaagagctgccacaagcccaaggccatcgtgcacaccgagaaagtgaacatgatgagcctgaccgtgctgggcttcagaatcctgctgctgaaagtggccggctttaacctgctgatgaccctgcggctgtggtccagccgcgccaagagaagcggatctggcgtgaagcagaccctgaatttcgacctgctgaagctggctggcgacgtggaatccaacccaggcccttctagaggccatatgaccgagtacaagcccacggtgcgcctcgccacccgcgacgacgtccccagggccgtacgcaccctcgccgccgcgttcgccgactaccccgccacgcgccacaccgtcgatccggaccgccacatcgagcgggtcaccgagctgcaagaactcttcctcacgcgcgtcgggctcgacatcggcaaggtgtgggtcgcggacgacggcgccgcggtggcggtctggaccacgccggagagcgtcgaagcgggggcggtgttcgccgagatcggcccgcgcatggccgagttgagcggttcccggctggccgcgcagcaacagatggaaggcctcctggcgccgcaccggcccaaggagcccgcgtggttcctggccaccgtcggcgtctcgcccgaccaccagggcaagggtctgggcagcgccgtcgtgctccccggagtggaggcggccgagcgcgccggggtgcccgccttcctggagacctccgcgccccgcaacctccccttctacgagcggctcggcttcaccgtcaccgccgacgtcgaggtgcccgaaggaccgcgcacctggtgcatgacccgcaagcccggtgcctga

SEQ ID NO: 32567 - DNA, 1869 bp, synthetic construct; identical to SEQ ID NO: 1062
  source 1..1869: mol_type = other DNA

SEQ ID NO: 32568 - DNA, 2589 bp, synthetic construct
  source 1..2589: mol_type = other DNA
atggccttaccagtgaccgccttgctcctgccgctggccttgctgctccacgccgccaggccggacatccagatgacacagagccctagcagcctgtctgccagcgtgggagacagagtgaccatcacatgcaaggccagcgaccacatcaacaactggctggcctggtatcagcagaagcctggacaggcccctaagctgctgatctacggcgctaccacactggaaacaggcgtgcccagcagattttctggcagcggctctggcaccgactacaccctgacaatatccagcctccagcctgaggacttcgccacctactactgtcagcagagctggaacaccccttggacattcggccagggcaccaagctggaaatcaagagactcgaggacaagcagctggacgccgacgtgtcccccaagcctaccatcttcctgccctctatcgccgagacaaagctccagaaggccggcacctacctgtgcctgctggaaaagttcttcccagatgtgattaagatccactggcaggaaaagaagtccaacaccatcctgggcagccaggaaggcaacaccatgaagaccaacgacacctacatgaagttcagctggctgaccgtgcccgagaagtccctggacaaagaacacagatgcatcgtgcggcacgaaaacaacaagaacggcgtggaccaggaaatcatcttcccacccatcaagaccgatgtgattacaatggaccccaaggacaactgctccaaggacgccaacgataccctgctgctccagctgaccaacaccagcgccaccatcctgtacgagatcctgctgggcaaggccaccctgtacgccgtgctggtgtctgccctggtgctgatggctatggtcaagcggaaggacagccggggaagggccaagcgatctggatctggagcaacaaacttctcactactcaaacaagcaggtgacgtggaggagaatcccgggcctactagtatggactggatttggcgcatccttttccttgtcggcgctgctaccggcgcgcattccttcgaacaagttcagcttcaacagcctggcgctgagctggtcaaacctggcgcttctgtgaagatgagctgcaaagccagcggctacgccttcagcagctactggatcaactggatgaagcagaaacccggccagggactcgaatggatcggccaaatctatcccggcgacggcgacaccaactacaacggcaagttcaagggcagagccacactgaccgccgatacctctagcagcacagcctacatgcagctgagcagcctgaccagcgaagatagcgccgtgtacttctgtgcccggtccatcacaacagtcgtgggctgcgctatggactattggggccagggaacaagcgtgaccgtgtctagtacgcgtagccagcctcacaccaagcccagcgtgttcgtgatgaagaacggcaccaacgtggcctgcctcgtgaaagagttctaccccaaggacatcaggatcaacctggtgtccagcaagaagatcaccgagttcgaccccgccatcgtgatctcccccagcggcaagtacaacgccgtgaagctggggaagtacgaggacagcaacagcgtgacctgctccgtgcagcacgacaacaagaccgtgcacagcaccgactttgaagtgaaaaccgactccaccgaccacgtgaagcccaaagagacagagaacaccaagcagcccagcaagagctgccacaagcccaaggccatcgtgcacaccgagaaagtgaacatgatgagcctgaccgtgctgggcttcagaatcctgctgctgaaagtggccggctttaacctgctgatgaccctgcggctgtggtccagccgcgccaagagaagcggatctggcgtgaagcagaccctgaatttcgacctgctgaagctggctggcgacgtggaatccaacccaggcccttctagaggccatatgaccgagtacaagcccacggtgcgcctcgccacccgcgacgacgtccccagggccgtacgcaccctcgccgccgcgttcgccgactaccccgccacgcgccacaccgtcgatccggaccgccacatcgagcgggtcaccgagctgcaagaactcttcctcacgcgcgtcgggctcgacatcggcaaggtgtgggtcgcggacgacggcgccgcggtggcggtctggaccacgccggagagcgtcgaagcgggggcggtgttcgccgagatcggcccgcgcatggccgagttgagcggttcccggctggccgcgcagcaacagatggaaggcctcctggcgccgcaccggcccaaggagcccgcgtggttcctggccaccgtcggcgtctcgcccgaccaccagggcaagggtctgggcagcgccgtcgtgctccccggagtggaggcggccgagcgcgccggggtgcccgccttcctggagacctccgcgccccgcaacctccccttctacgagcggctcggcttcaccgtcaccgccgacgtcgaggtgcccgaaggaccgcgcacctggtgcatgacccgcaagcccggtgcctga

SEQ ID NO: 32569 - DNA, 2589 bp, synthetic construct
  source 1..2589: mol_type = other DNA
atggccttaccagtgaccgccttgctcctgccgctggccttgctgctccacgccgccaggccggacatccagatgacacagagccctagcagcctgtctgccagcgtgggagacagagtgaccatcacatgcaaggccagcgaccacatcaacaactggctggcctggtatcagcagaagcctggacaggcccctaagctgctgatctacggcgctaccacactggaaacaggcgtgcccagcagattttctggcagcggctctggcaccgactacaccctgacaatatccagcctccagcctgaggacttcgccacctactactgtcagcagagctggaacaccccttggacattcggccagggcaccaagctggaaatcaagagactcgaggacaagcagctggacgccgacgtgtcccccaagcctaccatcttcctgccctctatcgccgagacaaagctccagaaggccggcacctacctgtgcctgctggaaaagttcttcccagatgtgattaagatccactggcaggaaaagaagtccaacaccatcctgggcagccaggaaggcaacaccatgaagaccaacgacacctacatgaagttcagctggctgaccgtgcccgagaagtccctggacaaagaacacagatgcatcgtgcggcacgaaaacaacaagaacggcgtggaccaggaaatcatcttcccacccatcaagaccgatgtgattacaatggaccccaaggacaactgctccaaggacgccaacgataccctgctgctccagctgaccaacaccagcgccaccatcctgtacgagatcctgctgggcaaggccaccctgtacgccgtgctggtgtctgccctggtgctgatggctatggtcaagcggaaggacagccggggaagggccaagcgatctggatctggagcaacaaacttctcactactcaaacaagcaggtgacgtggaggagaatcccgggcctactagtatggactggatttggcgcatccttttccttgtcggcgctgctaccggcgcgcattccttcgaacaagttcagcttcaacagcctggcgctgagctggtcaaacctggcgcttctgtgaagatgagctgcaaagccagcggctacgccttcagcagctactggatcaactggatgaagcagaaacccggccagggactcgaatggatcggccaaatctatcccggcgacggcgacaccaactacaacggcaagttcaagggcagagccacactgaccgccgatacctctagcagcacagcctacatgcagctgagcagcctgaccagcgaagatagcgccgtgtacttctgtgcccggtccatcacaacagtcgtgggctgcgctatggactattggggccagggaacaagcgtgaccgtgtctagtacgcgtagccagcctcacaccaagcccagcgtgttcgtgatgaagaacggcaccaacgtggcctgcctcgtgaaagagttctaccccaaggacatcaggatcaacctggtgtccagcaagaagatcaccgagttcgaccccgccatcgtgatctcccccagcggcaagtacaacgccgtgaagctggggaagtatgaggacagcaacagcgtgacctgctccgtgcagcacgacaacaagaccgtgcacagcaccgactttgaagtgaaaaccgactccaccgaccacgtgaagcccaaagagacagagaacaccaagcagcccagcaagagctgccacaagcccaaggccatcgtgcacaccgagaaagtgaacatgatgagcctgaccgtgatcggcttcagaatcctgctgctgaaagtggccggctttaacctgctgatgaccctgcggctgtggtccagccgcgccaagagaagcggatctggcgtgaagcagaccctgaatttcgacctgctgaagctggctggcgacgtggaatccaacccaggcccttctagaggccatatgaccgagtacaagcccacggtgcgcctcgccacccgcgacgacgtccccagggccgtacgcaccctcgccgccgcgttcgccgactaccccgccacgcgccacaccgtcgatccggaccgccacatcgagcgggtcaccgagctgcaagaactcttcctcacgcgcgtcgggctcgacatcggcaaggtgtgggtcgcggacgacggcgccgcggtggcggtctggaccacgccggagagcgtcgaagcgggggcggtgttcgccgagatcggcccgcgcatggccgagttgagcggttcccggctggccgcgcagcaacagatggaaggcctcctggcgccgcaccggcccaaggagcccgcgtggttcctggccaccgtcggcgtctcgcccgaccaccagggcaagggtctgggcagcgccgtcgtgctccccggagtggaggcggccgagcgcgccggggtgcccgccttcctggagacctccgcgccccgcaacctccccttctacgagcggctcggcttcaccgtcaccgccgacgtcgaggtgcccgaaggaccgcgcacctggtgcatgacccgcaagcccggtgcctga

SEQ ID NO: 32570 - DNA, 2571 bp, synthetic construct
  source 1..2571: mol_type = other DNA
atggccttaccagtgaccgccttgctcctgccgctggccttgctgctccacgccgccaggccggacatccagatgacacagagccctagcagcctgtctgccagcgtgggagacagagtgaccatcacatgcaaggccagcgaccacatcaacaactggctggcctggtatcagcagaagcctggacaggcccctaagctgctgatctacggcgctaccacactggaaacaggcgtgcccagcagattttctggcagcggctctggcaccgactacaccctgacaatatccagcctccagcctgaggacttcgccacctactactgtcagcagagctggaacaccccttggacattcggccagggcaccaagctggaaatcaagagactcgaggacctgaagaacgtgttcccacctgaggtggccgtgttcgagcctagcgaggccgagatcagccacacccagaaagccaccctcgtgtgcctggctaccggcttctaccccgaccatgtggaactgtcttggtgggtcaacggcaaagaggtgcacagcggcgtgtgtaccgacccccagccactgaaagaacagcccgccctgaacgacagccggtactgcctgagcagcagactgagagtgtccgccaccttctggcagaacccccggaaccacttcagatgccaggtgcagttctacggcctgagcgagaacgacgagtggacccaggacagagccaagcccgtgacccagatcgtgtctgccgaagcctggggcagagccgattgcggctttaccagcgagagctaccagcagggcgtgctgagcgccaccatcctgtacttgttgctgctgctgaagtccgtggtgtacttcgccatcatcacatgctgcctgctgcggagaaccgccttctgctgcaacggcgagaagtctagggccaagcgatctggatctggagcaacaaacttctcactactcaaacaagcaggtgacgtggaggagaatcccgggcctactagtatggactggatttggcgcatccttttccttgtcggcgctgctaccggcgcgcattccttcgaacaagttcagcttcaacagcctggcgctgagctggtcaaacctggcgcttctgtgaagatgagctgcaaagccagcggctacgccttcagcagctactggatcaactggatgaagcagaaacccggccagggactcgaatggatcggccaaatctatcccggcgacggcgacaccaactacaacggcaagttcaagggcagagccacactgaccgccgatacctctagcagcacagcctacatgcagctgagcagcctgaccagcgaagatagcgccgtgtacttctgtgcccggtccatcacaacagtcgtgggctgcgctatggactattggggccagggaacaagcgtgaccgtgtctagtacgcgtatccagaaccctgatcctgccgtgtaccagctgcgggatagcaagagcagcgacaagagcgtgtgtctgttcaccgacttcgacagccagaccaacgtgtcccagagcaaggactccgacgtgtacatcaccgataagtgcgtgctggacatgcggagcatggacttcaagagcaactccgccgtggcctggtccaacaagtccgatttcgcctgcgccaacgccttcaacaacagcattatccccgaggacacattcttcccaagccccgagagcagctgcgacgtgaagctggtggaaaagagcttcgagacagacaccaacctgaacttccagaacctgagcgtgatcggcctgcggatgctgttcgccaaaaccgtggccgtgaacttcctgctgaccgccaagctgttcttcctccgcgccaagagaagcggatctggcgtgaagcagaccctgaatttcgacctgctgaagctggctggcgacgtggaatccaacccaggcccttctagaggccatatgaccgagtacaagcccacggtgcgcctcgccacccgcgacgacgtccccagggccgtacgcaccctcgccgccgcgttcgccgactaccccgccacgcgccacaccgtcgatccggaccgccacatcgagcgggtcaccgagctgcaagaactcttcctcacgcgcgtcgggctcgacatcggcaaggtgtgggtcgcggacgacggcgccgcggtggcggtctggaccacgccggagagcgtcgaagcgggggcggtgttcgccgagatcggcccgcgcatggccgagttgagcggttcccggctggccgcgcagcaacagatggaaggcctcctggcgccgcaccggcccaaggagcccgcgtggttcctggccaccgtcggcgtctcgcccgaccaccagggcaagggtctgggcagcgccgtcgtgctccccggagtggaggcggccgagcgcgccggggtgcccgccttcctggagacctccgcgccccgcaacctccccttctacgagcggctcggcttcaccgtcaccgccgacgtcgaggtgcccgaaggaccgcgcacctggtgcatgacccgcaagcccggtgcctga

SEQ ID NO: 32571 - DNA, 2610 bp, synthetic construct
  source 1..2610: mol_type = other DNA
atggccttaccagtgaccgccttgctcctgccgctggccttgctgctccacgccgccaggccggacatccagatgacacagagccctagcagcctgtctgccagcgtgggagacagagtgaccatcacatgcaaggccagcgaccacatcaacaactggctggcctggtatcagcagaagcctggacaggcccctaagctgctgatctacggcgctaccacactggaaacaggcgtgcccagcagattttctggcagcggctctggcaccgactacaccctgacaatatccagcctccagcctgaggacttcgccacctactactgtcagcagagctggaacaccccttggacattcggccagggcaccaagctggaaatcaagagactcgaggacctgaagaacgtgttcccacctgaggtggccgtgttcgagcctagcgaggccgagatcagccacacccagaaagccaccctcgtgtgcctggctaccggcttctaccccgaccatgtggaactgtcttggtgggtcaacggcaaagaggtgcacagcggcgtgtgtaccgacccccagccactgaaagaacagcccgccctgaacgacagccggtactgcctgagcagcagactgagagtgtccgccaccttctggcagaacccccggaaccacttcagatgccaggtgcagttctacggcctgagcgagaacgacgagtggacccaggacagagccaagcccgtgacccagatcgtgtctgccgaagcctggggcagagccgattgcggctttaccagcgagagctaccagcagggcgtgctgagcgccaccatcctgtacttgttgctgctgctgaagtccgtggtgtacttcgccatcatcacatgctgcctgctgcggagaaccgccttctgctgcaacggcgagaagtctagggccaagcgatctggatctggagcaacaaacttctcactactcaaacaagcaggtgacgtggaggagaatcccgggcctactagtatggactggatttggcgcatccttttccttgtcggcgctgctaccggcgcgcattccttcgaacaagttcagcttcaacagcctggcgctgagctggtcaaacctggcgcttctgtgaagatgagctgcaaagccagcggctacgccttcagcagctactggatcaactggatgaagcagaaacccggccagggactcgaatggatcggccaaatctatcccggcgacggcgacaccaactacaacggcaagttcaagggcagagccacactgaccgccgatacctctagcagcacagcctacatgcagctgagcagcctgaccagcgaagatagcgccgtgtacttctgtgcccggtccatcacaacagtcgtgggctgcgctatggactattggggccagggaacaagcgtgaccgtgtctagtacgcgtagccagcctcacaccaagcccagcgtgttcgtgatgaagaacggcaccaacgtggcctgcctcgtgaaagagttctaccccaaggacatcaggatcaacctggtgtccagcaagaagatcaccgagttcgaccccgccatcgtgatctcccccagcggcaagtacaacgccgtgaagctggggaagtatgaggacagcaacagcgtgacctgctccgtgcagcacgacaacaagaccgtgcacagcaccgactttgaagtgaaaaccgactccaccgaccacgtgaagcccaaagagacagagaacaccaagcagcccagcaagagctgccacaagcccaaggccatcgtgcacaccgagaaagtgaacatgatgagcctgaccgtgatcggcttcagaatcctgctgctgaaagtggccggctttaacctgctgatgaccctgcggctgtggtccagccgcgccaagagaagcggatctggcgtgaagcagaccctgaatttcgacctgctgaagctggctggcgacgtggaatccaacccaggcccttctagaggccatatgaccgagtacaagcccacggtgcgcctcgccacccgcgacgacgtccccagggccgtacgcaccctcgccgccgcgttcgccgactaccccgccacgcgccacaccgtcgatccggaccgccacatcgagcgggtcaccgagctgcaagaactcttcctcacgcgcgtcgggctcgacatcggcaaggtgtgggtcgcggacgacggcgccgcggtggcggtctggaccacgccggagagcgtcgaagcgggggcggtgttcgccgagatcggcccgcgcatggccgagttgagcggttcccggctggccgcgcagcaacagatggaaggcctcctggcgccgcaccggcccaaggagcccgcgtggttcctggccaccgtcggcgtctcgcccgaccaccagggcaagggtctgggcagcgccgtcgtgctccccggagtggaggcggccgagcgcgccggggtgcccgccttcctggagacctccgcgccccgcaacctccccttctacgagcggctcggcttcaccgtcaccgccgacgtcgaggtgcccgaaggaccgcgcacctggtgcatgacccgcaagcccggtgcctga

SEQ ID NO: 32572 - DNA, 2055 bp, synthetic construct
  source 1..2055: mol_type = other DNA
atggccttaccagtgaccgccttgctcctgccgctggccttgctgctccacgccgccaggccggacatccagatgacacagagccctagcagcctgtctgccagcgtgggagacagagtgaccatcacatgcaaggccagcgaccacatcaacaactggctggcctggtatcagcagaagcctggacaggcccctaagctgctgatctacggcgctaccacactggaaacaggcgtgcccagcagattttctggcagcggctctggcaccgactacaccctgacaatatccagcctccagcctgaggacttcgccacctactactgtcagcagagctggaacaccccttggacattcggccagggcaccaagctggaaatcaagagactcgagggacagcctaaggccaatcctaccgtgacactgttccctccaagcagcgaagaactccaggccaacaaggccacacttgtgtgcctgatctccgacttctaccctggggctgtgacagtggcttggaaggccgatggatctcctgtgaaagccggcgtggaaaccaccaagccatccaagcagagcaacaacaaatacgccgccagctcctacctgagcctgacacctgagcagtggaagtcccacagatcctacagctgccaagtgacccacgaaggcagcaccgtggaaaagacagtggcccctacagagtgcagcggatcccccatcaagaccgatgtgattacaatggaccccaaggacaactgctccaaggacgccaacgataccctgctgctccagctgaccaacaccagcgcctactacatgtacttgttgctgctgctgaagtccgtggtgtacttcgccatcatcacatgctgcctgctgcggagaaccgccttctgctgcaacggcgagaagtctagggccaagcgatctggatctggagcaacaaacttctcactactcaaacaagcaggtgacgtggaggagaatcccgggcctactagtatggactggatttggcgcatccttttccttgtcggcgctgctaccggcgcgcattccttcgaacaagttcagcttcaacagcctggcgctgagctggtcaaacctggcgcttctgtgaagatgagctgcaaagccagcggctacgccttcagcagctactggatcaactggatgaagcagaaacccggccagggactcgaatggatcggccaaatctatcccggcgacggcgacaccaactacaacggcaagttcaagggcagagccacactgaccgccgatacctctagcagcacagcctacatgcagctgagcagcctgaccagcgaagatagcgccgtgtacttctgtgcccggtccatcacaacagtcgtgggctgcgctatggactattggggccagggaacaagcgtgaccgtgtctagtacgcgtgcgtccactaagggtccgtcagtcttcccgctggcgccctgttcccgcagcacgagtgaatctaccgccgcccttgggtgcttggtaaaagactattttcctgagcccgttacagtatcatggaacagcggggctctgactagcggggtgcatacgttccctgcggttctgcaatctagcggactgtattctctctccagtgttgtgaccgtgccaagctccagcctcggtactaaaacttatacatgtaatgtggatcataaaccttcaaataccaaggttgacaaaagggtagagagtaagtacggtggtaccgaagtgaaaaccgactccaccgaccacgtgaagcccaaagagacagagaacaccaagcagcccagcaagagctgccacaagcccaaggccatcgtgcacaccgagaaagtgaacatgatgagcctgaccgtgctgggcctgcggatgctgttcgccaaaaccgtggccgtgaacttcctgctgaccgccaagctgttcttcctccgcgccaagagaagcggatctggcgtgaagcagaccctgaatttcgacctgctgaagctggctggcgacgtggaatccaacccaggcccttctagataa

SEQ ID NO: 32573 - DNA, 2055 bp, synthetic construct
  source 1..2055: mol_type = other DNA
atggccttaccagtgaccgccttgctcctgccgctggccttgctgctccacgccgccaggccggacatccagatgacacagagccctagcagcctgtctgccagcgtgggagacagagtgaccatcacatgcaaggccagcgaccacatcaacaactggctggcctggtatcagcagaagcctggacaggcccctaagctgctgatctacggcgctaccacactggaaacaggcgtgcccagcagattttctggcagcggctctggcaccgactacaccctgacaatatccagcctccagcctgaggacttcgccacctactactgtcagcagagctggaacaccccttggacattcggccagggcaccaagctggaaatcaagagactcgaggacctgaagaacgtgttcccacctgaggtggccgtgttcgagcctagcgaggccgagatcagccacacccagaaagccaccctcgtgtgcctggctaccggcttctaccccgaccatgtggaactgtcttggtgggtcaacggcaaagaggtgcacagcggcgtgtctaccgacccccagccactgaaagaacagcccgccctgaacgacagccggtactgcctgagcagcagactgagagtgtccgccaccttctggcagaacccccggaaccacttcagatgccaggtgcagttctacggcctgagcgagaacgacgagtggacccaggacagagccaagcccgtgacccagatcgtgtctgccgaagcctggggcagagccgattgcggatcctccaaggacgccaacgataccctgctgctccagctgaccaacaccagcgcctactacatgtacttgttgctgctgctgaagtccgtggtgtacttcgccatcatcacatgctgcctgctgcggagaaccgccttctgctgcaacggcgagaagtctagggccaagcgatctggatctggagcaacaaacttctcactactcaaacaagcaggtgacgtggaggagaatcccgggcctactagtatggactggatttggcgcatccttttccttgtcggcgctgctaccggcgcgcattccttcgaacaagttcagcttcaacagcctggcgctgagctggtcaaacctggcgcttctgtgaagatgagctgcaaagccagcggctacgccttcagcagctactggatcaactggatgaagcagaaacccggccagggactcgaatggatcggccaaatctatcccggcgacggcgacaccaactacaacggcaagttcaagggcagagccacactgaccgccgatacctctagcagcacagcctacatgcagctgagcagcctgaccagcgaagatagcgccgtgtacttctgtgcccggtccatcacaacagtcgtgggctgcgctatggactattggggccagggaacaagcgtgaccgtgtctagtacgcgtatccagaaccctgatcctgccgtgtaccagctgcgggatagcaagagcagcgacaagagcgtgtgtctgttcaccgacttcgacagccagaccaacgtgtcccagagcaaggactccgacgtgtacatcaccgataagaccgtgctggacatgcggagcatggacttcaagagcaactccgccgtggcctggtccaacaagtccgatttcgcctgcgccaacgccttcaacaacagcattatccccgaggacacattcttcccaagccccgagagcagctgcggtaccgaagtgaaaaccgactccaccgaccacgtgaagcccaaagagacagagaacaccaagcagcccagcaagagctgccacaagcccaaggccatcgtgcacaccgagaaagtgaacatgatgagcctgaccgtgctgggcctgcggatgctgttcgccaaaaccgtggccgtgaacttcctgctgaccgccaagctgttcttcctccgcgccaagagaagcggatctggcgtgaagcagaccctgaatttcgacctgctgaagctggctggcgacgtggaatccaacccaggcccttctagataa

SEQ ID NO: 32574 - DNA, 2100 bp, synthetic construct
  source 1..2100: mol_type = other DNA
atggccttaccagtgaccgccttgctcctgccgctggccttgctgctccacgccgccaggccggacatccagatgacacagagccctagcagcctgtctgccagcgtgggagacagagtgaccatcacatgcaaggccagcgaccacatcaacaactggctggcctggtatcagcagaagcctggacaggcccctaagctgctgatctacggcgctaccacactggaaacaggcgtgcccagcagattttctggcagcggctctggcaccgactacaccctgacaatatccagcctccagcctgaggacttcgccacctactactgtcagcagagctggaacaccccttggacattcggccagggcaccaagctggaaatcaagagactcgaggacctgaagaacgtgttcccacctgaggtggccgtgttcgagcctagcgaggccgagatcagccacacccagaaagccaccctcgtgtgcctggctaccggcttctaccccgaccatgtggaactgtcttggtgggtcaacggcaaagaggtgcacagcggcgtgtctaccgacccccagccactgaaagaacagcccgccctgaacgacagccggtactgcctgagcagcagactgagagtgtccgccaccttctggcagaacccccggaaccacttcagatgccaggtgcagttctacggcctgagcgagaacgacgagtggacccaggacagagccaagcccgtgacccagatcgtgtctgccgaagcctggggcagagccgattgcggatcccccatcaagaccgatgtgattacaatggaccccaaggacaactgctccaaggacgccaacgataccctgctgctccagctgaccaacaccagcgcctactacatgtacttgttgctgctgctgaagtccgtggtgtacttcgccatcatcacatgctgcctgctgcggagaaccgccttctgctgcaacggcgagaagtctagggccaagcgatctggatctggagcaacaaacttctcactactcaaacaagcaggtgacgtggaggagaatcccgggcctactagtatggactggatttggcgcatccttttccttgtcggcgctgctaccggcgcgcattccttcgaacaagttcagcttcaacagcctggcgctgagctggtcaaacctggcgcttctgtgaagatgagctgcaaagccagcggctacgccttcagcagctactggatcaactggatgaagcagaaacccggccagggactcgaatggatcggccaaatctatcccggcgacggcgacaccaactacaacggcaagttcaagggcagagccacactgaccgccgatacctctagcagcacagcctacatgcagctgagcagcctgaccagcgaagatagcgccgtgtacttctgtgcccggtccatcacaacagtcgtgggctgcgctatggactattggggccagggaacaagcgtgaccgtgtctagtacgcgtatccagaaccctgatcctgccgtgtaccagctgcgggatagcaagagcagcgacaagagcgtgtgtctgttcaccgacttcgacagccagaccaacgtgtcccagagcaaggactccgacgtgtacatcaccgataagaccgtgctggacatgcggagcatggacttcaagagcaactccgccgtggcctggtccaacaagtccgatttcgcctgcgccaacgccttcaacaacagcattatccccgaggacacattcttcccaagccccgagagcagctgcggtaccgaagtgaaaaccgactccaccgaccacgtgaagcccaaagagacagagaacaccaagcagcccagcaagagctgccacaagcccaaggccatcgtgcacaccgagaaagtgaacatgatgagcctgaccgtgctgggcctgcggatgctgttcgccaaaaccgtggccgtgaacttcctgctgaccgccaagctgttcttcctccgcgccaagagaagcggatctggcgtgaagcagaccctgaatttcgacctgctgaagctggctggcgacgtggaatccaacccaggcccttctagataa

SEQ ID NO: 32575 - DNA, 2604 bp, synthetic construct
  source 1..2604: mol_type = other DNA
atggccttaccagtgaccgccttgctcctgccgctggccttgctgctccacgccgccaggccggacatccagatgacacagagccctagcagcctgtctgccagcgtgggagacagagtgaccatcacatgcaaggccagcgaccacatcaacaactggctggcctggtatcagcagaagcctggacaggcccctaagctgctgatctacggcgctaccacactggaaacaggcgtgcccagcagattttctggcagcggctctggcaccgactacaccctgacaatatccagcctccagcctgaggacttcgccacctactactgtcagcagagctggaacaccccttggacattcggccagggcaccaagctggaaatcaagagactcgaggacctgaagaacgtgttcccacctgaggtggccgtgttcgagcctagcgaggccgagatcagccacacccagaaagccaccctcgtgtgcctggctaccggcttctaccccgaccatgtggaactgtcttggtgggtcaacggcaaagaggtgcacagcggcgtgtgtaccgacccccagccactgaaagaacagcccgccctgaacgacagccggtactgcctgagcagcagactgagagtgtccgccaccttctggcagaacccccggaaccacttcagatgccaggtgcagttctacggcctgagcgagaacgacgagtggacccaggacagagccaagcccgtgacccagatcgtgtctgccgaagcctggggcagagccgattgcggctttaccagcgagagctaccagcagggcgtgctgagcgccaccatcctgtacttgttgctgctgctgaagtccgtggtgtacttcgccatcatcacatgctgcctgctgcggagaaccgccttctgctgcaacggcgagaagtctagggccaagcgatctggatctggagcaacaaacttctcactactcaaacaagcaggtgacgtggaggagaatcccgggcctactagtatggactggatttggcgcatccttttccttgtcggcgctgctaccggcgcgcattccttcgaacaagttcagcttcaacagcctggcgctgagctggtcaaacctggcgcttctgtgaagatgagctgcaaagccagcggctacgccttcagcagctactggatcaactggatgaagcagaaacccggccagggactcgaatggatcggccaaatctatcccggcgacggcgacaccaactacaacggcaagttcaagggcagagccacactgaccgccgatacctctagcagcacagcctacatgcagctgagcagcctgaccagcgaagatagcgccgtgtacttctgtgcccggtccatcacaacagtcgtgggctgcgctatggactattggggccagggaacaagcgtgaccgtgtctagtacgcgtcctcacaccaagcccagcgtgttcgtgatgaagaacggcaccaacgtggcctgcctcgtgaaagagttctaccccaaggacatcaggatcaacctggtgtccagcaagaagatcaccgagttcgaccccgccatcgtgatctcccccagcggcaagtacaacgccgtgaagctggggaagtacgaggacagcaacagcgtgacctgctccgtgcagcacgacaacaagaccgtgcacagcaccgactttgaagtgaaaaccgactccaccgaccacgtgaagcccaaagagacagagaacaccaagcagcccagcaagagctgccacaagcccaaggccatcgtgcacaccgagaaagtgaacatgatgagcctgaccgtgctgggcctgcggatgctgttcgccaaaaccgtggccgtgaacttcctgctgaccgccaagctgttcttcctccgcgccaagagaagcggatctggcgtgaagcagaccctgaatttcgacctgctgaagctggctggcgacgtggaatccaacccaggcccttctagaggccatatgaccgagtacaagcccacggtgcgcctcgccacccgcgacgacgtccccagggccgtacgcaccctcgccgccgcgttcgccgactaccccgccacgcgccacaccgtcgatccggaccgccacatcgagcgggtcaccgagctgcaagaactcttcctcacgcgcgtcgggctcgacatcggcaaggtgtgggtcgcggacgacggcgccgcggtggcggtctggaccacgccggagagcgtcgaagcgggggcggtgttcgccgagatcggcccgcgcatggccgagttgagcggttcccggctggccgcgcagcaacagatggaaggcctcctggcgccgcaccggcccaaggagcccgcgtggttcctggccaccgtcggcgtctcgcccgaccaccagggcaagggtctgggcagcgccgtcgtgctccccggagtggaggcggccgagcgcgccggggtgcccgccttcctggagacctccgcgccccgcaacctccccttctacgagcggctcggcttcaccgtcaccgccgacgtcgaggtgcccgaaggaccgcgcacctggtgcatgacccgcaagcccggtgcctga

SEQ ID NO: 32576 - DNA, 2604 bp, synthetic construct
  source 1..2604: mol_type = other DNA
atggccttaccagtgaccgccttgctcctgccgctggccttgctgctccacgccgccaggccggacatccagatgacacagagccctagcagcctgtctgccagcgtgggagacagagtgaccatcacatgcaaggccagcgaccacatcaacaactggctggcctggtatcagcagaagcctggacaggcccctaagctgctgatctacggcgctaccacactggaaacaggcgtgcccagcagattttctggcagcggctctggcaccgactacaccctgacaatatccagcctccagcctgaggacttcgccacctactactgtcagcagagctggaacaccccttggacattcggccagggcaccaagctggaaatcaagagactcgaggacctgaagaacgtgttcccacctgaggtggccgtgttcgagcctagcgaggccgagatcagccacacccagaaagccaccctcgtgtgcctggctaccggcttctaccccgaccgtgtggaactgtcttggtgggtcaacggcaaagaggtgcacagcggcgtgtgtaccgacccccagccactgaaagaacagcccgccctgaacgacagccggtactgcctgagcagcagactgagagtgtccgccaccttctggcagaacccccggaaccacttcagatgccaggtgcagttctacggcctgagcgagaacgacgagtggacccaggacagagccaagcccgtgacccagatcgtgtctgccgaagcctggggcagagccgattgcggctttaccagcgagagctaccagcagggcgtgctgagcgcctactacatgtacttgttgctgctgctgaagtccgtggtgtacttcgccatcatcacatgctgcctgctgcggagaaccgccttctgctgcaacggcgagaagtctagggccaagcgatctggatctggagcaacaaacttctcactactcaaacaagcaggtgacgtggaggagaatcccgggcctactagtatggactggatttggcgcatccttttccttgtcggcgctgctaccggcgcgcattccttcgaacaagttcagcttcaacagcctggcgctgagctggtcaaacctggcgcttctgtgaagatgagctgcaaagccagcggctacgccttcagcagctactggatcaactggatgaagcagaaacccggccagggactcgaatggatcggccaaatctatcccggcgacggcgacaccaactacaacggcaagttcaagggcagagccacactgaccgccgatacctctagcagcacagcctacatgcagctgagcagcctgaccagcgaagatagcgccgtgtacttctgtgcccggtccatcacaacagtcgtgggctgcgctatggactattggggccagggaacaagcgtgaccgtgtctagtacgcgtcctcacaccaagcccagcgtgttcgtgatgaagaacggcaccaacgtggcctgcctcgtgaaagagttctaccccaaggacatcaggatcaacctggtgtccagcaagaagatcaccgagttcgaccccgccatcgtgatctcccccagcggcaagtacaacgccgtgaagctggggaagtacgaggacagcaacagcgtgacctgctccgtgcagcacgacaacaagaccgtgcacagcaccgactttgaagtgaaaaccgactccaccgaccacgtgaagcccaaagagacagagaacaccaagcagcccagcaagagctgccacaagcccaaggccatcgtgcacaccgagaaagtgaacatgatgagcctgaccgtgctgggcctgcggatgctgttcgccaaaaccgtggccgtgaacttcctgctgaccgccaagctgttcttcctccgcgccaagagaagcggatctggcgtgaagcagaccctgaatttcgacctgctgaagctggctggcgacgtggaatccaacccaggcccttctagaggccatatgaccgagtacaagcccacggtgcgcctcgccacccgcgacgacgtccccagggccgtacgcaccctcgccgccgcgttcgccgactaccccgccacgcgccacaccgtcgatccggaccgccacatcgagcgggtcaccgagctgcaagaactcttcctcacgcgcgtcgggctcgacatcggcaaggtgtgggtcgcggacgacggcgccgcggtggcggtctggaccacgccggagagcgtcgaagcgggggcggtgttcgccgagatcggcccgcgcatggccgagttgagcggttcccggctggccgcgcagcaacagatggaaggcctcctggcgccgcaccggcccaaggagcccgcgtggttcctggccaccgtcggcgtctcgcccgaccaccagggcaagggtctgggcagcgccgtcgtgctccccggagtggaggcggccgagcgcgccggggtgcccgccttcctggagacctccgcgccccgcaacctccccttctacgagcggctcggcttcaccgtcaccgccgacgtcgaggtgcccgaaggaccgcgcacctggtgcatgacccgcaagcccggtgcctga

SEQ ID NO: 32577 - DNA, 2583 bp, synthetic construct
  source 1..2583: mol_type = other DNA
atggccttaccagtgaccgccttgctcctgccgctggccttgctgctccacgccgccaggccggacatccagatgacacagagccctagcagcctgtctgccagcgtgggagacagagtgaccatcacatgcaaggccagcgaccacatcaacaactggctggcctggtatcagcagaagcctggacaggcccctaagctgctgatctacggcgctaccacactggaaacaggcgtgcccagcagattttctggcagcggctctggcaccgactacaccctgacaatatccagcctccagcctgaggacttcgccacctactactgtcagcagagctggaacaccccttggacattcggccagggcaccaagctggaaatcaagagactcgaggacaagcagctggacgccgacgtgtcccccaagcctaccatcttcctgccctctatcgccgagacaaagctccagaaggccggcacctacctgtgcctgctggaaaagttcttcccagatgtgattaagatccactggcaggaaaagaagtccaacaccatcctgggcagccaggaaggcaacaccatgaagaccaacgacacctacatgaagttcagctggctgaccgtgcccgagaagtccctggacaaagaacacagatgcatcgtgcggcacgaaaacaacaagaacggcgtggaccaggaaatcatcttcccacccatcaagaccgatgtgattacaatggaccccaaggacaactgctccaaggacgccaacgataccctgctgctccagctgaccaacaccagcgccaccatcctgtacgagatcctgctgggcaaggccaccctgtacgccgtgctggtgtctgccctggtgctgatggctatggtcaagcggaaggacagccggggaagggccaagcgatctggatctggagcaacaaacttctcactactcaaacaagcaggtgacgtggaggagaatcccgggcctactagtatggactggatttggcgcatccttttccttgtcggcgctgctaccggcgcgcattccttcgaacaagttcagcttcaacagcctggcgctgagctggtcaaacctggcgcttctgtgaagatgagctgcaaagccagcggctacgccttcagcagctactggatcaactggatgaagcagaaacccggccagggactcgaatggatcggccaaatctatcccggcgacggcgacaccaactacaacggcaagttcaagggcagagccacactgaccgccgatacctctagcagcacagcctacatgcagctgagcagcctgaccagcgaagatagcgccgtgtacttctgtgcccggtccatcacaacagtcgtgggctgcgctatggactattggggccagggaacaagcgtgaccgtgtctagtacgcgtcctcacaccaagcccagcgtgttcgtgatgaagaacggcaccaacgtggcctgcctcgtgaaagagttctaccccaaggacatcaggatcaacctggtgtccagcaagaagatcaccgagttcgaccccgccatcgtgatctcccccagcggcaagtacaacgccgtgaagctggggaagtacgaggacagcaacagcgtgacctgctccgtgcagcacgacaacaagaccgtgcacagcaccgactttgaagtgaaaaccgactccaccgaccacgtgaagcccaaagagacagagaacaccaagcagcccagcaagagctgccacaagcccaaggccatcgtgcacaccgagaaagtgaacatgatgagcctgaccgtgctgggcctgcggatgctgttcgccaaaaccgtggccgtgaacttcctgctgaccgccaagctgttcttcctccgcgccaagagaagcggatctggcgtgaagcagaccctgaatttcgacctgctgaagctggctggcgacgtggaatccaacccaggcccttctagaggccatatgaccgagtacaagcccacggtgcgcctcgccacccgcgacgacgtccccagggccgtacgcaccctcgccgccgcgttcgccgactaccccgccacgcgccacaccgtcgatccggaccgccacatcgagcgggtcaccgagctgcaagaactcttcctcacgcgcgtcgggctcgacatcggcaaggtgtgggtcgcggacgacggcgccgcggtggcggtctggaccacgccggagagcgtcgaagcgggggcggtgttcgccgagatcggcccgcgcatggccgagttgagcggttcccggctggccgcgcagcaacagatggaaggcctcctggcgccgcaccggcccaaggagcccgcgtggttcctggccaccgtcggcgtctcgcccgaccaccagggcaagggtctgggcagcgccgtcgtgctccccggagtggaggcggccgagcgcgccggggtgcccgccttcctggagacctccgcgccccgcaacctccccttctacgagcggctcggcttcaccgtcaccgccgacgtcgaggtgcccgaaggaccgcgcacctggtgcatgacccgcaagcccggtgcctga

SEQ ID NO: 32578 - DNA, 2571 bp, synthetic construct
  source 1..2571: mol_type = other DNA
atggccttaccagtgaccgccttgctcctgccgctggccttgctgctccacgccgccaggccggacatccagatgacacagagccctagcagcctgtctgccagcgtgggagacagagtgaccatcacatgcaaggccagcgaccacatcaacaactggctggcctggtatcagcagaagcctggacaggcccctaagctgctgatctacggcgctaccacactggaaacaggcgtgcccagcagattttctggcagcggctctggcaccgactacaccctgacaatatccagcctccagcctgaggacttcgccacctactactgtcagcagagctggaacaccccttggacattcggccagggcaccaagctggaaatcaagagactcgaggacctgaagaacgtgttcccacctgaggtggccgtgttcgagcctagcgaggccgagatcagccacacccagaaagccaccctcgtgtgcctggctaccggcttctaccccgaccgtgtggaactgtcttggtgggtcaacggcaaagaggtgcacagcggcgtgtgtaccgacccccagccactgaaagaacagcccgccctgaacgacagccggtactgcctgagcagcagactgagagtgtccgccaccttctggcagaacccccggaaccacttcagatgccaggtgcagttctacggcctgagcgagaacgacgagtggacccaggacagagccaagcccgtgacccagatcgtgtctgccgaagcctggggcagagccgattgcggctttaccagcgagagctaccagcagggcgtgctgagcgcctactacatgtacttgttgctgctgctgaagtccgtggtgtacttcgccatcatcacatgctgcctgctgcggagaaccgccttctgctgcaacggcgagaagtctagggccaagcgatctggatctggagcaacaaacttctcactactcaaacaagcaggtgacgtggaggagaatcccgggcctactagtatggactggatttggcgcatccttttccttgtcggcgctgctaccggcgcgcattccttcgaacaagttcagcttcaacagcctggcgctgagctggtcaaacctggcgcttctgtgaagatgagctgcaaagccagcggctacgccttcagcagctactggatcaactggatgaagcagaaacccggccagggactcgaatggatcggccaaatctatcccggcgacggcgacaccaactacaacggcaagttcaagggcagagccacactgaccgccgatacctctagcagcacagcctacatgcagctgagcagcctgaccagcgaagatagcgccgtgtacttctgtgcccggtccatcacaacagtcgtgggctgcgctatggactattggggccagggaacaagcgtgaccgtgtctagtacgcgtatccagaaccctgatcctgccgtgtaccagctgcgggatagcaagagcagcgacaagagcgtgtgtctgttcaccgacttcgacagccagaccaacgtgtcccagagcaaggactccgacgtgtacatcaccgataagtgcgtgctggacatgcggagcatggacttcaagagcaactccgccgtggcctggtccaacaagtccgatttcgcctgcgccaacgccttcaacaacagcattatccccgaggacacattcttcccaagccccgagagcagctgcgacgtgaagctggtggaaaagagcttcgagacagacaccaacctgaacttccagaacctgagcgtgatcggcttcagaatcctgctgctgaaagtggccggctttaacctgctgatgaccctgcggctgtggtccagccgcgccaagagaagcggatctggcgtgaagcagaccctgaatttcgacctgctgaagctggctggcgacgtggaatccaacccaggcccttctagaggccatatgaccgagtacaagcccacggtgcgcctcgccacccgcgacgacgtccccagggccgtacgcaccctcgccgccgcgttcgccgactaccccgccacgcgccacaccgtcgatccggaccgccacatcgagcgggtcaccgagctgcaagaactcttcctcacgcgcgtcgggctcgacatcggcaaggtgtgggtcgcggacgacggcgccgcggtggcggtctggaccacgccggagagcgtcgaagcgggggcggtgttcgccgagatcggcccgcgcatggccgagttgagcggttcccggctggccgcgcagcaacagatggaaggcctcctggcgccgcaccggcccaaggagcccgcgtggttcctggccaccgtcggcgtctcgcccgaccaccagggcaagggtctgggcagcgccgtcgtgctccccggagtggaggcggccgagcgcgccggggtgcccgccttcctggagacctccgcgccccgcaacctccccttctacgagcggctcggcttcaccgtcaccgccgacgtcgaggtgcccgaaggaccgcgcacctggtgcatgacccgcaagcccggtgcctga

SEQ ID NO: 32579 - DNA, 2571 bp, synthetic construct
  source 1..2571: mol_type = other DNA
atggccttaccagtgaccgccttgctcctgccgctggccttgctgctccacgccgccaggccggacatccagatgacacagagccctagcagcctgtctgccagcgtgggagacagagtgaccatcacatgcaaggccagcgaccacatcaacaactggctggcctggtatcagcagaagcctggacaggcccctaagctgctgatctacggcgctaccacactggaaacaggcgtgcccagcagattttctggcagcggctctggcaccgactacaccctgacaatatccagcctccagcctgaggacttcgccacctactactgtcagcagagctggaacaccccttggacattcggccagggcaccaagctggaaatcaagagactcgaggacctgaagaacgtgttcccacctgaggtggccgtgttcgagcctagcgaggccgagatcagccacacccagaaagccaccctcgtgtgcctggctaccggcttctaccccgaccatgtggaactgtcttggtgggtcaacggcaaagaggtgcacagcggcgtgtgtaccgacccccagccactgaaagaacagcccgccctgaacgacagccggtactgcctgagcagcagactgagagtgtccgccaccttctggcagaacccccggaaccacttcagatgccaggtgcagttctacggcctgagcgagaacgacgagtggacccaggacagagccaagcccgtgacccagatcgtgtctgccgaagcctggggcagagccgattgcggctttaccagcgagagctaccagcagggcgtgctgagcgccaccatcctgtacttgttgctgctgctgaagtccgtggtgtacttcgccatcatcacatgctgcctgctgcggagaaccgccttctgctgcaacggcgagaagtctagggccaagcgatctggatctggagcaacaaacttctcactactcaaacaagcaggtgacgtggaggagaatcccgggcctactagtatggactggatttggcgcatccttttccttgtcggcgctgctaccggcgcgcattccttcgaacaagttcagcttcaacagcctggcgctgagctggtcaaacctggcgcttctgtgaagatgagctgcaaagccagcggctacgccttcagcagctactggatcaactggatgaagcagaaacccggccagggactcgaatggatcggccaaatctatcccggcgacggcgacaccaactacaacggcaagttcaagggcagagccacactgaccgccgatacctctagcagcacagcctacatgcagctgagcagcctgaccagcgaagatagcgccgtgtacttctgtgcccggtccatcacaacagtcgtgggctgcgctatggactattggggccagggaacaagcgtgaccgtgtctagtacgcgtatccagaaccctgatcctgccgtgtaccagctgcgggatagcaagagcagcgacaagagcgtgtgtctgttcaccgacttcgacagccagaccaacgtgtcccagagcaaggactccgacgtgtacatcaccgataagtgcgtgctggacatgcggagcatggacttcaagagcaactccgccgtggcctggtccaacaagtccgatttcgcctgcgccaacgccttcaacaacagcattatccccgaggacacattcttcccaagccccgagagcagctgcgacgtgaagctggtggaaaagagcttcgagacagacaccaacctgaacttccagaacctgagcgtgatcggcttcagaatcctgctgctgaaagtggccggctttaacctgctgatgaccctgcggctgtggtccagccgcgccaagagaagcggatctggcgtgaagcagaccctgaatttcgacctgctgaagctggctggcgacgtggaatccaacccaggcccttctagaggccatatgaccgagtacaagcccacggtgcgcctcgccacccgcgacgacgtccccagggccgtacgcaccctcgccgccgcgttcgccgactaccccgccacgcgccacaccgtcgatccggaccgccacatcgagcgggtcaccgagctgcaagaactcttcctcacgcgcgtcgggctcgacatcggcaaggtgtgggtcgcggacgacggcgccgcggtggcggtctggaccacgccggagagcgtcgaagcgggggcggtgttcgccgagatcggcccgcgcatggccgagttgagcggttcccggctggccgcgcagcaacagatggaaggcctcctggcgccgcaccggcccaaggagcccgcgtggttcctggccaccgtcggcgtctcgcccgaccaccagggcaagggtctgggcagcgccgtcgtgctccccggagtggaggcggccgagcgcgccggggtgcccgccttcctggagacctccgcgccccgcaacctccccttctacgagcggctcggcttcaccgtcaccgccgacgtcgaggtgcccgaaggaccgcgcacctggtgcatgacccgcaagcccggtgcctga

SEQ ID NO: 32580 - DNA, 2610 bp, synthetic construct
  source 1..2610: mol_type = other DNA
atggccttaccagtgaccgccttgctcctgccgctggccttgctgctccacgccgccaggccggacatccagatgacacagagccctagcagcctgtctgccagcgtgggagacagagtgaccatcacatgcaaggccagcgaccacatcaacaactggctggcctggtatcagcagaagcctggacaggcccctaagctgctgatctacggcgctaccacactggaaacaggcgtgcccagcagattttctggcagcggctctggcaccgactacaccctgacaatatccagcctccagcctgaggacttcgccacctactactgtcagcagagctggaacaccccttggacattcggccagggcaccaagctggaaatcaagagactcgaggacctgaagaacgtgttcccacctgaggtggccgtgttcgagcctagcgaggccgagatcagccacacccagaaagccaccctcgtgtgcctggctaccggcttctaccccgaccatgtggaactgtcttggtgggtcaacggcaaagaggtgcacagcggcgtgtgtaccgacccccagccactgaaagaacagcccgccctgaacgacagccggtactgcctgagcagcagactgagagtgtccgccaccttctggcagaacccccggaaccacttcagatgccaggtgcagttctacggcctgagcgagaacgacgagtggacccaggacagagccaagcccgtgacccagatcgtgtctgccgaagcctggggcagagccgattgcggctttaccagcgagagctaccagcagggcgtgctgagcgccaccatcctgtacttgttgctgctgctgaagtccgtggtgtacttcgccatcatcacatgctgcctgctgcggagaaccgccttctgctgcaacggcgagaagtctagggccaagcgatctggatctggagcaacaaacttctcactactcaaacaagcaggtgacgtggaggagaatcccgggcctactagtatggactggatttggcgcatccttttccttgtcggcgctgctaccggcgcgcattccttcgaacaagttcagcttcaacagcctggcgctgagctggtcaaacctggcgcttctgtgaagatgagctgcaaagccagcggctacgccttcagcagctactggatcaactggatgaagcagaaacccggccagggactcgaatggatcggccaaatctatcccggcgacggcgacaccaactacaacggcaagttcaagggcagagccacactgaccgccgatacctctagcagcacagcctacatgcagctgagcagcctgaccagcgaagatagcgccgtgtacttctgtgcccggtccatcacaacagtcgtgggctgcgctatggactattggggccagggaacaagcgtgaccgtgtctagtacgcgtagccagcctcacaccaagcccagcgtgttcgtgatgaagaacggcaccaacgtggcctgcctcgtgaaagagttctaccccaaggacatcaggatcaacctggtgtccagcaagaagatcaccgagttcgaccccgccatcgtgatctcccccagcggcaagtacaacgccgtgaagctggggaagtacgaggacagcaacagcgtgacctgctccgtgcagcacgacaacaagaccgtgcacagcaccgactttgaagtgaaaaccgactccaccgaccacgtgaagcccaaagagacagagaacaccaagcagcccagcaagagctgccacaagcccaaggccatcgtgcacaccgagaaagtgaacatgatgagcctgaccgtgctgggcttcagaatcctgctgctgaaagtggccggctttaacctgctgatgaccctgcggctgtggtccagccgcgccaagagaagcggatctggcgtgaagcagaccctgaatttcgacctgctgaagctggctggcgacgtggaatccaacccaggcccttctagaggccatatgaccgagtacaagcccacggtgcgcctcgccacccgcgacgacgtccccagggccgtacgcaccctcgccgccgcgttcgccgactaccccgccacgcgccacaccgtcgatccggaccgccacatcgagcgggtcaccgagctgcaagaactcttcctcacgcgcgtcgggctcgacatcggcaaggtgtgggtcgcggacgacggcgccgcggtggcggtctggaccacgccggagagcgtcgaagcgggggcggtgttcgccgagatcggcccgcgcatggccgagttgagcggttcccggctggccgcgcagcaacagatggaaggcctcctggcgccgcaccggcccaaggagcccgcgtggttcctggccaccgtcggcgtctcgcccgaccaccagggcaagggtctgggcagcgccgtcgtgctccccggagtggaggcggccgagcgcgccggggtgcccgccttcctggagacctccgcgccccgcaacctccccttctacgagcggctcggcttcaccgtcaccgccgacgtcgaggtgcccgaaggaccgcgcacctggtgcatgacccgcaagcccggtgcctga

SEQ ID NO: 32581 - DNA, 1872 bp, synthetic construct
  source 1..1872: mol_type = other DNA
atggccttaccagtgaccgccttgctcctgccgctggccttgctgctccacgccgccaggccggacatccagatgacacagagccctagcagcctgtctgccagcgtgggagacagagtgaccatcacatgcaaggccagcgaccacatcaacaactggctggcctggtatcagcagaagcctggacaggcccctaagctgctgatctacggcgctaccacactggaaacaggcgtgcccagcagattttctggcagcggctctggcaccgactacaccctgacaatatccagcctccagcctgaggacttcgccacctactactgtcagcagagctggaacaccccttggacattcggccagggcaccaagctggaaatcaagagactcgaggacctgaagaacgtgttcccacctgaggtggccgtgttcgagcctagcgaggccgagatcagccacacccagaaagccaccctcgtgtgcctggctaccggcttctaccccgaccgtgtggaactgtcttggtgggtcaacggcaaagaggtgcacagcggcgtgtgtaccgacccccagccactgaaagaacagcccgccctgaacgacagccggtactgcctgagcagcagactgagagtgtccgccaccttctggcagaacccccggaaccacttcagatgccaggtgcagttctacggcctgagcgagaacgacgagtggacccaggacagagccaagcccgtgacccagatcgtgtctgccgaagcctggggcagagccgattgcggctttaccagcgagagctaccagcagggcgtgctgagcgcctactacatgtacttgttgctgctgctgaagtccgtggtgtacttcgccatcatcacatgctgcctgctgcggagaaccgccttctgctgcaacggcgagaagtctagggccaagcgatctggatctggagcaacaaacttctcactactcaaacaagcaggtgacgtggaggagaatcccgggcctactagtatggactggatttggcgcatccttttccttgtcggcgctgctaccggcgcgcattccttcgaacaagttcagcttcaacagcctggcgctgagctggtcaaacctggcgcttctgtgaagatgagctgcaaagccagcggctacgccttcagcagctactggatcaactggatgaagcagaaacccggccagggactcgaatggatcggccaaatctatcccggcgacggcgacaccaactacaacggcaagttcaagggcagagccacactgaccgccgatacctctagcagcacagcctacatgcagctgagcagcctgaccagcgaagatagcgccgtgtacttctgtgcccggtccatcacaacagtcgtgggctgcgctatggactattggggccagggaacaagcgtgaccgtgtctagtacgcgtatccagaaccctgatcctgccgtgtaccagctgcgggatagcaagagcagcgacaagagcgtgtgtctgttcaccgacttcgacagccagaccaacgtgtcccagagcaaggactccgacgtgtacatcaccgataagtgcgtgctggacatgcggagcatggacttcaagagcaactccgccgtggcctggtccaacaagtccgatttcgcctgcgccaacgccttcaacaacagcattatccccgaggacacattcttcccaagccccgagagcagctgcgacgtgaagctggtggaaaagagcttcgagacagacaccaacctgaacttccagaacctgagcgtgatcggcttcagaatcctgctgctgaaagtggccggctttaacctgctgatgaccctgcggctgtggtccagctaa

SEQ ID NO: 32582 - DNA, 1872 bp, synthetic construct
  source 1..1872: mol_type = other DNA
atggccttaccagtgaccgccttgctcctgccgctggccttgctgctccacgccgccaggccggacatccagatgacacagagccctagcagcctgtctgccagcgtgggagacagagtgaccatcacatgcaaggccagcgaccacatcaacaactggctggcctggtatcagcagaagcctggacaggcccctaagctgctgatctacggcgctaccacactggaaacaggcgtgcccagcagattttctggcagcggctctggcaccgactacaccctgacaatatccagcctccagcctgaggacttcgccacctactactgtcagcagagctggaacaccccttggacattcggccagggcaccaagctggaaatcaagagactcgaggacctgaagaacgtgttcccacctgaggtggccgtgttcgagcctagcgaggccgagatcagccacacccagaaagccaccctcgtgtgcctggctaccggcttctaccccgaccatgtggaactgtcttggtgggtcaacggcaaagaggtgcacagcggcgtgtgtaccgacccccagccactgaaagaacagcccgccctgaacgacagccggtactgcctgagcagcagactgagagtgtccgccaccttctggcagaacccccggaaccacttcagatgccaggtgcagttctacggcctgagcgagaacgacgagtggacccaggacagagccaagcccgtgacccagatcgtgtctgccgaagcctggggcagagccgattgcggctttaccagcgagagctaccagcagggcgtgctgagcgccaccatcctgtacttgttgctgctgctgaagtccgtggtgtacttcgccatcatcacatgctgcctgctgcggagaaccgccttctgctgcaacggcgagaagtctagggccaagcgatctggatctggagcaacaaacttctcactactcaaacaagcaggtgacgtggaggagaatcccgggcctactagtatggactggatttggcgcatccttttccttgtcggcgctgctaccggcgcgcattccttcgaacaagttcagcttcaacagcctggcgctgagctggtcaaacctggcgcttctgtgaagatgagctgcaaagccagcggctacgccttcagcagctactggatcaactggatgaagcagaaacccggccagggactcgaatggatcggccaaatctatcccggcgacggcgacaccaactacaacggcaagttcaagggcagagccacactgaccgccgatacctctagcagcacagcctacatgcagctgagcagcctgaccagcgaagatagcgccgtgtacttctgtgcccggtccatcacaacagtcgtgggctgcgctatggactattggggccagggaacaagcgtgaccgtgtctagtacgcgtatccagaaccctgatcctgccgtgtaccagctgcgggatagcaagagcagcgacaagagcgtgtgtctgttcaccgacttcgacagccagaccaacgtgtcccagagcaaggactccgacgtgtacatcaccgataagtgcgtgctggacatgcggagcatggacttcaagagcaactccgccgtggcctggtccaacaagtccgatttcgcctgcgccaacgccttcaacaacagcattatccccgaggacacattcttcccaagccccgagagcagctgcgacgtgaagctggtggaaaagagcttcgagacagacaccaacctgaacttccagaacctgagcgtgatcggcttcagaatcctgctgctgaaagtggccggctttaacctgctgatgaccctgcggctgtggtccagctaa

SEQ ID NO: 32583 - DNA, 2028 bp, synthetic construct
  source 1..2028: mol_type = other DNA
atggccttaccagtgaccgccttgctcctgccgctggccttgctgctccacgccgccaggccggacatccagatgacacagagccctagcagcctgtctgccagcgtgggagacagagtgaccatcacatgcaaggccagcgaccacatcaacaactggctggcctggtatcagcagaagcctggacaggcccctaagctgctgatctacggcgctaccacactggaaacaggcgtgcccagcagattttctggcagcggctctggcaccgactacaccctgacaatatccagcctccagcctgaggacttcgccacctactactgtcagcagagctggaacaccccttggacattcggccagggcaccaagctggaaatcaagagactcgagggacagcctaaggccaatcctaccgtgacactgttccctccaagcagcgaagaactccaggccaacaaggccacacttgtgtgcctgatctccgacttctaccctggggctgtgacagtggcttggaaggccgatggatctcctgtgaaagccggcgtggaaaccaccaagccatccaagcagagcaacaacaaatacgccgccagctcctacctgagcctgacacctgagcagtggaagtcccacagatcctacagctgccaagtgacccacgaaggcagcaccgtggaaaagacagtggcccctacagagtgcagcggatccggcaagggaacacagctgagcgtggtggacttcctgcctactacagcccagcctaccaagaagtctaccctgaagaaaagagtgtgcaggctgcccagacctgagacacagaaaggccctctgtgcagccctatcacactgggattgctggtggctggcgtgctggtgctgctggtttctctgggagttgccatccacctgtgctgtagaagaaggcgggccagactgcggtttatgaagcagttctacaagactagtatggactggatttggcgcatccttttccttgtcggcgctgctaccggcgcgcattccttcgaacaagttcagcttcaacagcctggcgctgagctggtcaaacctggcgcttctgtgaagatgagctgcaaagccagcggctacgccttcagcagctactggatcaactggatgaagcagaaacccggccagggactcgaatggatcggccaaatctatcccggcgacggcgacaccaactacaacggcaagttcaagggcagagccacactgaccgccgatacctctagcagcacagcctacatgcagctgagcagcctgaccagcgaagatagcgccgtgtacttctgtgcccggtccatcacaacagtcgtgggctgcgctatggactattggggccagggaacaagcgtgaccgtgtctagtacgcgtgcctctacaaagggaccctccgtgtttcctctggctcccagcagcaagtctacaagcggaggaacagccgctctgggctgcctggtcaaggattactttcccgagcctgtgaccgtgtcctggaatagcggagcactgacaagcggcgtgcacacctttccagccgtgctgcaaagcagcggcctgtactctctgagcagcgtggtcacagtgcctagctctagcctgggcacccagacctacatctgcaatgtgaaccacaagcctagcaacaccaaggtggacaagagagtggaacccaagagctgtggtaccgccaagcctacaacaacccctgctcctagacctcctacaccagctcctacaatcgccagccagcctctgtctctcagacccgaagcctgtagacctgctgctggcggagctgtgcataccagaggactggatttcgcctgcgacatctacatctgggctcctctggctggcacatgtggcgtgctgctgctgtccctggtcatcaccctgtactgcaaccaccggaacaggcggagagtgtgcaagtgccctagacctgtggtcaagagcggcgacaagcctagcctgagcgccagatatgtttaa

SEQ ID NO: 32584 - DNA, 2571 bp, synthetic construct
  source 1..2571: mol_type = other DNA
atggccttaccagtgaccgccttgctcctgccgctggccttgctgctccacgccgccaggccggacatccagatgacacagagccctagcagcctgtctgccagcgtgggagacagagtgaccatcacatgcaaggccagcgaccacatcaacaactggctggcctggtatcagcagaagcctggacaggcccctaagctgctgatctacggcgctaccacactggaaacaggcgtgcccagcagattttctggcagcggctctggcaccgactacaccctgacaatatccagcctccagcctgaggacttcgccacctactactgtcagcagagctggaacaccccttggacattcggccagggcaccaagctggaaatcaagagactcgaggacctgaagaacgtgttcccacctgaggtggccgtgttcgagcctagcgaggccgagatcagccacacccagaaagccaccctcgtgtgcctggctaccggcttctaccccgaccatgtggaactgtcttggtgggtcaacggcaaagaggtgcacagcggcgtgtgtaccgacccccagccactgaaagaacagcccgccctgaacgacagccggtactgcctgagcagcagactgagagtgtccgccaccttctggcagaacccccggaaccacttcagatgccaggtgcagttctacggcctgagcgagaacgacgagtggacccaggacagagccaagcccgtgacccagatcgtgtctgccgaagcctggggcagagccgattgcggctttaccagcgagagctaccagcagggcgtgctgagcgcctactacatgtacttgttgctgctgctgaagtccgtggtgtacttcgccatcatcacatgctgcctgctgcggagaaccgccttctgctgcaacggcgagaagtctagggccaagcgatctggatctggagcaacaaacttctcactactcaaacaagcaggtgacgtggaggagaatcccgggcctactagtatggactggatttggcgcatccttttccttgtcggcgctgctaccggcgcgcattccttcgaacaagttcagcttcaacagcctggcgctgagctggtcaaacctggcgcttctgtgaagatgagctgcaaagccagcggctacgccttcagcagctactggatcaactggatgaagcagaaacccggccagggactcgaatggatcggccaaatctatcccggcgacggcgacaccaactacaacggcaagttcaagggcagagccacactgaccgccgatacctctagcagcacagcctacatgcagctgagcagcctgaccagcgaagatagcgccgtgtacttctgtgcccggtccatcacaacagtcgtgggctgcgctatggactattggggccagggaacaagcgtgaccgtgtctagtacgcgtatccagaaccctgatcctgccgtgtaccagctgcgggatagcaagagcagcgacaagagcgtgtgtctgttcaccgacttcgacagccagaccaacgtgtcccagagcaaggactccgacgtgtacatcaccgataagtgcgtgctggacatgcggagcatggacttcaagagcaactccgccgtggcctggtccaacaagtccgatttcgcctgcgccaacgccttcaacaacagcattatccccgaggacacattcttcccaagccccgagagcagctgcgacgtgaagctggtggaaaagagcttcgagacagacaccaacctgaacttccagaacctgagcgtgatcggcttcagaatcctgctgctgaaagtggccggctttaacctgctgatgaccctgcggctgtggtccagccgcgccaagagaagcggatctggcgtgaagcagaccctgaatttcgacctgctgaagctggctggcgacgtggaatccaacccaggcccttctagaggccatatgaccgagtacaagcccacggtgcgcctcgccacccgcgacgacgtccccagggccgtacgcaccctcgccgccgcgttcgccgactaccccgccacgcgccacaccgtcgatccggaccgccacatcgagcgggtcaccgagctgcaagaactcttcctcacgcgcgtcgggctcgacatcggcaaggtgtgggtcgcggacgacggcgccgcggtggcggtctggaccacgccggagagcgtcgaagcgggggcggtgttcgccgagatcggcccgcgcatggccgagttgagcggttcccggctggccgcgcagcaacagatggaaggcctcctggcgccgcaccggcccaaggagcccgcgtggttcctggccaccgtcggcgtctcgcccgaccaccagggcaagggtctgggcagcgccgtcgtgctccccggagtggaggcggccgagcgcgccggggtgcccgccttcctggagacctccgcgccccgcaacctccccttctacgagcggctcggcttcaccgtcaccgccgacgtcgaggtgcccgaaggaccgcgcacctggtgcatgacccgcaagcccggtgcctga

SEQ ID NO: 32585 - DNA, 2604 bp, synthetic construct
  source 1..2604: mol_type = other DNA
atggccttaccagtgaccgccttgctcctgccgctggccttgctgctccacgccgccaggccggacatccagatgacacagagccctagcagcctgtctgccagcgtgggagacagagtgaccatcacatgcaaggccagcgaccacatcaacaactggctggcctggtatcagcagaagcctggacaggcccctaagctgctgatctacggcgctaccacactggaaacaggcgtgcccagcagattttctggcagcggctctggcaccgactacaccctgacaatatccagcctccagcctgaggacttcgccacctactactgtcagcagagctggaacaccccttggacattcggccagggcaccaagctggaaatcaagagactcgaggacctgaagaacgtgttcccacctgaggtggccgtgttcgagcctagcgaggccgagatcagccacacccagaaagccaccctcgtgtgcctggctaccggcttctaccccgaccatgtggaactgtcttggtgggtcaacggcaaagaggtgcacagcggcgtgtgtaccgacccccagccactgaaagaacagcccgccctgaacgacagccggtactgcctgagcagcagactgagagtgtccgccaccttctggcagaacccccggaaccacttcagatgccaggtgcagttctacggcctgagcgagaacgacgagtggacccaggacagagccaagcccgtgacccagatcgtgtctgccgaagcctggggcagagccgattgcggctttaccagcgagagctaccagcagggcgtgctgagcgcctactacatgtacttgttgctgctgctgaagtccgtggtgtacttcgccatcatcacatgctgcctgctgcggagaaccgccttctgctgcaacggcgagaagtctagggccaagcgatctggatctggagcaacaaacttctcactactcaaacaagcaggtgacgtggaggagaatcccgggcctactagtatggactggatttggcgcatccttttccttgtcggcgctgctaccggcgcgcattccttcgaacaagttcagcttcaacagcctggcgctgagctggtcaaacctggcgcttctgtgaagatgagctgcaaagccagcggctacgccttcagcagctactggatcaactggatgaagcagaaacccggccagggactcgaatggatcggccaaatctatcccggcgacggcgacaccaactacaacggcaagttcaagggcagagccacactgaccgccgatacctctagcagcacagcctacatgcagctgagcagcctgaccagcgaagatagcgccgtgtacttctgtgcccggtccatcacaacagtcgtgggctgcgctatggactattggggccagggaacaagcgtgaccgtgtctagtacgcgtcctcacaccaagcccagcgtgttcgtgatgaagaacggcaccaacgtggcctgcctcgtgaaagagttctaccccaaggacatcaggatcaacctggtgtccagcaagaagatcaccgagttcgaccccgccatcgtgatctcccccagcggcaagtacaacgccgtgaagctggggaagtacgaggacagcaacagcgtgacctgctccgtgcagcacgacaacaagaccgtgcacagcaccgactttgaagtgaaaaccgactccaccgaccacgtgaagcccaaagagacagagaacaccaagcagcccagcaagagctgccacaagcccaaggccatcgtgcacaccgagaaagtgaacatgatgagcctgaccgtgctgggcctgcggatgctgttcgccaaaaccgtggccgtgaacttcctgctgaccgccaagctgttcttcctccgcgccaagagaagcggatctggcgtgaagcagaccctgaatttcgacctgctgaagctggctggcgacgtggaatccaacccaggcccttctagaggccatatgaccgagtacaagcccacggtgcgcctcgccacccgcgacgacgtccccagggccgtacgcaccctcgccgccgcgttcgccgactaccccgccacgcgccacaccgtcgatccggaccgccacatcgagcgggtcaccgagctgcaagaactcttcctcacgcgcgtcgggctcgacatcggcaaggtgtgggtcgcggacgacggcgccgcggtggcggtctggaccacgccggagagcgtcgaagcgggggcggtgttcgccgagatcggcccgcgcatggccgagttgagcggttcccggctggccgcgcagcaacagatggaaggcctcctggcgccgcaccggcccaaggagcccgcgtggttcctggccaccgtcggcgtctcgcccgaccaccagggcaagggtctgggcagcgccgtcgtgctccccggagtggaggcggccgagcgcgccggggtgcccgccttcctggagacctccgcgccccgcaacctccccttctacgagcggctcggcttcaccgtcaccgccgacgtcgaggtgcccgaaggaccgcgcacctggtgcatgacccgcaagcccggtgcctga

SEQ ID NO: 32586 - DNA, 1890 bp, synthetic construct
  source 1..1890: mol_type = other DNA
atggccttaccagtgaccgccttgctcctgccgctggccttgctgctccacgccgccaggccggacatccagatgacacagagccctagcagcctgtctgccagcgtgggagacagagtgaccatcacatgcaaggccagcgaccacatcaacaactggctggcctggtatcagcagaagcctggacaggcccctaagctgctgatctacggcgctaccacactggaaacaggcgtgcccagcagattttctggcagcggctctggcaccgactacaccctgacaatatccagcctccagcctgaggacttcgccacctactactgtcagcagagctggaacaccccttggacattcggccagggcaccaagctggaaatcaagagactcgaggacaagcagctggacgccgacgtgtcccccaagcctaccatcttcctgccctctatcgccgagacaaagctccagaaggccggcacctacctgtgcctgctggaaaagttcttcccagatgtgattaagatccactggcaggaaaagaagtccaacaccatcctgggcagccaggaaggcaacaccatgaagaccaacgacacctacatgaagttcagctggctgaccgtgcccgagaagtccctggacaaagaacacagatgcatcgtgcggcacgaaaacaacaagaacggcgtggaccaggaaatcatcttcccacccatcaagaccgatgtgattacaatggaccccaaggacaactgctccaaggacgccaacgataccctgctgctccagctgaccaacaccagcgcctactacatgtacgagatcctgctgggcaaggccaccctgtacgccgtgctggtgtctgccctggtgctgatggctatggtcaagcggaaggacagccggggaagggccaagcgatctggatctggagcaacaaacttctcactactcaaacaagcaggtgacgtggaggagaatcccgggcctactagtatggactggatttggcgcatccttttccttgtcggcgctgctaccggcgcgcattccttcgaacaagttcagcttcaacagcctggcgctgagctggtcaaacctggcgcttctgtgaagatgagctgcaaagccagcggctacgccttcagcagctactggatcaactggatgaagcagaaacccggccagggactcgaatggatcggccaaatctatcccggcgacggcgacaccaactacaacggcaagttcaagggcagagccacactgaccgccgatacctctagcagcacagcctacatgcagctgagcagcctgaccagcgaagatagcgccgtgtacttctgtgcccggtccatcacaacagtcgtgggctgcgctatggactattggggccagggaacaagcgtgaccgtgtctagtacgcgtagccagcctcacaccaagcccagcgtgttcgtgatgaagaacggcaccaacgtggcctgcctcgtgaaagagttctaccccaaggacatcaggatcaacctggtgtccagcaagaagatcaccgagttcgaccccgccatcgtgatctcccccagcggcaagtacaacgccgtgaagctggggaagtatgaggacagcaacagcgtgacctgctccgtgcagcacgacaacaagaccgtgcacagcaccgactttgaagtgaaaaccgactccaccgaccacgtgaagcccaaagagacagagaacaccaagcagcccagcaagagctgccacaagcccaaggccatcgtgcacaccgagaaagtgaacatgatgagcctgaccgtgatcggcttcagaatcctgctgctgaaagtggccggctttaacctgctgatgaccctgcggctgtggtccagctaa

SEQ ID NO: 32587 - DNA, 1890 bp, synthetic construct
  source 1..1890: mol_type = other DNA
atggccttaccagtgaccgccttgctcctgccgctggccttgctgctccacgccgccaggccggacatccagatgacacagagccctagcagcctgtctgccagcgtgggagacagagtgaccatcacatgcaaggccagcgaccacatcaacaactggctggcctggtatcagcagaagcctggacaggcccctaagctgctgatctacggcgctaccacactggaaacaggcgtgcccagcagattttctggcagcggctctggcaccgactacaccctgacaatatccagcctccagcctgaggacttcgccacctactactgtcagcagagctggaacaccccttggacattcggccagggcaccaagctggaaatcaagagactcgaggacaagcagctggacgccgacgtgtcccccaagcctaccatcttcctgccctctatcgccgagacaaagctccagaaggccggcacctacctgtgcctgctggaaaagttcttcccagatgtgattaagatccactggcaggaaaagaagtccaacaccatcctgggcagccaggaaggcaacaccatgaagaccaacgacacctacatgaagttcagctggctgaccgtgcccgagaagtccctggacaaagaacacagatgcatcgtgcggcacgaaaacaacaagaacggcgtggaccaggaaatcatcttcccacccatcaagaccgatgtgattacaatggaccccaaggacaactgctccaaggacgccaacgataccctgctgctccagctgaccaacaccagcgccaccatcctgtacgagatcctgctgggcaaggccaccctgtacgccgtgctggtgtctgccctggtgctgatggctatggtcaagcggaaggacagccggggaagggccaagcgatctggatctggagcaacaaacttctcactactcaaacaagcaggtgacgtggaggagaatcccgggcctactagtatggactggatttggcgcatccttttccttgtcggcgctgctaccggcgcgcattccttcgaacaagttcagcttcaacagcctggcgctgagctggtcaaacctggcgcttctgtgaagatgagctgcaaagccagcggctacgccttcagcagctactggatcaactggatgaagcagaaacccggccagggactcgaatggatcggccaaatctatcccggcgacggcgacaccaactacaacggcaagttcaagggcagagccacactgaccgccgatacctctagcagcacagcctacatgcagctgagcagcctgaccagcgaagatagcgccgtgtacttctgtgcccggtccatcacaacagtcgtgggctgcgctatggactattggggccagggaacaagcgtgaccgtgtctagtacgcgtagccagcctcacaccaagcccagcgtgttcgtgatgaagaacggcaccaacgtggcctgcctcgtgaaagagttctaccccaaggacatcaggatcaacctggtgtccagcaagaagatcaccgagttcgaccccgccatcgtgatctcccccagcggcaagtacaacgccgtgaagctggggaagtatgaggacagcaacagcgtgacctgctccgtgcagcacgacaacaagaccgtgcacagcaccgactttgaagtgaaaaccgactccaccgaccacgtgaagcccaaagagacagagaacaccaagcagcccagcaagagctgccacaagcccaaggccatcgtgcacaccgagaaagtgaacatgatgagcctgaccgtgatcggcttcagaatcctgctgctgaaagtggccggctttaacctgctgatgaccctgcggctgtggtccagctaa

SEQ ID NO: 32588 - DNA, 1890 bp, synthetic construct
  source 1..1890: mol_type = other DNA
atggccttaccagtgaccgccttgctcctgccgctggccttgctgctccacgccgccaggccggacatccagatgacacagagccctagcagcctgtctgccagcgtgggagacagagtgaccatcacatgcaaggccagcgaccacatcaacaactggctggcctggtatcagcagaagcctggacaggcccctaagctgctgatctacggcgctaccacactggaaacaggcgtgcccagcagattttctggcagcggctctggcaccgactacaccctgacaatatccagcctccagcctgaggacttcgccacctactactgtcagcagagctggaacaccccttggacattcggccagggcaccaagctggaaatcaagagactcgaggacaagcagctggacgccgacgtgtcccccaagcctaccatcttcctgccctctatcgccgagacaaagctccagaaggccggcacctacctgtgcctgctggaaaagttcttcccagatgtgattaagatccactggcaggaaaagaagtccaacaccatcctgggcagccaggaaggcaacaccatgaagaccaacgacacctacatgaagttcagctggctgaccgtgcccgagaagtccctggacaaagaacacagatgcatcgtgcggcacgaaaacaacaagaacggcgtggaccaggaaatcatcttcccacccatcaagaccgatgtgattacaatggaccccaaggacaactgctccaaggacgccaacgataccctgctgctccagctgaccaacaccagcgcctactacatgtacgagatcctgctgggcaaggccaccctgtacgccgtgctggtgtctgccctggtgctgatggctatggtcaagcggaaggacagccggggaagggccaagcgatctggatctggagcaacaaacttctcactactcaaacaagcaggtgacgtggaggagaatcccgggcctactagtatggactggatttggcgcatccttttccttgtcggcgctgctaccggcgcgcattccttcgaacaagttcagcttcaacagcctggcgctgagctggtcaaacctggcgcttctgtgaagatgagctgcaaagccagcggctacgccttcagcagctactggatcaactggatgaagcagaaacccggccagggactcgaatggatcggccaaatctatcccggcgacggcgacaccaactacaacggcaagttcaagggcagagccacactgaccgccgatacctctagcagcacagcctacatgcagctgagcagcctgaccagcgaagatagcgccgtgtacttctgtgcccggtccatcacaacagtcgtgggctgcgctatggactattggggccagggaacaagcgtgaccgtgtctagtacgcgtagccagcctcacaccaagcccagcgtgttcgtgatgaagaacggcaccaacgtggcctgcctcgtgaaagagttctaccccaaggacatcaggatcaacctggtgtccagcaagaagatcaccgagttcgaccccgccatcgtgatctcccccagcggcaagtacaacgccgtgaagctggggaagtacgaggacagcaacagcgtgacctgctccgtgcagcacgacaacaagaccgtgcacagcaccgactttgaagtgaaaaccgactccaccgaccacgtgaagcccaaagagacagagaacaccaagcagcccagcaagagctgccacaagcccaaggccatcgtgcacaccgagaaagtgaacatgatgagcctgaccgtgctgggcttcagaatcctgctgctgaaagtggccggctttaacctgctgatgaccctgcggctgtggtccagctaa

SEQ ID NO: 32589 - DNA, 1890 bp, synthetic construct
  source 1..1890: mol_type = other DNA
atggccttaccagtgaccgccttgctcctgccgctggccttgctgctccacgccgccaggccggacatccagatgacacagagccctagcagcctgtctgccagcgtgggagacagagtgaccatcacatgcaaggccagcgaccacatcaacaactggctggcctggtatcagcagaagcctggacaggcccctaagctgctgatctacggcgctaccacactggaaacaggcgtgcccagcagattttctggcagcggctctggcaccgactacaccctgacaatatccagcctccagcctgaggacttcgccacctactactgtcagcagagctggaacaccccttggacattcggccagggcaccaagctggaaatcaagagactcgaggacaagcagctggacgccgacgtgtcccccaagcctaccatcttcctgccctctatcgccgagacaaagctccagaaggccggcacctacctgtgcctgctggaaaagttcttcccagatgtgattaagatccactggcaggaaaagaagtccaacaccatcctgggcagccaggaaggcaacaccatgaagaccaacgacacctacatgaagttcagctggctgaccgtgcccgagaagtccctggacaaagaacacagatgcatcgtgcggcacgaaaacaacaagaacggcgtggaccaggaaatcatcttcccacccatcaagaccgatgtgattacaatggaccccaaggacaactgctccaaggacgccaacgataccctgctgctccagctgaccaacaccagcgccaccatcctgtacgagatcctgctgggcaaggccaccctgtacgccgtgctggtgtctgccctggtgctgatggctatggtcaagcggaaggacagccggggaagggccaagcgatctggatctggagcaacaaacttctcactactcaaacaagcaggtgacgtggaggagaatcccgggcctactagtatggactggatttggcgcatccttttccttgtcggcgctgctaccggcgcgcattccttcgaacaagttcagcttcaacagcctggcgctgagctggtcaaacctggcgcttctgtgaagatgagctgcaaagccagcggctacgccttcagcagctactggatcaactggatgaagcagaaacccggccagggactcgaatggatcggccaaatctatcccggcgacggcgacaccaactacaacggcaagttcaagggcagagccacactgaccgccgatacctctagcagcacagcctacatgcagctgagcagcctgaccagcgaagatagcgccgtgtacttctgtgcccggtccatcacaacagtcgtgggctgcgctatggactattggggccagggaacaagcgtgaccgtgtctagtacgcgtagccagcctcacaccaagcccagcgtgttcgtgatgaagaacggcaccaacgtggcctgcctcgtgaaagagttctaccccaaggacatcaggatcaacctggtgtccagcaagaagatcaccgagttcgaccccgccatcgtgatctcccccagcggcaagtacaacgccgtgaagctggggaagtacgaggacagcaacagcgtgacctgctccgtgcagcacgacaacaagaccgtgcacagcaccgactttgaagtgaaaaccgactccaccgaccacgtgaagcccaaagagacagagaacaccaagcagcccagcaagagctgccacaagcccaaggccatcgtgcacaccgagaaagtgaacatgatgagcctgaccgtgctgggcttcagaatcctgctgctgaaagtggccggctttaacctgctgatgaccctgcggctgtggtccagctaa

SEQ ID NO: 32590 - DNA, 1872 bp, synthetic construct
  source 1..1872: mol_type = other DNA
atggccttaccagtgaccgccttgctcctgccgctggccttgctgctccacgccgccaggccggacatccagatgacacagagccctagcagcctgtctgccagcgtgggagacagagtgaccatcacatgcaaggccagcgaccacatcaacaactggctggcctggtatcagcagaagcctggacaggcccctaagctgctgatctacggcgctaccacactggaaacaggcgtgcccagcagattttctggcagcggctctggcaccgactacaccctgacaatatccagcctccagcctgaggacttcgccacctactactgtcagcagagctggaacaccccttggacattcggccagggcaccaagctggaaatcaagagactcgaggacctgaagaacgtgttcccacctgaggtggccgtgttcgagcctagcgaggccgagatcagccacacccagaaagccaccctcgtgtgcctggctaccggcttctaccccgaccatgtggaactgtcttggtgggtcaacggcaaagaggtgcacagcggcgtgtgtaccgacccccagccactgaaagaacagcccgccctgaacgacagccggtactgcctgagcagcagactgagagtgtccgccaccttctggcagaacccccggaaccacttcagatgccaggtgcagttctacggcctgagcgagaacgacgagtggacccaggacagagccaagcccgtgacccagatcgtgtctgccgaagcctggggcagagccgattgcggctttaccagcgagagctaccagcagggcgtgctgagcgccaccatcctgtacttgttgctgctgctgaagtccgtggtgtacttcgccatcatcacatgctgcctgctgcggagaaccgccttctgctgcaacggcgagaagtctagggccaagcgatctggatctggagcaacaaacttctcactactcaaacaagcaggtgacgtggaggagaatcccgggcctactagtatggactggatttggcgcatccttttccttgtcggcgctgctaccggcgcgcattccttcgaacaagttcagcttcaacagcctggcgctgagctggtcaaacctggcgcttctgtgaagatgagctgcaaagccagcggctacgccttcagcagctactggatcaactggatgaagcagaaacccggccagggactcgaatggatcggccaaatctatcccggcgacggcgacaccaactacaacggcaagttcaagggcagagccacactgaccgccgatacctctagcagcacagcctacatgcagctgagcagcctgaccagcgaagatagcgccgtgtacttctgtgcccggtccatcacaacagtcgtgggctgcgctatggactattggggccagggaacaagcgtgaccgtgtctagtacgcgtatccagaaccctgatcctgccgtgtaccagctgcgggatagcaagagcagcgacaagagcgtgtgtctgttcaccgacttcgacagccagaccaacgtgtcccagagcaaggactccgacgtgtacatcaccgataagtgcgtgctggacatgcggagcatggacttcaagagcaactccgccgtggcctggtccaacaagtccgatttcgcctgcgccaacgccttcaacaacagcattatccccgaggacacattcttcccaagccccgagagcagctgcgacgtgaagctggtggaaaagagcttcgagacagacaccaacctgaacttccagaacctgagcgtgatcggcctgcggatgctgttcgccaaaaccgtggccgtgaacttcctgctgaccgccaagctgttcttcctctaa

SEQ ID NO: 32591 - DNA, 1986 bp, synthetic construct
  source 1..1986: mol_type = other DNA
atggccttaccagtgaccgccttgctcctgccgctggccttgctgctccacgccgccaggccggacatccagatgacacagagccctagcagcctgtctgccagcgtgggagacagagtgaccatcacatgcaaggccagcgaccacatcaacaactggctggcctggtatcagcagaagcctggacaggcccctaagctgctgatctacggcgctaccacactggaaacaggcgtgcccagcagattttctggcagcggctctggcaccgactacaccctgacaatatccagcctccagcctgaggacttcgccacctactactgtcagcagagctggaacaccccttggacattcggccagggcaccaagctggaaatcaagagactcgaggacctgaagaacgtgttcccacctgaggtggccgtgttcgagcctagcgaggccgagatcagccacacccagaaagccaccctcgtgtgcctggctaccggcttctaccccgaccatgtggaactgtcttggtgggtcaacggcaaagaggtgcacagcggcgtgtctaccgacccccagccactgaaagaacagcccgccctgaacgacagccggtactgcctgagcagcagactgagagtgtccgccaccttctggcagaacccccggaaccacttcagatgccaggtgcagttctacggcctgagcgagaacgacgagtggacccaggacagagccaagcccgtgacccagatcgtgtctgccgaagcctggggcagagccgattgcggatcctccaaggacgccaacgataccctgctgctccagctgaccaacaccagcgcctactacatgtacttgttgctgctgctgaagtccgtggtgtacttcgccatcatcacatgctgcctgctgcggagaaccgccttctgctgcaacggcgagaagtctagggccaagcgatctggatctggagcaacaaacttctcactactcaaacaagcaggtgacgtggaggagaatcccgggcctactagtatggactggatttggcgcatccttttccttgtcggcgctgctaccggcgcgcattccttcgaacaagttcagcttcaacagcctggcgctgagctggtcaaacctggcgcttctgtgaagatgagctgcaaagccagcggctacgccttcagcagctactggatcaactggatgaagcagaaacccggccagggactcgaatggatcggccaaatctatcccggcgacggcgacaccaactacaacggcaagttcaagggcagagccacactgaccgccgatacctctagcagcacagcctacatgcagctgagcagcctgaccagcgaagatagcgccgtgtacttctgtgcccggtccatcacaacagtcgtgggctgcgctatggactattggggccagggaacaagcgtgaccgtgtctagtacgcgtgcgtccactaagggtccgtcagtcttcccgctggcgccctgttcccgcagcacgagtgaatctaccgccgcccttgggtgcttggtaaaagactattttcctgagcccgttacagtatcatggaacagcggggctctgactagcggggtgcatacgttccctgcggttctgcaatctagcggactgtattctctctccagtgttgtgaccgtgccaagctccagcctcggtactaaaacttatacatgtaatgtggatcataaaccttcaaataccaaggttgacaaaagggtagagagtaagtacggtggtaccgaagtgaaaaccgactccaccgaccacgtgaagcccaaagagacagagaacaccaagcagcccagcaagagctgccacaagcccaaggccatcgtgcacaccgagaaagtgaacatgatgagcctgaccgtgctgggcctgcggatgctgttcgccaaaaccgtggccgtgaacttcctgctgaccgccaagctgttcttcctctaa

SEQ ID NO: 32592 - DNA, 1959 bp, synthetic construct
  source 1..1959: mol_type = other DNA
atggccttaccagtgaccgccttgctcctgccgctggccttgctgctccacgccgccaggccggacatccagatgacacagagccctagcagcctgtctgccagcgtgggagacagagtgaccatcacatgcaaggccagcgaccacatcaacaactggctggcctggtatcagcagaagcctggacaggcccctaagctgctgatctacggcgctaccacactggaaacaggcgtgcccagcagattttctggcagcggctctggcaccgactacaccctgacaatatccagcctccagcctgaggacttcgccacctactactgtcagcagagctggaacaccccttggacattcggccagggcaccaagctggaaatcaagagactcgaggacctgaagaacgtgttcccacctgaggtggccgtgttcgagcctagcgaggccgagatcagccacacccagaaagccaccctcgtgtgcctggctaccggcttctaccccgaccatgtggaactgtcttggtgggtcaacggcaaagaggtgcacagcggcgtgtctaccgacccccagccactgaaagaacagcccgccctgaacgacagccggtactgcctgagcagcagactgagagtgtccgccaccttctggcagaacccccggaaccacttcagatgccaggtgcagttctacggcctgagcgagaacgacgagtggacccaggacagagccaagcccgtgacccagatcgtgtctgccgaagcctggggcagagccgattgcggatcctccaaggacgccaacgataccctgctgctccagctgaccaacaccagcgcctactacatgtacttgttgctgctgctgaagtccgtggtgtacttcgccatcatcacatgctgcctgctgcggagaaccgccttctgctgcaacggcgagaagtctagggccaagcgatctggatctggagcaacaaacttctcactactcaaacaagcaggtgacgtggaggagaatcccgggcctactagtatggactggatttggcgcatccttttccttgtcggcgctgctaccggcgcgcattccttcgaacaagttcagcttcaacagcctggcgctgagctggtcaaacctggcgcttctgtgaagatgagctgcaaagccagcggctacgccttcagcagctactggatcaactggatgaagcagaaacccggccagggactcgaatggatcggccaaatctatcccggcgacggcgacaccaactacaacggcaagttcaagggcagagccacactgaccgccgatacctctagcagcacagcctacatgcagctgagcagcctgaccagcgaagatagcgccgtgtacttctgtgcccggtccatcacaacagtcgtgggctgcgctatggactattggggccagggaacaagcgtgaccgtgtctagtacgcgtatccagaaccctgatcctgccgtgtaccagctgcgggatagcaagagcagcgacaagagcgtgtgtctgttcaccgacttcgacagccagaccaacgtgtcccagagcaaggactccgacgtgtacatcaccgataagaccgtgctggacatgcggagcatggacttcaagagcaactccgccgtggcctggtccaacaagtccgatttcgcctgcgccaacgccttcaacaacagcattatccccgaggacacattcttcccaagccccgagagcagctgcggtaccgaagtgaaaaccgactccaccgaccacgtgaagcccaaagagacagagaacaccaagcagcccagcaagagctgccacaagcccaaggccatcgtgcacaccgagaaagtgaacatgatgagcctgaccgtgctgggcctgcggatgctgttcgccaaaaccgtggccgtgaacttcctgctgaccgccaagctgttcttcctctaa

SEQ ID NO: 32593 - DNA, 3246 bp, synthetic construct
  source 1..3246: mol_type = other DNA
atggccttaccagtgaccgccttgctcctgccgctggccttgctgctccacgccgccaggccggacatccagatgacacagagccctagcagcctgtctgccagcgtgggagacagagtgaccatcacatgcaaggccagcgaccacatcaacaactggctggcctggtatcagcagaagcctggacaggcccctaagctgctgatctacggcgctaccacactggaaacaggcgtgcccagcagattttctggcagcggctctggcaccgactacaccctgacaatatccagcctccagcctgaggacttcgccacctactactgtcagcagagctggaacaccccttggacattcggccagggcaccaagctggaaatcaagagactcgaggacctgaagaacgtgttcccacctgaggtggccgtgttcgagcctagcgaggccgagatcagccacacccagaaagccaccctcgtgtgcctggctaccggcttctaccccgaccatgtggaactgtcttggtgggtcaacggcaaagaggtgcacagcggcgtgtgtaccgacccccagccactgaaagaacagcccgccctgaacgacagccggtactgcctgagcagcagactgagagtgtccgccaccttctggcagaacccccggaaccacttcagatgccaggtgcagttctacggcctgagcgagaacgacgagtggacccaggacagagccaagcccgtgacccagatcgtgtctgccgaagcctggggcagagccgattgcggctttaccagcgagagctaccagcagggcgtgctgagcgccaccatcctgtacgagatcctgctgggcaaggccaccctgtacgccgtgctggtgtctgccctggtgctgatggctatggtcaagcggaaggacagccggggaagggccaagcgatctggatctggagcaacaaacttctcactactcaaacaagcaggtgacgtggaggagaatcccgggcctactagtgccaccatggactggatttggcgcatccttttccttgtcggcgctgctaccggcgcccattccgggcccggcatgagaaccgaggacctgcctaaggccgtggtgttcctggaaccccagtggtacagagtgctggaaaaggacagcgtgaccctgaagtgccagggcgcctacagccccgaggacaatagcacccagtggttccacaacgagagcctgatctccagccaggccagcagctacttcatcgacgccgccaccgtggacgacagcggcgagtatagatgccagaccaacctgagcaccctgagcgaccccgtgcagctggaagtgcacatcggatggctgctgctgcaggcccccagatgggtgttcaaagaagaggaccccatccacctgagatgccactcttggaagaacaccgccctgcacaaagtgacctacctgcagaacggcaagggcagaaagtacttccaccacaacagcgacttctacatccccaaggccaccctgaaggactccggctcctacttctgcagaggcctcgtgggcagcaagaacgtgtccagcgagacagtgaacatcaccatcacccagggcctggccgtgtctaccatcagcagctttttcccacccggctaccagggatccggcggcggaggatctggcggaggcggatctgggggcggaggctctttcgaacaagttcagcttcaacagcctggcgctgagctggtcaaacctggcgcttctgtgaagatgagctgcaaagccagcggctacgccttcagcagctactggatcaactggatgaagcagaaacccggccagggactcgaatggatcggccaaatctatcccggcgacggcgacaccaactacaacggcaagttcaagggcagagccacactgaccgccgatacctctagcagcacagcctacatgcagctgagcagcctgaccagcgaagatagcgccgtgtacttctgtgcccggtccatcacaacagtcgtgggctgcgctatggactattggggccagggaacaagcgtgaccgtgtctagtacgcgtagccagcctcacaccaagcccagcgtgttcgtgatgaagaacggcaccaacgtggcctgcctcgtgaaagagttctaccccaaggacatcaggatcaacctggtgtccagcaagaagatcaccgagttcgaccccgccatcgtgatctcccccagcggcaagtacaacgccgtgaagctggggaagtacgaggacagcaacagcgtgacctgctccgtgcagcacgacaacaagaccgtgcacagcaccgactttgaagtgaaaaccgactccaccgaccacgtgaagcccaaagagacagagaacaccaagcagcccagcaagagctgccacaagcccaaggccatcgtgcacaccgagaaagtgaacatgatgagcctgaccgtgctgggcttcagaatcctgctgctgaaagtggccggctttaacctgctgatgaccctgcggctgtggtccagccgcgccaagagaagcggatctggcgtgaagcagaccctgaatttcgacctgctgaagctggctggcgacgtggaatccaacccaggcccttctagaggccatatgaccgagtacaagcccacggtgcgcctcgccacccgcgacgacgtccccagggccgtacgcaccctcgccgccgcgttcgccgactaccccgccacgcgccacaccgtcgatccggaccgccacatcgagcgggtcaccgagctgcaagaactcttcctcacgcgcgtcgggctcgacatcggcaaggtgtgggtcgcggacgacggcgccgcggtggcggtctggaccacgccggagagcgtcgaagcgggggcggtgttcgccgagatcggcccgcgcatggccgagttgagcggttcccggctggccgcgcagcaacagatggaaggcctcctggcgccgcaccggcccaaggagcccgcgtggttcctggccaccgtcggcgtctcgcccgaccaccagggcaagggtctgggcagcgccgtcgtgctccccggagtggaggcggccgagcgcgccggggtgcccgccttcctggagacctccgcgccccgcaacctccccttctacgagcggctcggcttcaccgtcaccgccgacgtcgaggtgcccgaaggaccgcgcacctggtgcatgacccgcaagcccggtgcctga

SEQ ID NO: 32594 - DNA, 2577 bp, synthetic construct
  source 1..2577: mol_type = other DNA
atggccttaccagtgaccgccttgctcctgccgctggccttgctgctccacgccgccaggccggacatccagatgacacagagccctagcagcctgtctgccagcgtgggagacagagtgaccatcacatgcaaggccagcgaccacatcaacaactggctggcctggtatcagcagaagcctggacaggcccctaagctgctgatctacggcgctaccacactggaaacaggcgtgcccagcagattttctggcagcggctctggcaccgactacaccctgacaatatccagcctccagcctgaggacttcgccacctactactgtcagcagagctggaacaccccttggacattcggccagggcaccaagctggaaatcaagagactcgaggccgacgtgtcccccaagcctaccatcttcctgccctctatcgccgagacaaagctccagaaggccggcacctacctgtgcctgctggaaaagttcttcccagatgtgattaagatccactggcaggaaaagaagtccaacaccatcctgggcagccaggaaggcaacaccatgaagaccaacgacacctacatgaagttcagctggctgaccgtgcccgagaagtccctggacaaagaacacagatgcatcgtgcggcacgaaaacaacaagaacggcgtggaccaggaaatcatcttcccacccatcaagaccgatgtgattacaatggaccccaaggacaactgctccaaggacgccaacgataccctgctgctccagctgaccaacaccagcgcctactacatgtacttgttgctgctgctgaagtccgtggtgtacttcgccatcatcacatgctgcctgctgcggagaaccgccttctgctgcaacggcgagaagtctagggccaagcgatctggatctggagcaacaaacttctcactactcaaacaagcaggtgacgtggaggagaatcccgggcctactagtatggactggatttggcgcatccttttccttgtcggcgctgctaccggcgcgcattccttcgaacaagttcagcttcaacagcctggcgctgagctggtcaaacctggcgcttctgtgaagatgagctgcaaagccagcggctacgccttcagcagctactggatcaactggatgaagcagaaacccggccagggactcgaatggatcggccaaatctatcccggcgacggcgacaccaactacaacggcaagttcaagggcagagccacactgaccgccgatacctctagcagcacagcctacatgcagctgagcagcctgaccagcgaagatagcgccgtgtacttctgtgcccggtccatcacaacagtcgtgggctgcgctatggactattggggccagggaacaagcgtgaccgtgtctagtacgcgtagccagcctcacaccaagcccagcgtgttcgtgatgaagaacggcaccaacgtggcctgcctcgtgaaagagttctaccccaaggacatcaggatcaacctggtgtccagcaagaagatcaccgagttcgaccccgccatcgtgatctcccccagcggcaagtacaacgccgtgaagctggggaagtacgaggacagcaacagcgtgacctgctccgtgcagcacgacaacaagaccgtgcacagcaccgactttgaagtgaaaaccgactccaccgaccacgtgaagcccaaagagacagagaacaccaagcagcccagcaagagctgccacaagcccaaggccatcgtgcacaccgagaaagtgaacatgatgagcctgaccgtgatcggcttcagaatcctgctgctgaaagtggccggctttaacctgctgatgaccctgcggctgtggtccagccgcgccaagagaagcggatctggcgtgaagcagaccctgaatttcgacctgctgaagctggctggcgacgtggaatccaacccaggcccttctagaggccatatgaccgagtacaagcccacggtgcgcctcgccacccgcgacgacgtccccagggccgtacgcaccctcgccgccgcgttcgccgactaccccgccacgcgccacaccgtcgatccggaccgccacatcgagcgggtcaccgagctgcaagaactcttcctcacgcgcgtcgggctcgacatcggcaaggtgtgggtcgcggacgacggcgccgcggtggcggtctggaccacgccggagagcgtcgaagcgggggcggtgttcgccgagatcggcccgcgcatggccgagttgagcggttcccggctggccgcgcagcaacagatggaaggcctcctggcgccgcaccggcccaaggagcccgcgtggttcctggccaccgtcggcgtctcgcccgaccaccagggcaagggtctgggcagcgccgtcgtgctccccggagtggaggcggccgagcgcgccggggtgcccgccttcctggagacctccgcgccccgcaacctccccttctacgagcggctcggcttcaccgtcaccgccgacgtcgaggtgcccgaaggaccgcgcacctggtgcatgacccgcaagcccggtgcctga

SEQ ID NO: 32595 - DNA, 2889 bp, synthetic construct
  source 1..2889: mol_type = other DNA
atggccttaccagtgaccgccttgctcctgccgctggccttgctgctccacgccgccaggccggacatccagatgacacagagccctagcagcctgtctgccagcgtgggagacagagtgaccatcacatgcaaggccagcgaccacatcaacaactggctggcctggtatcagcagaagcctggacaggcccctaagctgctgatctacggcgctaccacactggaaacaggcgtgcccagcagattttctggcagcggctctggcaccgactacaccctgacaatatccagcctccagcctgaggacttcgccacctactactgtcagcagagctggaacaccccttggacattcggccagggcaccaagctggaaatcaagagactcgaggacctgaagaacgtgttcccacctgaggtggccgtgttcgagcctagcgaggccgagatcagccacacccagaaagccaccctcgtgtgcctggctaccggcttctaccccgaccatgtggaactgtcttggtgggtcaacggcaaagaggtgcacagcggcgtgtgtaccgacccccagccactgaaagaacagcccgccctgaacgacagccggtactgcctgagcagcagactgagagtgtccgccaccttctggcagaacccccggaaccacttcagatgccaggtgcagttctacggcctgagcgagaacgacgagtggacccaggacagagccaagcccgtgacccagatcgtgtctgccgaagcctggggcagagccgattgcggctttaccagcgagagctaccagcagggcgtgctgagcgccaccatcctgtacgagatcctgctgggcaaggccaccctgtacgccgtgctggtgtctgccctggtgctgatggctatggtcaagcggaaggacagccggggaagggccaagcgatctggatctggagcaacaaacttctcactactcaaacaagcaggtgacgtggaggagaatcccgggcctactagtgccaccatggactggatttggcgcatccttttccttgtcggcgctgctaccggcgcccattccgggcccatgggaagctggcttgagttctaccacagactcaacgccattgacagcaggctgtgggcacttggcggaagcgaagctgaactcgccgcttttgaaaaagaaattgccgctttcgagtccgagcttcaggcttacaaaggcaaagggaatcctgaggtcgagagcctgagagatcacgctgcccacattagagagtggttgcaggcataccggcacaatggatccggcggcggaggatctggcggaggcggatctgggggcggaggctctttcgaacaagttcagcttcaacagcctggcgctgagctggtcaaacctggcgcttctgtgaagatgagctgcaaagccagcggctacgccttcagcagctactggatcaactggatgaagcagaaacccggccagggactcgaatggatcggccaaatctatcccggcgacggcgacaccaactacaacggcaagttcaagggcagagccacactgaccgccgatacctctagcagcacagcctacatgcagctgagcagcctgaccagcgaagatagcgccgtgtacttctgtgcccggtccatcacaacagtcgtgggctgcgctatggactattggggccagggaacaagcgtgaccgtgtctagtacgcgtagccagcctcacaccaagcccagcgtgttcgtgatgaagaacggcaccaacgtggcctgcctcgtgaaagagttctaccccaaggacatcaggatcaacctggtgtccagcaagaagatcaccgagttcgaccccgccatcgtgatctcccccagcggcaagtacaacgccgtgaagctggggaagtacgaggacagcaacagcgtgacctgctccgtgcagcacgacaacaagaccgtgcacagcaccgactttgaagtgaaaaccgactccaccgaccacgtgaagcccaaagagacagagaacaccaagcagcccagcaagagctgccacaagcccaaggccatcgtgcacaccgagaaagtgaacatgatgagcctgaccgtgctgggcttcagaatcctgctgctgaaagtggccggctttaacctgctgatgaccctgcggctgtggtccagccgcgccaagagaagcggatctggcgtgaagcagaccctgaatttcgacctgctgaagctggctggcgacgtggaatccaacccaggcccttctagaggccatatgaccgagtacaagcccacggtgcgcctcgccacccgcgacgacgtccccagggccgtacgcaccctcgccgccgcgttcgccgactaccccgccacgcgccacaccgtcgatccggaccgccacatcgagcgggtcaccgagctgcaagaactcttcctcacgcgcgtcgggctcgacatcggcaaggtgtgggtcgcggacgacggcgccgcggtggcggtctggaccacgccggagagcgtcgaagcgggggcggtgttcgccgagatcggcccgcgcatggccgagttgagcggttcccggctggccgcgcagcaacagatggaaggcctcctggcgccgcaccggcccaaggagcccgcgtggttcctggccaccgtcggcgtctcgcccgaccaccagggcaagggtctgggcagcgccgtcgtgctccccggagtggaggcggccgagcgcgccggggtgcccgccttcctggagacctccgcgccccgcaacctccccttctacgagcggctcggcttcaccgtcaccgccgacgtcgaggtgcccgaaggaccgcgcacctggtgcatgacccgcaagcccggtgcctga

SEQ ID NO: 32596 - DNA, 2889 bp, synthetic construct
  source 1..2889: mol_type = other DNA
atggccttaccagtgaccgccttgctcctgccgctggccttgctgctccacgccgccaggccggacatccagatgacacagagccctagcagcctgtctgccagcgtgggagacagagtgaccatcacatgcaaggccagcgaccacatcaacaactggctggcctggtatcagcagaagcctggacaggcccctaagctgctgatctacggcgctaccacactggaaacaggcgtgcccagcagattttctggcagcggctctggcaccgactacaccctgacaatatccagcctccagcctgaggacttcgccacctactactgtcagcagagctggaacaccccttggacattcggccagggcaccaagctggaaatcaagagactcgaggacctgaagaacgtgttcccacctgaggtggccgtgttcgagcctagcgaggccgagatcagccacacccagaaagccaccctcgtgtgcctggctaccggcttctaccccgaccatgtggaactgtcttggtgggtcaacggcaaagaggtgcacagcggcgtgtgtaccgacccccagccactgaaagaacagcccgccctgaacgacagccggtactgcctgagcagcagactgagagtgtccgccaccttctggcagaacccccggaaccacttcagatgccaggtgcagttctacggcctgagcgagaacgacgagtggacccaggacagagccaagcccgtgacccagatcgtgtctgccgaagcctggggcagagccgattgcggctttaccagcgagagctaccagcagggcgtgctgagcgccaccatcctgtacgagatcctgctgggcaaggccaccctgtacgccgtgctggtgtctgccctggtgctgatggctatggtcaagcggaaggacagccggggaagggccaagcgatctggatctggagcaacaaacttctcactactcaaacaagcaggtgacgtggaggagaatcccgggcctactagtgccaccatggactggatttggcgcatccttttccttgtcggcgctgctaccggcgcccattccgggcccatgggaagctggcttgagttctaccacagactcaacgccattgacagcaggctgtgggcacttggcggaagcgaagctgaactcgccgcttttgaaaaagaaattgccgctttcgagtccgagcttcaggcttacaaaggcaaagggaatcctgaggtcgagagcctgagagatcacgctgcccacattagagagtggttgcaggcataccggcacaatggatccggcggcggaggatctggcggaggcggatctgggggcggaggctctttcgaacaagttcagcttcaacagcctggcgctgagctggtcaaacctggcgcttctgtgaagatgagctgcaaagccagcggctacgccttcagcagctactggatcaactggatgaagcagaaacccggccagggactcgaatggatcggccaaatctatcccggcgacggcgacaccaactacaacggcaagttcaagggcagagccacactgaccgccgatacctctagcagcacagcctacatgcagctgagcagcctgaccagcgaagatagcgccgtgtacttctgtgcccggtccatcacaacagtcgtgggctgcgctatggactattggggccagggaacaagcgtgaccgtgtctagtacgcgtagccagcctcacaccaagcccagcgtgttcgtgatgaagaacggcaccaacgtggcctgcctcgtgaaagagttctaccccaaggacatcaggatcaacctggtgtccagcaagaagatcaccgagttcgaccccgccatcgtgatctcccccagcggcaagtacaacgccgtgaagctggggaagtacgaggacagcaacagcgtgacctgctccgtgcagcacgacaacaagaccgtgcacagcaccgactttgaagtgaaaaccgactccaccgaccacgtgaagcccaaagagacagagaacaccaagcagcccagcaagagctgccacaagcccaaggccatcgtgcacaccgagaaagtgaacatgatgagcctgaccgtgatcggcttcagaatcctgctgctgaaagtggccggctttaacctgctgatgaccctgcggctgtggtccagccgcgccaagagaagcggatctggcgtgaagcagaccctgaatttcgacctgctgaagctggctggcgacgtggaatccaacccaggcccttctagaggccatatgaccgagtacaagcccacggtgcgcctcgccacccgcgacgacgtccccagggccgtacgcaccctcgccgccgcgttcgccgactaccccgccacgcgccacaccgtcgatccggaccgccacatcgagcgggtcaccgagctgcaagaactcttcctcacgcgcgtcgggctcgacatcggcaaggtgtgggtcgcggacgacggcgccgcggtggcggtctggaccacgccggagagcgtcgaagcgggggcggtgttcgccgagatcggcccgcgcatggccgagttgagcggttcccggctggccgcgcagcaacagatggaaggcctcctggcgccgcaccggcccaaggagcccgcgtggttcctggccaccgtcggcgtctcgcccgaccaccagggcaagggtctgggcagcgccgtcgtgctccccggagtggaggcggccgagcgcgccggggtgcccgccttcctggagacctccgcgccccgcaacctccccttctacgagcggctcggcttcaccgtcaccgccgacgtcgaggtgcccgaaggaccgcgcacctggtgcatgacccgcaagcccggtgcctga

SEQ ID NO: 32597 - DNA, 2607 bp, synthetic construct
  source 1..2607: mol_type = other DNA
atggccttaccagtgaccgccttgctcctgccgctggccttgctgctccacgccgccaggccggacatccagatgacacagagccctagcagcctgtctgccagcgtgggagacagagtgaccatcacatgcaaggccagcgaccacatcaacaactggctggcctggtatcagcagaagcctggacaggcccctaagctgctgatctacggcgctaccacactggaaacaggcgtgcccagcagattttctggcagcggctctggcaccgactacaccctgacaatatccagcctccagcctgaggacttcgccacctactactgtcagcagagctggaacaccccttggacattcggccagggcaccaagctggaaatcaagagactcgaggacctgaagaacgtgttcccacctgaggtggccgtgttcgagcctagcgaggccgagatcagccacacccagaaagccaccctcgtgtgcctggctaccggcttctaccccgaccatgtggaactgtcttggtgggtcaacggcaaagaggtgcacagcggcgtgtgtaccgacccccagccactgaaagaacagcccgccctgaacgacagccggtactgcctgagcagcagactgagagtgtccgccaccttctggcagaacccccggaaccacttcagatgccaggtgcagttctacggcctgagcgagaacgacgagtggacccaggacagagccaagcccgtgacccagatcgtgtctgccgaagcctggggcagagccgattgcggctttaccagcgagagctaccagcagggcgtgctgagcgccaccatcctgtacttgttgctgctgctgaagtccgtggtgtacttcgccatcatcacatgctgcctgctgcggagaaccgccttctgctgcaacggcgagaagtctagggccaagcgatctggatctggagcaacaaacttctcactactcaaacaagcaggtgacgtggaggagaatcccgggcctactagtatggactggatttggcgcatccttttccttgtcggcgctgctaccggcgcgcattccttcgaacaagttcagcttcaacagcctggcgctgagctggtcaaacctggcgcttctgtgaagatgagctgcaaagccagcggctacgccttcagcagctactggatcaactggatgaagcagaaacccggccagggactcgaatggatcggccaaatctatcccggcgacggcgacaccaactacaacggcaagttcaagggcagagccacactgaccgccgatacctctagcagcacagcctacatgcagctgagcagcctgaccagcgaagatagcgccgtgtacttctgtgcccggtccatcacaacagtcgtgggctgcgctatggactattggggccagggaacaagcgtgaccgtgtctagtacgcgtgagcagaaactgatctcggaagaggatgggagcggcatccagaaccctgaccctgccgtgtaccagctgagagactctaaatccagtgacaagtctgtctgcctattcaccgattttgattctcaaacaaatgtgtcacaaagtaaggattctgatgtgtatatcacagacaaaactgtgctagacatgaggtctatggacttcaagagcaacagtgctgtggcctggagcaacaaatctgactttgcatgtgcaaacgccttcaacaacagcattattccagaagacaccttcttccccagcccagaaagttcctgtgatgtcaagctggtcgagaaaagctttgaaacagatacgaacctaaactttcaaaacctgtcagtgattgggttccgaatcctcctcctgaaagtggccgggtttaatctgctcatgacgctgcggctgtggtccagccgcgccaagagaagcggatctggcgtgaagcagaccctgaatttcgacctgctgaagctggctggcgacgtggaatccaacccaggcccttctagaggccatatgaccgagtacaagcccacggtgcgcctcgccacccgcgacgacgtccccagggccgtacgcaccctcgccgccgcgttcgccgactaccccgccacgcgccacaccgtcgatccggaccgccacatcgagcgggtcaccgagctgcaagaactcttcctcacgcgcgtcgggctcgacatcggcaaggtgtgggtcgcggacgacggcgccgcggtggcggtctggaccacgccggagagcgtcgaagcgggggcggtgttcgccgagatcggcccgcgcatggccgagttgagcggttcccggctggccgcgcagcaacagatggaaggcctcctggcgccgcaccggcccaaggagcccgcgtggttcctggccaccgtcggcgtctcgcccgaccaccagggcaagggtctgggcagcgccgtcgtgctccccggagtggaggcggccgagcgcgccggggtgcccgccttcctggagacctccgcgccccgcaacctccccttctacgagcggctcggcttcaccgtcaccgccgacgtcgaggtgcccgaaggaccgcgcacctggtgcatgacccgcaagcccggtgcctga

SEQ ID NO: 32598 - DNA, 2571 bp, synthetic construct
  source 1..2571: mol_type = other DNA
atggccttaccagtgaccgccttgctcctgccgctggccttgctgctccacgccgccaggccggacatccagatgacacagagccctagcagcctgtctgccagcgtgggagacagagtgaccatcacatgcaaggccagcgaccacatcaacaactggctggcctggtatcagcagaagcctggacaggcccctaagctgctgatctacggcgctaccacactggaaacaggcgtgcccagcagattttctggcagcggctctggcaccgactacaccctgacaatatccagcctccagcctgaggacttcgccacctactactgtcagcagagctggaacaccccttggacattcggccagggcaccaagctggaaatcaagagactcgaggacctgaagaacgtgttcccacctgaggtggccgtgttcgagcctagcgaggccgagatcagccacacccagaaagccaccctcgtgtgcctggctaccggcttctaccccgaccatgtggaactgtcttggtgggtcaacggcaaagaggtgcacagcggcgtgtgtaccgacccccagccactgaaagaacagcccgccctgaacgacagccggtactgcctgagcagcagactgagagtgtccgccaccttctggcagaacccccggaaccacttcagatgccaggtgcagttctacggcctgagcgagaacgacgagtggacccaggacagagccaagcccgtgacccagatcgtgtctgccgaagcctggggcagagccgattgcggctttaccagcgagagctaccagcagggcgtgctgagcgcctactacatgtacttgttgctgctgctgaagtccgtggtgtacttcgccatcatcacatgctgcctgctgcggagaaccgccttctgctgcaacggcgagaagtctagggccaagcgatctggatctggagcaacaaacttctcactactcaaacaagcaggtgacgtggaggagaatcccgggcctactagtatggactggatttggcgcatccttttccttgtcggcgctgctaccggcgcgcattccttcgaacaagttcagcttcaacagcctggcgctgagctggtcaaacctggcgcttctgtgaagatgagctgcaaagccagcggctacgccttcagcagctactggatcaactggatgaagcagaaacccggccagggactcgaatggatcggccaaatctatcccggcgacggcgacaccaactacaacggcaagttcaagggcagagccacactgaccgccgatacctctagcagcacagcctacatgcagctgagcagcctgaccagcgaagatagcgccgtgtacttctgtgcccggtccatcacaacagtcgtgggctgcgctatggactattggggccagggaacaagcgtgaccgtgtctagtacgcgtatccagaaccctgatcctgccgtgtaccagctgcgggatagcaagagcagcgacaagagcgtgtgtctgttcaccgacttcgacagccagaccaacgtgtcccagagcaaggactccgacgtgtacatcaccgataagaccgtgctggacatgcggagcatggacttcaagagcaactccgccgtggcctggtccaacaagtccgatttcgcctgcgccaacgccttcaacaacagcattatccccgaggacacattcttcccaagccccgagagcagctgcgacgtgaagctggtggaaaagagcttcgagacagacaccaacctgaacttccagaacctgagcgtgatcggcttcagaatcctgctgctgaaagtggccggctttaacctgctgatgaccctgcggctgtggtccagccgcgccaagagaagcggatctggcgtgaagcagaccctgaatttcgacctgctgaagctggctggcgacgtggaatccaacccaggcccttctagaggccatatgaccgagtacaagcccacggtgcgcctcgccacccgcgacgacgtccccagggccgtacgcaccctcgccgccgcgttcgccgactaccccgccacgcgccacaccgtcgatccggaccgccacatcgagcgggtcaccgagctgcaagaactcttcctcacgcgcgtcgggctcgacatcggcaaggtgtgggtcgcggacgacggcgccgcggtggcggtctggaccacgccggagagcgtcgaagcgggggcggtgttcgccgagatcggcccgcgcatggccgagttgagcggttcccggctggccgcgcagcaacagatggaaggcctcctggcgccgcaccggcccaaggagcccgcgtggttcctggccaccgtcggcgtctcgcccgaccaccagggcaagggtctgggcagcgccgtcgtgctccccggagtggaggcggccgagcgcgccggggtgcccgccttcctggagacctccgcgccccgcaacctccccttctacgagcggctcggcttcaccgtcaccgccgacgtcgaggtgcccgaaggaccgcgcacctggtgcatgacccgcaagcccggtgcctga

SEQ ID NO: 32599 - DNA, 2571 bp, synthetic construct
  source 1..2571: mol_type = other DNA
atggccttaccagtgaccgccttgctcctgccgctggccttgctgctccacgccgccaggccggacatccagatgacacagagccctagcagcctgtctgccagcgtgggagacagagtgaccatcacatgcaaggccagcgaccacatcaacaactggctggcctggtatcagcagaagcctggacaggcccctaagctgctgatctacggcgctaccacactggaaacaggcgtgcccagcagattttctggcagcggctctggcaccgactacaccctgacaatatccagcctccagcctgaggacttcgccacctactactgtcagcagagctggaacaccccttggacattcggccagggcaccaagctggaaatcaagagactcgaggacctgaagaacgtgttcccacctgaggtggccgtgttcgagcctagcgaggccgagatcagccacacccagaaagccaccctcgtgtgcctggctaccggcttctaccccgaccatgtggaactgtcttggtgggtcaacggcaaagaggtgcacagcggcgtgtgtaccgacccccagccactgaaagaacagcccgccctgaacgacagccggtactgcctgagcagcagactgagagtgtccgccaccttctggcagaacccccggaaccacttcagatgccaggtgcagttctacggcctgagcgagaacgacgagtggacccaggacagagccaagcccgtgacccagatcgtgtctgccgaagcctggggcagagccgattgcggctttaccagcgagagctaccagcagggcgtgctgagcgcctactacacatacctgctgctgctcctcaagagcgtgatctacctggccatcatcagcttcagcctgctgcggagaacaagcgtgtgcggcaacgagaagaagtccagggccaagcgatctggatctggagcaacaaacttctcactactcaaacaagcaggtgacgtggaggagaatcccgggcctactagtatggactggatttggcgcatccttttccttgtcggcgctgctaccggcgcgcattccttcgaacaagttcagcttcaacagcctggcgctgagctggtcaaacctggcgcttctgtgaagatgagctgcaaagccagcggctacgccttcagcagctactggatcaactggatgaagcagaaacccggccagggactcgaatggatcggccaaatctatcccggcgacggcgacaccaactacaacggcaagttcaagggcagagccacactgaccgccgatacctctagcagcacagcctacatgcagctgagcagcctgaccagcgaagatagcgccgtgtacttctgtgcccggtccatcacaacagtcgtgggctgcgctatggactattggggccagggaacaagcgtgaccgtgtctagtacgcgtatccagaaccctgatcctgccgtgtaccagctgcgggatagcaagagcagcgacaagagcgtgtgtctgttcaccgacttcgacagccagaccaacgtgtcccagagcaaggactccgacgtgtacatcaccgataagtgcgtgctggacatgcggagcatggacttcaagagcaactccgccgtggcctggtccaacaagtccgatttcgcctgcgccaacgccttcaacaacagcattatccccgaggacacattcttcccaagccccgagagcagctgcgacgtgaagctggtggaaaagagcttcgagacagacaccaacctgaacttccagaacctgagcgtgatcggcttcagaatcctgctgctgaaagtggccggctttaacctgctgatgaccctgcggctgtggtccagccgcgccaagagaagcggatctggcgtgaagcagaccctgaatttcgacctgctgaagctggctggcgacgtggaatccaacccaggcccttctagaggccatatgaccgagtacaagcccacggtgcgcctcgccacccgcgacgacgtccccagggccgtacgcaccctcgccgccgcgttcgccgactaccccgccacgcgccacaccgtcgatccggaccgccacatcgagcgggtcaccgagctgcaagaactcttcctcacgcgcgtcgggctcgacatcggcaaggtgtgggtcgcggacgacggcgccgcggtggcggtctggaccacgccggagagcgtcgaagcgggggcggtgttcgccgagatcggcccgcgcatggccgagttgagcggttcccggctggccgcgcagcaacagatggaaggcctcctggcgccgcaccggcccaaggagcccgcgtggttcctggccaccgtcggcgtctcgcccgaccaccagggcaagggtctgggcagcgccgtcgtgctccccggagtggaggcggccgagcgcgccggggtgcccgccttcctggagacctccgcgccccgcaacctccccttctacgagcggctcggcttcaccgtcaccgccgacgtcgaggtgcccgaaggaccgcgcacctggtgcatgacccgcaagcccggtgcctga

SEQ ID NO: 32600 - DNA, 4257 bp, synthetic construct
  source 1..4257: mol_type = other DNA
atggccttaccagtgaccgccttgctcctgccgctggccttgctgctccacgccgccaggccggacatccagatgacacagagccctagcagcctgtctgccagcgtgggagacagagtgaccatcacatgcaaggccagcgaccacatcaacaactggctggcctggtatcagcagaagcctggacaggcccctaagctgctgatctacggcgctaccacactggaaacaggcgtgcccagcagattttctggcagcggctctggcaccgactacaccctgacaatatccagcctccagcctgaggacttcgccacctactactgtcagcagagctggaacaccccttggacattcggccagggcaccaagctggaaatcaagagactcgaggacctgaagaacgtgttcccacctgaggtggccgtgttcgagcctagcgaggccgagatcagccacacccagaaagccaccctcgtgtgcctggctaccggcttctaccccgaccatgtggaactgtcttggtgggtcaacggcaaagaggtgcacagcggcgtgtctaccgacccccagccactgaaagaacagcccgccctgaacgacagccggtactgcctgagcagcagactgagagtgtccgccaccttctggcagaacccccggaaccacttcagatgccaggtgcagttctacggcctgagcgagaacgacgagtggacccaggacagagccaagcccgtgacccagatcgtgtctgccgaagcctggggcagagccgattgcggatcccagagcttcggcctgctggaccccaagctgtgctacctgctggatggcatcctgttcatctacggcgtgatcctgaccgccctgttcctgggcggtggaggctctatccggaacggctctgaagttcgcgatcctctggtcacctacgagggcagcaatcctcctgccagtcctctgcaggataacctcgtgatcgccctgcacagctacgagccttctcatgatggcgacctgggctttgagaagggcgagcagctgagaatcctggaacagtctggcgagtggtggaaggcccagtctctgacaacaggccaagagggcttcatccccttcaacttcgtggccaaggccaacagcctggaacctgagccttggtttttcaagaacctgtccagaaaggacgccgagagacagctgctggcccctggaaatacccacggcagctttctgattagagagagcgagagcacagccggcagcttcagcctgagtgtgcgggactttgaccagaatcaaggcgaggtcgtgaagcactacaagatccggaacctggataacggcggcttctacatcagccccagaatcacctttcctggcctgcacgaactcgtgcggcactacacaaatgcctccgatggcctgtgcaccagactgagcagaccctgtcagacccagaagcctcagaaaccttggtgggaagatgagtgggaagtgcccagagaaaccctgaagctggtggaaagactcggagccggccagtttggagaagtgtggatgggctactacaatggccacaccaaggtggccgtgaagtctctgaagcagggctctatgagcccagatgcttttctggccgaggccaatctgatgaagcagctgcagcaccagagacttgtgcggctgtatgccgtggtcacccaagagcctatctacatcatcaccgagtacatggaaaacggcagcctggtggacttcctgaaaacccctagcggcatcaagctgaccattaacaagctgctggacatggccgctcagatcgccgaaggcatggcctttatcgaggaacggaactacatccacagggacctgagagccgccaatatcctggtgtctgacaccctgagctgcaagattgccgatttcggcctggccagactgatcgaggacaatgagtataccgccagagagggcgccaagtttcccatcaaatggacagcccctgaggccatcaactacggcaccttcaccatcaagagcgacgtgtggtccttcggcatcctgctgacagagatcgtgacacacggcagaatcccatatcctggcatgacaaaccccgaagtgatccagaatctggaacggggctacagaatggtccgacctgacaactgccccgaggaactgtaccagctgatgagactgtgctggaaagagaggcccgaggacagacccaccttcgactacctgagaagcgtgctggaagatttcttcaccgccaccgagggccagtaccagcctcagccagggaattccagggccaagcgatctggatctggagcaacaaacttctcactactcaaacaagcaggtgacgtggaggagaatcccgggcctactagtatggactggatttggcgcatccttttccttgtcggcgctgctaccggcgcgcattccttcgaacaagttcagcttcaacagcctggcgctgagctggtcaaacctggcgcttctgtgaagatgagctgcaaagccagcggctacgccttcagcagctactggatcaactggatgaagcagaaacccggccagggactcgaatggatcggccaaatctatcccggcgacggcgacaccaactacaacggcaagttcaagggcagagccacactgaccgccgatacctctagcagcacagcctacatgcagctgagcagcctgaccagcgaagatagcgccgtgtacttctgtgcccggtccatcacaacagtcgtgggctgcgctatggactattggggccagggaacaagcgtgaccgtgtctagtacgcgtatccagaaccctgatcctgccgtgtaccagctgcgggatagcaagagcagcgacaagagcgtgtgtctgttcaccgacttcgacagccagaccaacgtgtcccagagcaaggactccgacgtgtacatcaccgataagaccgtgctggacatgcggagcatggacttcaagagcaactccgccgtggcctggtccaacaagtccgatttcgcctgcgccaacgccttcaacaacagcattatccccgaggacacattcttcccaagccccgagagcagctgcggtacccagagttttgggttgttggaccctaaattgtgctatctgttggacggaatcctgttcatttacggagtgatcctgaccgcattgttcctgcgggttaagttttccagatccgcagacgcacccgcttaccaacaagggcagaaccaactctacaatgaacttaatttggggcggagggaagagtacgacgttctggacaaaaggaggggacgagatcccgagatgggcggaaagcctcagcgaaggaagaatccgcaagaggggctttataacgaactccagaaagataaaatggcagaagcctatagtgagattgggatgaagggagaaaggaggaggggtaaaggtcacgatgggttgtaccaaggattgagcacagccactaaagatacctatgatgcgctccacatgcaggccctgccgccaagacgcgccaagagaagcggatctggcgtgaagcagaccctgaatttcgacctgctgaagctggctggcgacgtggaatccaacccaggcccttctagaggccatatgaccgagtacaagcccacggtgcgcctcgccacccgcgacgacgtccccagggccgtacgcaccctcgccgccgcgttcgccgactaccccgccacgcgccacaccgtcgatccggaccgccacatcgagcgggtcaccgagctgcaagaactcttcctcacgcgcgtcgggctcgacatcggcaaggtgtgggtcgcggacgacggcgccgcggtggcggtctggaccacgccggagagcgtcgaagcgggggcggtgttcgccgagatcggcccgcgcatggccgagttgagcggttcccggctggccgcgcagcaacagatggaaggcctcctggcgccgcaccggcccaaggagcccgcgtggttcctggccaccgtcggcgtctcgcccgaccaccagggcaagggtctgggcagcgccgtcgtgctccccggagtggaggcggccgagcgcgccggggtgcccgccttcctggagacctccgcgccccgcaacctccccttctacgagcggctcggcttcaccgtcaccgccgacgtcgaggtgcccgaaggaccgcgcacctggtgcatgacccgcaagcccggtgcctga

SEQ ID NO: 32601 - DNA, 4257 bp, synthetic construct
  source 1..4257: mol_type = other DNA
atggccttaccagtgaccgccttgctcctgccgctggccttgctgctccacgccgccaggccggacatccagatgacacagagccctagcagcctgtctgccagcgtgggagacagagtgaccatcacatgcaaggccagcgaccacatcaacaactggctggcctggtatcagcagaagcctggacaggcccctaagctgctgatctacggcgctaccacactggaaacaggcgtgcccagcagattttctggcagcggctctggcaccgactacaccctgacaatatccagcctccagcctgaggacttcgccacctactactgtcagcagagctggaacaccccttggacattcggccagggcaccaagctggaaatcaagagactcgaggacctgaagaacgtgttcccacctgaggtggccgtgttcgagcctagcgaggccgagatcagccacacccagaaagccaccctcgtgtgcctggctaccggcttctaccccgaccatgtggaactgtcttggtgggtcaacggcaaagaggtgcacagcggcgtgtctaccgacccccagccactgaaagaacagcccgccctgaacgacagccggtactgcctgagcagcagactgagagtgtccgccaccttctggcagaacccccggaaccacttcagatgccaggtgcagttctacggcctgagcgagaacgacgagtggacccaggacagagccaagcccgtgacccagatcgtgtctgccgaagcctggggcagagccgattgcggatcccagagcttcggcctgctggaccccaagctgtgctacctgctggatggcatcctgttcatctacggcgtgatcctgaccgccctgttcctgggcggtggaggctctatccggaacggctctgaagttcgcgatcctctggtcacctacgagggcagcaatcctcctgccagtcctctgcaggataacctcgtgatcgccctgcacagctacgagccttctcatgatggcgacctgggctttgagaagggcgagcagctgagaatcctggaacagtctggcgagtggtggaaggcccagtctctgacaacaggccaagagggcttcatccccttcaacttcgtggccaaggccaacagcctggaacctgagccttggtttttcaagaacctgtccagaaaggacgccgagagacagctgctggcccctggaaatacccacggcagctttctgattagagagagcgagagcacagccggcagcttcagcctgagtgtgcgggactttgaccagaatcaaggcgaggtcgtgaagcactacaagatccggaacctggataacggcggcttctacatcagccccagaatcacctttcctggcctgcacgaactcgtgcggcactacacaaatgcctccgatggcctgtgcaccagactgagcagaccctgtcagacccagaagcctcagaaaccttggtgggaagatgagtgggaagtgcccagagaaaccctgaagctggtggaaagactcggagccggccagtttggagaagtgtggatgggctactacaatggccacaccaaggtggccgtgaagtctctgaagcagggctctatgagcccagatgcttttctggccgaggccaatctgatgaagcagctgcagcaccagagacttgtgcggctgtatgccgtggtcacccaagagcctatctacatcatcaccgagtacatggaaaacggcagcctggtggacttcctgaaaacccctagcggcatcaagctgaccattaacaagctgctggacatggccgctcagatcgccgaaggcatggcctttatcgaggaacggaactacatccacagggacctgagagccgccaatatcctggtgtctgacaccctgagctgcaagattgccgatttcggcctggccagactgatcgaggacaatgagtataccgccagagagggcgccaagtttcccatcaaatggacagcccctgaggccatcaactacggcaccttcaccatcaagagcgacgtgtggtccttcggcatcctgctgacagagatcgtgacacacggcagaatcccatatcctggcatgacaaaccccgaagtgatccagaatctggaacggggctacagaatggtccgacctgacaactgccccgaggaactgtaccagctgatgagactgtgctggaaagagaggcccgaggacagacccaccttcgactacctgagaagcgtgctggaagatttcttcaccgccaccgagggccagtaccagcctcagccagggaattccagggccaagcgatctggatctggagcaacaaacttctcactactcaaacaagcaggtgacgtggaggagaatcccgggcctactagtatggactggatttggcgcatccttttccttgtcggcgctgctaccggcgcgcattccttcgaacaagttcagcttcaacagcctggcgctgagctggtcaaacctggcgcttctgtgaagatgagctgcaaagccagcggctacgccttcagcagctactggatcaactggatgaagcagaaacccggccagggactcgaatggatcggccaaatctatcccggcgacggcgacaccaactacaacggcaagttcaagggcagagccacactgaccgacgatacctctagcagcacagcctacatgcagctgagcagcctgaccagcgaagatagcgccgtgtacttctgtgcccggtccatcacaacagtcgtgggctgcgctatggactattggggccagggaacaagcgtgaccgtgtctagtacgcgtatccagaaccctgatcctgccgtgtaccagctgcgggatagcaagagcagcgacaagagcgtgtgtctgttcaccgacttcgacagccagaccaacgtgtcccagagcaaggactccgacgtgtacatcaccgataagaccgtgctggacatgcggagcatggacttcaagagcaactccgccgtggcctggtccaacaagtccgatttcgcctgcgccaacgccttcaacaacagcattatccccgaggacacattcttcccaagccccgagagcagctgcggtacccagagttttgggttgttggaccctaaattgtgctatctgttggacggaatcctgttcatttacggagtgatcctgaccgcattgttcctgcgggttaagttttccagatccgcagacgcacccgcttaccaacaagggcagaaccaactctacaatgaacttaatttggggcggagggaagagtacgacgttctggacaaaaggaggggacgagatcccgagatgggcggaaagcctcagcgaaggaagaatccgcaagaggggctttataacgaactccagaaagataaaatggcagaagcctatagtgagattgggatgaagggagaaaggaggaggggtaaaggtcacgatgggttgtaccaaggattgagcacagccactaaagatacctatgatgcgctccacatgcaggccctgccgccaagacgcgccaagagaagcggatctggcgtgaagcagaccctgaatttcgacctgctgaagctggctggcgacgtggaatccaacccaggcccttctagaggccatatgaccgagtacaagcccacggtgcgcctcgccacccgcgacgacgtccccagggccgtacgcaccctcgccgccgcgttcgccgactaccccgccacgcgccacaccgtcgatccggaccgccacatcgagcgggtcaccgagctgcaagaactcttcctcacgcgcgtcgggctcgacatcggcaaggtgtgggtcgcggacgacggcgccgcggtggcggtctggaccacgccggagagcgtcgaagcgggggcggtgttcgccgagatcggcccgcgcatggccgagttgagcggttcccggctggccgcgcagcaacagatggaaggcctcctggcgccgcaccggcccaaggagcccgcgtggttcctggccaccgtcggcgtctcgcccgaccaccagggcaagggtctgggcagcgccgtcgtgctccccggagtggaggcggccgagcgcgccggggtgcccgccttcctggagacctccgcgccccgcaacctccccttctacgagcggctcggcttcaccgtcaccgccgacgtcgaggtgcccgaaggaccgcgcacctggtgcatgacccgcaagcccggtgcctga

SEQ ID NO: 32602 - DNA, 4014 bp, synthetic construct
  source 1..4014: mol_type = other DNA
atggccttaccagtgaccgccttgctcctgccgctggccttgctgctccacgccgccaggccggacatccagatgacacagagccctagcagcctgtctgccagcgtgggagacagagtgaccatcacatgcaaggccagcgaccacatcaacaactggctggcctggtatcagcagaagcctggacaggcccctaagctgctgatctacggcgctaccacactggaaacaggcgtgcccagcagattttctggcagcggctctggcaccgactacaccctgacaatatccagcctccagcctgaggacttcgccacctactactgtcagcagagctggaacaccccttggacattcggccagggcaccaagctggaaatcaagagactcgaggacctgaagaacgtgttcccacctgaggtggccgtgttcgagcctagcgaggccgagatcagccacacccagaaagccaccctcgtgtgcctggctaccggcttctaccccgaccatgtggaactgtcttggtgggtcaacggcaaagaggtgcacagcggcgtgtctaccgacccccagccactgaaagaacagcccgccctgaacgacagccggtactgcctgagcagcagactgagagtgtccgccaccttctggcagaacccccggaaccacttcagatgccaggtgcagttctacggcctgagcgagaacgacgagtggacccaggacagagccaagcccgtgacccagatcgtgtctgccgaagcctggggcagagccgattgcggatcccagagcttcggcctgctggaccccaagctgtgctacctgctggatggcatcctgttcatctacggcgtgatcctgaccgccctgttcctgggcggtggaggctctatccggaacggctctgaagttcgcgatcctctggtcacctacgagggcagcaatcctcctgccagtcctctgcaggataacctcgtgatcgccctgcacagctacgagccttctcatgatggcgacctgggctttgagaagggcgagcagctgagaatcctggaacagtctggcgagtggtggaaggcccagtctctgacaacaggccaagagggcttcatccccttcaacttcgtggccaaggccaacagcctggaacctgagccttggtttttcaagaacctgtccagaaaggacgccgagagacagctgctggcccctggaaatacccacggcagctttctgattagagagagcgagagcacagccggcagcttcagcctgagtgtgcgggactttgaccagaatcaaggcgaggtcgtgaagcactacaagatccggaacctggataacggcggcttctacatcagccccagaatcacctttcctggcctgcacgaactcgtgcggcactacacaaatgcctccgatggcctgtgcaccagactgagcagaccctgtcagacccagaagcctcagaaaccttggtgggaagatgagtgggaagtgcccagagaaaccctgaagctggtggaaagactcggagccggccagtttggagaagtgtggatgggctactacaatggccacaccaaggtggccgtgaagtctctgaagcagggctctatgagcccagatgcttttctggccgaggccaatctgatgaagcagctgcagcaccagagacttgtgcggctgtatgccgtggtcacccaagagcctatctacatcatcaccgagtacatggaaaacggcagcctggtggacttcctgaaaacccctagcggcatcaagctgaccattaacaagctgctggacatggccgctcagatcgccgaaggcatggcctttatcgaggaacggaactacatccacagggacctgagagccgccaatatcctggtgtctgacaccctgagctgcaagattgccgatttcggcctggccagactgatcgaggacaatgagtataccgccagagagggcgccaagtttcccatcaaatggacagcccctgaggccatcaactacggcaccttcaccatcaagagcgacgtgtggtccttcggcatcctgctgacagagatcgtgacacacggcagaatcccatatcctggcatgacaaaccccgaagtgatccagaatctggaacggggctacagaatggtccgacctgacaactgccccgaggaactgtaccagctgatgagactgtgctggaaagagaggcccgaggacagacccaccttcgactacctgagaagcgtgctggaagatttcttcaccgccaccgagggccagtaccagcctcagccagggaattccagggccaagcgatctggatctggagcaacaaacttctcactactcaaacaagcaggtgacgtggaggagaatcccgggcctactagtatggactggatttggcgcatccttttccttgtcggcgctgctaccggcgcgcattccttcgaacaagttcagcttcaacagcctggcgctgagctggtcaaacctggcgcttctgtgaagatgagctgcaaagccagcggctacgccttcagcagctactggatcaactggatgaagcagaaacccggccagggactcgaatggatcggccaaatctatcccggcgacggcgacaccaactacaacggcaagttcaagggcagagccacactgaccgccgatacctctagcagcacagcctacatgcagctgagcagcctgaccagcgaagatagcgccgtgtacttctgtgcccggtccatcacaacagtcgtgggctgcgctatggactattggggccagggaacaagcgtgaccgtgtctagtacgcgtatccagaaccctgatcctgccgtgtaccagctgcgggatagcaagagcagcgacaagagcgtgtgtctgttcaccgacttcgacagccagaccaacgtgtcccagagcaaggactccgacgtgtacatcaccgataagaccgtgctggacatgcggagcatggacttcaagagcaactccgccgtggcctggtccaacaagtccgatttcgcctgcgccaacgccttcaacaacagcattatccccgaggacacattcttcccaagccccgagagcagctgcggtaccatcactcaaggtttggcagtgtcaaccatctcatcattctttccacctggctaccaagtgtccttctgcctggtcatggtgctgctgttcgccgtggataccggcctgtacttcagcgtcaagaccaacatccggtccagcaccagagactggaaggaccacaagttcaagtggcggaaggaccctcaggacaagagggccaagcgatctggatctggagcaacaaacttctcactactcaaacaagcaggtgacgtggaggagaatcccgggccttctagaggccatatgaccgagtacaagcccacggtgcgcctcgccacccgcgacgacgtccccagggccgtacgcaccctcgccgccgcgttcgccgactaccccgccacgcgccacaccgtcgatccggaccgccacatcgagcgggtcaccgagctgcaagaactcttcctcacgcgcgtcgggctcgacatcggcaaggtgtgggtcgcggacgacggcgccgcggtggcggtctggaccacgccggagagcgtcgaagcgggggcggtgttcgccgagatcggcccgcgcatggccgagttgagcggttcccggctggccgcgcagcaacagatggaaggcctcctggcgccgcaccggcccaaggagcccgcgtggttcctggccaccgtcggcgtctcgcccgaccaccagggcaagggtctgggcagcgccgtcgtgctccccggagtggaggcggccgagcgcgccggggtgcccgccttcctggagacctccgcgccccgcaacctccccttctacgagcggctcggcttcaccgtcaccgccgacgtcgaggtgcccgaaggaccgcgcacctggtgcatgacccgcaagcccggtgcctga

SEQ ID NO: 32603 - DNA, 4005 bp, synthetic construct
  source 1..4005: mol_type = other DNA
atggccttaccagtgaccgccttgctcctgccgctggccttgctgctccacgccgccaggccggacatccagatgacacagagccctagcagcctgtctgccagcgtgggagacagagtgaccatcacatgcaaggccagcgaccacatcaacaactggctggcctggtatcagcagaagcctggacaggcccctaagctgctgatctacggcgctaccacactggaaacaggcgtgcccagcagattttctggcagcggctctggcaccgactacaccctgacaatatccagcctccagcctgaggacttcgccacctactactgtcagcagagctggaacaccccttggacattcggccagggcaccaagctggaaatcaagagactcgaggacctgaagaacgtgttcccacctgaggtggccgtgttcgagcctagcgaggccgagatcagccacacccagaaagccaccctcgtgtgcctggctaccggcttctaccccgaccatgtggaactgtcttggtgggtcaacggcaaagaggtgcacagcggcgtgtctaccgacccccagccactgaaagaacagcccgccctgaacgacagccggtactgcctgagcagcagactgagagtgtccgccaccttctggcagaacccccggaaccacttcagatgccaggtgcagttctacggcctgagcgagaacgacgagtggacccaggacagagccaagcccgtgacccagatcgtgtctgccgaagcctggggcagagccgattgcggatcccagagcttcggcctgctggaccccaagctgtgctacctgctggatggcatcctgttcatctacggcgtgatcctgaccgccctgttcctgggcggtggaggctctatccggaacggctctgaagttcgcgatcctctggtcacctacgagggcagcaatcctcctgccagtcctctgcaggataacctcgtgatcgccctgcacagctacgagccttctcatgatggcgacctgggctttgagaagggcgagcagctgagaatcctggaacagtctggcgagtggtggaaggcccagtctctgacaacaggccaagagggcttcatccccttcaacttcgtggccaaggccaacagcctggaacctgagccttggtttttcaagaacctgtccagaaaggacgccgagagacagctgctggcccctggaaatacccacggcagctttctgattagagagagcgagagcacagccggcagcttcagcctgagtgtgcgggactttgaccagaatcaaggcgaggtcgtgaagcactacaagatccggaacctggataacggcggcttctacatcagccccagaatcacctttcctggcctgcacgaactcgtgcggcactacacaaatgcctccgatggcctgtgcaccagactgagcagaccctgtcagacccagaagcctcagaaaccttggtgggaagatgagtgggaagtgcccagagaaaccctgaagctggtggaaagactcggagccggccagtttggagaagtgtggatgggctactacaatggccacaccaaggtggccgtgaagtctctgaagcagggctctatgagcccagatgcttttctggccgaggccaatctgatgaagcagctgcagcaccagagacttgtgcggctgtatgccgtggtcacccaagagcctatctacatcatcatcgagtacatggaaaacggcagcctggtggacttcctgaaaacccctagcggcatcaagctgaccattaacaagctgctggacatggccgctcagatcgccgaaggcatggcctttatcgaggaacggaactacatccacagggacctgagagccgccaatatcctggtgtctgacaccctgagctgcaagattgccgatttcggcctggccagactgatcgaggacaatgagtataccgccagagagggcgccaagtttcccatcaaatggacagcccctgaggccatcaactacggcaccttcaccatcaagagcgacgtgtggtccttcggcatcctgctgacagagatcgtgacacacggcagaatcccatatcctggcatgacaaaccccgaagtgatccagaatctggaacggggctacagaatggtccgacctgacaactgccccgaggaactgtaccagctgatgagactgtgctggaaagagaggcccgaggacagacccaccttcgactacctgagaagcgtgctggaagatttcttcaccgccaccgagggccagtaccagcctcagccaagggccaagcgatctggatctggagcaacaaacttctcactactcaaacaagcaggtgacgtggaggagaatcccgggcctactagtatggactggatttggcgcatccttttccttgtcggcgctgctaccggcgcgcattccttcgaacaagttcagcttcaacagcctggcgctgagctggtcaaacctggcgcttctgtgaagatgagctgcaaagccagcggctacgccttcagcagctactggatcaactggatgaagcagaaacccggccagggactcgaatggatcggccaaatctatcccggcgacggcgacaccaactacaacggcaagttcaagggcagagccacactgaccgccgatacctctagcagcacagcctacatgcagctgagcagcctgaccagcgaagatagcgccgtgtacttctgtgcccggtccatcacaacagtcgtgggctgcgctatggactattggggccagggaacaagcgtgaccgtgtctagtacgcgtatccagaaccctgatcctgccgtgtaccagctgcgggatagcaagagcagcgacaagagcgtgtgtctgttcaccgacttcgacagccagaccaacgtgtcccagagcaaggactccgacgtgtacatcaccgataagaccgtgctggacatgcggagcatggacttcaagagcaactccgccgtggcctggtccaacaagtccgatttcgcctgcgccaacgccttcaacaacagcattatccccgaggacacattcttcccaagccccgagagcagctgcggtaccatcactcaaggtttggcagtgtcaaccatctcatcattctttccacctggctaccaagtgtccttctgcctggtcatggtgctgctgttcgccgtggataccggcctgtacttcagcgtcaagaccaacatccggtccagcaccagagactggaaggaccacaagttcaagtggcggaaggaccctcaggacaagagggccaagcgatctggatctggagcaacaaacttctcactactcaaacaagcaggtgacgtggaggagaatcccgggccttctagaggccatatgaccgagtacaagcccacggtgcgcctcgccacccgcgacgacgtccccagggccgtacgcaccctcgccgccgcgttcgccgactaccccgccacgcgccacaccgtcgatccggaccgccacatcgagcgggtcaccgagctgcaagaactcttcctcacgcgcgtcgggctcgacatcggcaaggtgtgggtcgcggacgacggcgccgcggtggcggtctggaccacgccggagagcgtcgaagcgggggcggtgttcgccgagatcggcccgcgcatggccgagttgagcggttcccggctggccgcgcagcaacagatggaaggcctcctggcgccgcaccggcccaaggagcccgcgtggttcctggccaccgtcggcgtctcgcccgaccaccagggcaagggtctgggcagcgccgtcgtgctccccggagtggaggcggccgagcgcgccggggtgcccgccttcctggagacctccgcgccccgcaacctccccttctacgagcggctcggcttcaccgtcaccgccgacgtcgaggtgcccgaaggaccgcgcacctggtgcatgacccgcaagcccggtgcctga

SEQ ID NO: 32604 - DNA, 4182 bp, synthetic construct
  source 1..4182: mol_type = other DNA
atggccttaccagtgaccgccttgctcctgccgctggccttgctgctccacgccgccaggccggacatccagatgacacagagccctagcagcctgtctgccagcgtgggagacagagtgaccatcacatgcaaggccagcgaccacatcaacaactggctggcctggtatcagcagaagcctggacaggcccctaagctgctgatctacggcgctaccacactggaaacaggcgtgcccagcagattttctggcagcggctctggcaccgactacaccctgacaatatccagcctccagcctgaggacttcgccacctactactgtcagcagagctggaacaccccttggacattcggccagggcaccaagctggaaatcaagagactcgaggacctgaagaacgtgttcccacctgaggtggccgtgttcgagcctagcgaggccgagatcagccacacccagaaagccaccctcgtgtgcctggctaccggcttctaccccgaccatgtggaactgtcttggtgggtcaacggcaaagaggtgcacagcggcgtgtctaccgacccccagccactgaaagaacagcccgccctgaacgacagccggtactgcctgagcagcagactgagagtgtccgccaccttctggcagaacccccggaaccacttcagatgccaggtgcagttctacggcctgagcgagaacgacgagtggacccaggacagagccaagcccgtgacccagatcgtgtctgccgaagcctggggcagagccgattgcggatcccagagcttcggcctgctggaccccaagctgtgctacctgctggatggcatcctgttcatctacggcgtgatcctgaccgccctgttcctgggcggaggcggatctgccctgagaaacgtgcccttcagatccgaggttctcggctgggaccctgatagcctggccgactacttcaagaagctgaactacaaggactgcgagaaggccgtgaagaagtaccatatcgacggggccagattcctgaacctgaccgagaacgacatccagaagttccccaagctgcgggtgcccatcctgagcaagctgagccaagagatcaacaagaacgaggaacggcggagcatcttcacccggaaacctcaggtgcccagatttcccgaggaaaccgagagccacgaagaggacaatggcggctggtccagcttcgaggaagatgactacgagagccccaacgacgaccaggacggcgaagatgatggcgactacgagtcccctaatgaagaggaagaggcccctgtcgaggacgacgccgattatgaacctcctcctagcaacgacgaagaagccctccagaacagcatcctgcctgccaagccttttccaaacagcaacagcatgtacatcgaccggcctccaagcggcaagacacctcagcaacctccagttcctcctcagcggcctatggctgcacttcctccaccaccagccggcagaaatcactctccattgcctccacctcagaccaaccatgaggaacccagcagaagccggagaagcctggctcctttcgacagagagcccttcacactgggcaagaagcctccattcagcgacaagcctagcatccccgctggaagatccctgggagagcatctgcccaagatccagaagccacctctgcctccaaccaccgagagacatgagagaagcagccctctgcctggcaagaaaccacctgtgcctaagcacggctggggacccgacagaagagaaaacgacgaggacgatgtgcaccagcggcctttgcctcaacctgctctgctgcctatgagcagcaacacattccccagcagatccaccaagcctagtcctatgaaccctctgccaagcagccacatgcctggcgctttcagcgagagcaactccagctttcctcagagcgccagcctgcctccttacttcagtcagggacccagcaaccggccacctatcagagccgagggcagaaactttcccctgcctctgcctaacaagcccagacctccatctcctgccgaggaagagaacagcctgaacgaagagtggtacgtgtcctacatcacccggcctgaagccgaagccgcactgagaaagatcaaccaggatggcaccttccttgtgcgggacagcagcaagaaaaccacaacaaacccctacgtgctgatggtgctgtacaaggacaaggtgtacaacatccagatccgctaccagaaagaaagccaggtgtacctgctcggcaccggcctgagaggcaaagaggattttctgagcgtcagcgacatcatcgactactttagaaagatgcccctgctgctgatcgacggcaagaacaggggtagcagataccagtgcaccctgacacacgccgctggctatcctagggccaagcgatctggatctggagcaacaaacttctcactactcaaacaagcaggtgacgtggaggagaatcccgggcctactagtatggactggatttggcgcatccttttccttgtcggcgctgctaccggcgcgcattccttcgaacaagttcagcttcaacagcctggcgctgagctggtcaaacctggcgcttctgtgaagatgagctgcaaagccagcggctacgccttcagcagctactggatcaactggatgaagcagaaacccggccagggactcgaatggatcggccaaatctatcccggcgacggcgacaccaactacaacggcaagttcaagggcagagccacactgaccgccgatacctctagcagcacagcctacatgcagctgagcagcctgaccagcgaagatagcgccgtgtacttctgtgcccggtccatcacaacagtcgtgggctgcgctatggactattggggccagggaacaagcgtgaccgtgtctagtacgcgtatccagaaccctgatcctgccgtgtaccagctgcgggatagcaagagcagcgacaagagcgtgtgtctgttcaccgacttcgacagccagaccaacgtgtcccagagcaaggactccgacgtgtacatcaccgataagaccgtgctggacatgcggagcatggacttcaagagcaactccgccgtggcctggtccaacaagtccgatttcgcctgcgccaacgccttcaacaacagcattatccccgaggacacattcttcccaagccccgagagcagctgcggtaccatcactcaaggtttggcagtgtcaaccatctcatcattctttccacctggctaccaagtgtccttctgcctggtcatggtgctgctgttcgccgtggataccggcctgtacttcagcgtcaagagaggccggaagaagctgctgtacatcttcaagcagcctttcatgcggcccgtgcagaccacccaggaagaggacggctgctcctgccggttccccgaggaagaagaaggcggctgcgagctgcgcgccaagagaagcggatctggcgtgaagcagaccctgaatttcgacctgctgaagctggctggcgacgtggaatccaacccaggcccttctagaggccatatgaccgagtacaagcccacggtgcgcctcgccacccgcgacgacgtccccagggccgtacgcaccctcgccgccgcgttcgccgactaccccgccacgcgccacaccgtcgatccggaccgccacatcgagcgggtcaccgagctgcaagaactcttcctcacgcgcgtcgggctcgacatcggcaaggtgtgggtcgcggacgacggcgccgcggtggcggtctggaccacgccggagagcgtcgaagcgggggcggtgttcgccgagatcggcccgcgcatggccgagttgagcggttcccggctggccgcgcagcaacagatggaaggcctcctggcgccgcaccggcccaaggagcccgcgtggttcctggccaccgtcggcgtctcgcccgaccaccagggcaagggtctgggcagcgccgtcgtgctccccggagtggaggcggccgagcgcgccggggtgcccgccttcctggagacctccgcgccccgcaacctccccttctacgagcggctcggcttcaccgtcaccgccgacgtcgaggtgcccgaaggaccgcgcacctggtgcatgacccgcaagcccggtgcctga

SEQ ID NO: 32605 - DNA, 3333 bp, synthetic construct; identical to SEQ ID NO: 32536
  source 1..3333: mol_type = other DNA

SEQ ID NO: 32606 - DNA, 3363 bp, synthetic construct; identical to SEQ ID NO: 32537
  source 1..3363: mol_type = other DNA

SEQ ID NO: 32607 - DNA, 3777 bp, synthetic construct
  source 1..3777: mol_type = other DNA
atggccttaccagtgaccgccttgctcctgccgctggccttgctgctccacgccgccaggccggacatccagatgacacagagccctagcagcctgtctgccagcgtgggagacagagtgaccatcacatgcaaggccagcgaccacatcaacaactggctggcctggtatcagcagaagcctggacaggcccctaagctgctgatctacggcgctaccacactggaaacaggcgtgcccagcagattttctggcagcggctctggcaccgactacaccctgacaatatccagcctccagcctgaggacttcgccacctactactgtcagcagagctggaacaccccttggacattcggccagggcaccaagctggaaatcaagagactcgaggacctgaagaacgtgttcccacctgaggtggccgtgttcgagcctagcgaggccgagatcagccacacccagaaagccaccctcgtgtgcctggctaccggcttctaccccgaccatgtggaactgtcttggtgggtcaacggcaaagaggtgcacagcggcgtgtctaccgacccccagccactgaaagaacagcccgccctgaacgacagccggtactgcctgagcagcagactgagagtgtccgccaccttctggcagaacccccggaaccacttcagatgccaggtgcagttctacggcctgagcgagaacgacgagtggacccaggacagagccaagcccgtgacccagatcgtgtctgccgaagcctggggcagagccgattgcggatcccagagcttcggcctgctggaccccaagctgtgctacctgctggatggcatcctgttcatctacggcgtgatcctgaccgccctgttcctgagagtgaagttcagcagaagcgccgacgcccctgcctaccagcagggacagaaccaactgtacaacgagctgaacctgggcagacgggaagagtacgacgtgctggacaagcggagaggcagggaccctgagatgggcggaaagccccggagaaagaacccccaggaaggactgtataacgaactccagaaagacaagatggccgaagcctacagcgagatcggcatgaagggcgagcggagaagaggcaagggccacgatggcctgtaccagggcctgagcaccgccaccaaggacacctatgacgccctgcacatgcaggccctgcctccaagaagggccaagcgatctggatctggagcaacaaacttctcactactcaaacaagcaggtgacgtggaggagaatcccgggcctactagtgccaccatggactggatttggcgcatccttttccttgtcggcgctgctaccggcgcccattccgggcccgaagtgcagctggttgaatctggcggaggactggttcaggctggcggatctctgagactgtcttgtgccgccagcggcagaacctttagcatgggctggtttagacaggcccctggcaaagagagagagttcgtcgccgccatcacatactctggcggcagcccttactacgccgactctgtgaagggcagattcaccatcagccgggacaacgccaagaacaccgtgtacctccagatgaacagcctgaagcctgaggacaccgccgtgtactactgcgccgccaatccaacatacggcagcgactggaacgccgagaattggggccagggaacccaagtgacagtgtctagcggatccggcggcggaggatctggcggaggcggatctgggggcggaggctctttcgaacaagttcagcttcaacagcctggcgctgagctggtcaaacctggcgcttctgtgaagatgagctgcaaagccagcggctacgccttcagcagctactggatcaactggatgaagcagaaacccggccagggactcgaatggatcggccaaatctatcccggcgacggcgacaccaactacaacggcaagttcaagggcagagccacactgaccgccgatacctctagcagcacagcctacatgcagctgagcagcctgaccagcgaagatagcgccgtgtacttctgtgcccggtccatcacaacagtcgtgggctgcgctatggactattggggccagggaacaagcgtgaccgtgtctagtacgcgtatccagaaccctgatcctgccgtgtaccagctgcgggatagcaagagcagcgacaagagcgtgtgtctgttcaccgacttcgacagccagaccaacgtgtcccagagcaaggactccgacgtgtacatcaccgataagaccgtgctggacatgcggagcatggacttcaagagcaactccgccgtggcctggtccaacaagtccgatttcgcctgcgccaacgccttcaacaacagcattatccccgaggacacattcttcccaagccccgagagcagctgcggtaccatcactcaaggtttggcagtgtcaaccatctcatcattctttccacctggctaccaagtgtccttctgcctggtcatggtgctgctgttcgccgtggataccggcctgtacttcagcgtccactgtcacagactgcctggcagctacgatagcaccagcagcgacagcctgtatcctcggggcatccagttcaagaggccacacacagttgccccttggcctccagcttaccctcctgtgacaagctaccctccactgagccagcctgacctgctgcctattcctagaagccctcagcctctcggcggcagccatagaacacctagcagcagaagagacagcgacggggccaatagcgtggcctcctatgagaatgagggcgcttccggcattaggggcgctcaagctggatggggagtttggggacctagctggacaagactgacccctgtgtctctgcctcctgaacctgcctgcgaagatgccgacgaggacgaggatgactatcacaaccctggctacctggtggtgctgcctgatagcacaccagccacatctacagccgctccatctgctccagctctgagcacacctggcatcagagatagcgccttcagcatggaatccatcgacgaccgcgccaagagaagcggatctggcgtgaagcagaccctgaatttcgacctgctgaagctggctggcgacgtggaatccaacccaggcccttctagaggccatatgaccgagtacaagcccacggtgcgcctcgccacccgcgacgacgtccccagggccgtacgcaccctcgccgccgcgttcgccgactaccccgccacgcgccacaccgtcgatccggaccgccacatcgagcgggtcaccgagctgcaagaactcttcctcacgcgcgtcgggctcgacatcggcaaggtgtgggtcgcggacgacggcgccgcggtggcggtctggaccacgccggagagcgtcgaagcgggggcggtgttcgccgagatcggcccgcgcatggccgagttgagcggttcccggctggccgcgcagcaacagatggaaggcctcctggcgccgcaccggcccaaggagcccgcgtggttcctggccaccgtcggcgtctcgcccgaccaccagggcaagggtctgggcagcgccgtcgtgctccccggagtggaggcggccgagcgcgccggggtgcccgccttcctggagacctccgcgccccgcaacctccccttctacgagcggctcggcttcaccgtcaccgccgacgtcgaggtgcccgaaggaccgcgcacctggtgcatgacccgcaagcccggtgcctga

SEQ ID NO: 32608 - DNA, 2322 bp, synthetic construct
  source 1..2322: mol_type = other DNA
atggccttaccagtgaccgccttgctcctgccgctggccttgctgctccacgccgccaggccggacatccagatgacacagagccctagcagcctgtctgccagcgtgggagacagagtgaccatcacatgcaaggccagcgaccacatcaacaactggctggcctggtatcagcagaagcctggacaggcccctaagctgctgatctacggcgctaccacactggaaacaggcgtgcccagcagattttctggcagcggctctggcaccgactacaccctgacaatatccagcctccagcctgaggacttcgccacctactactgtcagcagagctggaacaccccttggacattcggccagggcaccaagctggaaatcaagagactcgaggacctgaagaacgtgttcccacctgaggtggccgtgttcgagcctagcgaggccgagatcagccacacccagaaagccaccctcgtgtgcctggctaccggcttctaccccgaccatgtggaactgtcttggtgggtcaacggcaaagaggtgcacagcggcgtgtctaccgacccccagccactgaaagaacagcccgccctgaacgacagccggtactgcctgagcagcagactgagagtgtccgccaccttctggcagaacccccggaaccacttcagatgccaggtgcagttctacggcctgagcgagaacgacgagtggacccaggacagagccaagcccgtgacccagatcgtgtctgccgaagcctggggcagagccgattgcggatcccagagcttcggcctgctggaccccaagctgtgctacctgctggatggcatcctgttcatctacggcgtgatcctgaccgccctgttcctgggcggtggaggctctatccggaacggctctgaagttcgcgatcctctggtcacctacgagggcagcaatcctcctgccagtcctctgcaggataacctcgtgatcgccctgcacagctacgagccttctcatgatggcgacctgggctttgagaagggcgagcagctgagaatcctggaacagtctggcgagtggtggaaggcccagtctctgacaacaggccaagagggcttcatccccttcaacttcgtggccaaggccaacagcctggaacctgagccttggtttttcaagaacctgtccagaaaggacgccgagagacagctgctggcccctggaaatacccacggcagctttctgattagagagagcgagagcacagccggcagcttcagcctgagtgtgcgggactttgaccagaatcaaggcgaggtcgtgaagcactacaagatccggaacctggataacggcggcttctacatcagccccagaatcacctttcctggcctgcacgaactcgtgcggcactacacaaatgcctccgatggcctgtgcaccagactgagcagaccctgtcagacccagaagcctcagaaaccttggtgggaagatgagtgggaagtgcccagagaaaccctgaagctggtggaaagactcggagccggccagtttggagaagtgtggatgggctactacaatggccacaccaaggtggccgtgaagtctctgaagcagggctctatgagcccagatgcttttctggccgaggccaatctgatgaagcagctgcagcaccagagacttgtgcggctgtatgccgtggtcacccaagagcctatctacatcatcaccgagtacatggaaaacggcagcctggtggacttcctgaaaacccctagcggcatcaagctgaccattaacaagctgctggacatggccgctcagatcgccgaaggcatggcctttatcgaggaacggaactacatccacagggacctgagagccgccaatatcctggtgtctgacaccctgagctgcaagattgccgatttcggcctggccagactgatcgaggacaatgagtataccgccagagagggcgccaagtttcccatcaaatggacagcccctgaggccatcaactacggcaccttcaccatcaagagcgacgtgtggtccttcggcatcctgctgacagagatcgtgacacacggcagaatcccatatcctggcatgacaaaccccgaagtgatccagaatctggaacggggctacagaatggtccgacctgacaactgccccgaggaactgtaccagctgatgagactgtgctggaaagagaggcccgaggacagacccaccttcgactacctgagaagcgtgctggaagatttcttcaccgccaccgagggccagtaccagcctcagccagggaattcctga

SEQ ID NO: 32609 - DNA, 4365 bp, synthetic construct
  source 1..4365: mol_type = other DNA
atggccttaccagtgaccgccttgctcctgccgctggccttgctgctccacgccgccaggccggacatccagatgacacagagccctagcagcctgtctgccagcgtgggagacagagtgaccatcacatgcaaggccagcgaccacatcaacaactggctggcctggtatcagcagaagcctggacaggcccctaagctgctgatctacggcgctaccacactggaaacaggcgtgcccagcagattttctggcagcggctctggcaccgactacaccctgacaatatccagcctccagcctgaggacttcgccacctactactgtcagcagagctggaacaccccttggacattcggccagggcaccaagctggaaatcaagagactcgaggacctgaagaacgtgttcccacctgaggtggccgtgttcgagcctagcgaggccgagatcagccacacccagaaagccaccctcgtgtgcctggctaccggcttctaccccgaccatgtggaactgtcttggtgggtcaacggcaaagaggtgcacagcggcgtgtctaccgacccccagccactgaaagaacagcccgccctgaacgacagccggtactgcctgagcagcagactgagagtgtccgccaccttctggcagaacccccggaaccacttcagatgccaggtgcagttctacggcctgagcgagaacgacgagtggacccaggacagagccaagcccgtgacccagatcgtgtctgccgaagcctggggcagagccgattgcggatcccagagcttcggcctgctggaccccaagctgtgctacctgctggatggcatcctgttcatctacggcgtgatcctgaccgccctgttcctgggcggaggcggatctgccctgagaaacgtgcccttcagatccgaggttctcggctgggaccctgatagcctggccgactacttcaagaagctgaactacaaggactgcgagaaggccgtgaagaagtaccatatcgacggggccagattcctgaacctgaccgagaacgacatccagaagttccccaagctgcgggtgcccatcctgagcaagctgagccaagagatcaacaagaacgaggaacggcggagcatcttcacccggaaacctcaggtgcccagatttcccgaggaaaccgagagccacgaagaggacaatggcggctggtccagcttcgaggaagatgactacgagagccccaacgacgaccaggacggcgaagatgatggcgactacgagtcccctaatgaagaggaagaggcccctgtcgaggacgacgccgattatgaacctcctcctagcaacgacgaagaagccctccagaacagcatcctgcctgccaagccttttccaaacagcaacagcatgtacatcgaccggcctccaagcggcaagacacctcagcaacctccagttcctcctcagcggcctatggctgcacttcctccaccaccagccggcagaaatcactctccattgcctccacctcagaccaaccatgaggaacccagcagaagccggagaagcctggctcctttcgacagagagcccttcacactgggcaagaagcctccattcagcgacaagcctagcatccccgctggaagatccctgggagagcatctgcccaagatccagaagccacctctgcctccaaccaccgagagacatgagagaagcagccctctgcctggcaagaaaccacctgtgcctaagcacggctggggacccgacagaagagaaaacgacgaggacgatgtgcaccagcggcctttgcctcaacctgctctgctgcctatgagcagcaacacattccccagcagatccaccaagcctagtcctatgaaccctctgccaagcagccacatgcctggcgctttcagcgagagcaactccagctttcctcagagcgccagcctgcctccttacttcagtcagggacccagcaaccggccacctatcagagccgagggcagaaactttcccctgcctctgcctaacaagcccagacctccatctcctgccgaggaagagaacagcctgaacgaagagtggtacgtgtcctacatcacccggcctgaagccgaagccgcactgagaaagatcaaccaggatggcaccttccttgtgcgggacagcagcaagaaaaccacaacaaacccctacgtgctgatggtgctgtacaaggacaaggtgtacaacatccagatccgctaccagaaagaaagccaggtgtacctgctcggcaccggcctgagaggcaaagaggattttctgagcgtcagcgacatcatcgactactttagaaagatgcccctgctgctgatcgacggcaagaacaggggtagcagataccagtgcaccctgacacacgccgctggctatcctagggccaagcgatctggatctggagcaacaaacttctcactactcaaacaagcaggtgacgtggaggagaatcccgggcctactagtatggactggatttggcgcatccttttccttgtcggcgctgctaccggcgcgcattccttcgaacaagttcagcttcaacagcctggcgctgagctggtcaaacctggcgcttctgtgaagatgagctgcaaagccagcggctacgccttcagcagctactggatcaactggatgaagcagaaacccggccagggactcgaatggatcggccaaatctatcccggcgacggcgacaccaactacaacggcaagttcaagggcagagccacactgaccgccgatacctctagcagcacagcctacatgcagctgagcagcctgaccagcgaagatagcgccgtgtacttctgtgcccggtccatcacaacagtcgtgggctgcgctatggactattggggccagggaacaagcgtgaccgtgtctagtacgcgtatccagaaccctgatcctgccgtgtaccagctgcgggatagcaagagcagcgacaagagcgtgtgtctgttcaccgacttcgacagccagaccaacgtgtcccagagcaaggactccgacgtgtacatcaccgataagaccgtgctggacatgcggagcatggacttcaagagcaactccgccgtggcctggtccaacaagtccgatttcgcctgcgccaacgccttcaacaacagcattatccccgaggacacattcttcccaagccccgagagcagctgcggtacccagagttttgggttgttggaccctaaattgtgctatctgttggacggaatcctgttcatttacggagtgatcctgaccgcattgttcctgcgggttaagttttccagatccgcagacgcacccgcttaccaacaagggcagaaccaactctacaatgaacttaatttggggcggagggaagagtacgacgttctggacaaaaggaggggacgagatcccgagatgggcggaaagcctcagcgaaggaagaatccgcaagaggggctttataacgaactccagaaagataaaatggcagaagcctatagtgagattgggatgaagggagaaaggaggaggggtaaaggtcacgatgggttgtaccaaggattgagcacagccactaaagatacctatgatgcgctccacatgcaggccctgccgccaagacgcgccaagagaagcggatctggcgtgaagcagaccctgaatttcgacctgctgaagctggctggcgacgtggaatccaacccaggcccttctagaggccatatgaccgagtacaagcccacggtgcgcctcgccacccgcgacgacgtccccagggccgtacgcaccctcgccgccgcgttcgccgactaccccgccacgcgccacaccgtcgatccggaccgccacatcgagcgggtcaccgagctgcaagaactcttcctcacgcgcgtcgggctcgacatcggcaaggtgtgggtcgcggacgacggcgccgcggtggcggtctggaccacgccggagagcgtcgaagcgggggcggtgttcgccgagatcggcccgcgcatggccgagttgagcggttcccggctggccgcgcagcaacagatggaaggcctcctggcgccgcaccggcccaaggagcccgcgtggttcctggccaccgtcggcgtctcgcccgaccaccagggcaagggtctgggcagcgccgtcgtgctccccggagtggaggcggccgagcgcgccggggtgcccgccttcctggagacctccgcgccccgcaacctccccttctacgagcggctcggcttcaccgtcaccgccgacgtcgaggtgcccgaaggaccgcgcacctggtgcatgacccgcaagcccggtgcctga

SEQ ID NO: 32610 - DNA, 1518 bp, synthetic construct; identical to SEQ ID NO: 32316
  source 1..1518: mol_type = other DNA

SEQ ID NO: 32611 - DNA, 1446 bp, synthetic construct
  source 1..1446: mol_type = other DNA
atggccttaccagtgaccgccttgctcctgccgctggccttgctgctccacgccgccaggccggacatccagatgacacagagccctagcagcctgtctgccagcgtgggagacagagtgaccatcacatgcaaggccagcgaccacatcaacaactggctggcctggtatcagcagaagcctggacaggcccctaagctgctgatctacggcgctaccacactggaaacaggcgtgcccagcagattttctggcagcggctctggcaccgactacaccctgacaatatccagcctccagcctgaggacttcgccacctactactgtcagcagagctggaacaccccttggacattcggccagggcaccaagctggaaatcaagagaggcggaggcggaagtggaggcggaggatctggcggcggaggctctcaagttcagcttcaacagcctggcgctgagctggtcaaacctggcgcttctgtgaagatgagctgcaaagccagcggctacgccttcagcagctactggatcaactggatgaagcagaaacccggccagggactcgaatggatcggccaaatctatcccggcgacggcgacaccaactacaacggcaagttcaagggcagagccacactgaccgccgatacctctagcagcacagcctacatgcagctgagcagcctgaccagcgaagatagcgccgtgtacttctgtgcccggtccatcacaacagtcgtgggctgcgctatggactattggggccagggaacaagcgtgaccgtgtctagtacgcgtagccagtttagagtgtcccctctggacagaacctggaacctgggcgagacagtggaactgaagtgccaggtgctgctgagcaaccctacaagcggctgctcctggctgtttcagcctagaggtgcagccgcctctcctacctttctgctgtacctgagccagaacaagcccaaggccgccgaaggactggacacccagagattcagcggcaagagactgggcgacaccttcgtgctgaccctgagcgacttcagaagagagaacgagggctactacttctgtagcgccctgagcaacagcatcatgtacttcagccacttcgtgcccgtgtttctgcccgccaagcctacaacaacccctgctcctagacctcctacaccagctcctacaatcgccagccagcctctgtctctcagacccgaagcctgtagacctgctgctggcggagctgtgcataccagaggactggatttcgcctgcgacatctacatctgggctcctctggctggcacatgtggcgtgctgctgctgtccctggtcatcaccctgtactgcaaccaccggaacaggcggagagtgtgcaagtgccctagacctgtggtcaagagcggcgacaagcctagcctgagcgccagatatgtttaa

SEQ ID NO: 32612 - DNA, 1137 bp, synthetic construct
  source 1..1137: mol_type = other DNA
atggccttaccagtgaccgccttgctcctgccgctggccttgctgctccacgccgccaggccggacatccagatgacacagagccctagcagcctgtctgccagcgtgggagacagagtgaccatcacatgcaaggccagcgaccacatcaacaactggctggcctggtatcagcagaagcctggacaggcccctaagctgctgatctacggcgctaccacactggaaacaggcgtgcccagcagattttctggcagcggctctggcaccgactacaccctgacaatatccagcctccagcctgaggacttcgccacctactactgtcagcagagctggaacaccccttggacattcggccagggcaccaagctggaaatcaagagaggcggaggcggaagtggaggcggaggatctggcggcggaggctctcaagttcagcttcaacagcctggcgctgagctggtcaaacctggcgcttctgtgaagatgagctgcaaagccagcggctacgccttcagcagctactggatcaactggatgaagcagaaacccggccagggactcgaatggatcggccaaatctatcccggcgacggcgacaccaactacaacggcaagttcaagggcagagccacactgaccgccgatacctctagcagcacagcctacatgcagctgagcagcctgaccagcgaagatagcgccgtgtacttctgtgcccggtccatcacaacagtcgtgggctgcgctatggactattggggccagggaacaagcgtgaccgtgtctagtacgcgtaccacgacgccagcgccgcgaccaccaacaccggcgcccaccatcgcgtcgcagcccctgtccctgcgcccagaggcgtgccggccagcggcggggggcgcagtgcacacgagggggctggacttcgcctgtgacatctacatctgggcgcccttggccgggacttgtggggtccttctcctgtcactggttatcaccctttactgcaaacggggcagaaagaaactcctgtatatattcaaacaaccatttatgagaccagtacaaactactcaagaggaagatggctgtagctgccgatttccagaagaagaagaaggaggatgtgaactgtga

SEQ ID NO: 32613 - DNA, 1920 bp, synthetic construct
  source 1..1920: mol_type = other DNA
atggccttaccagtgaccgccttgctcctgccgctggccttgctgctccacgccgccaggccgctcgagatccagaaccctgatcctgccgtgtaccagctgcgggatagcaagagcagcgacaagagcgtgtgtctgttcaccgacttcgacagccagaccaacgtgtcccagagcaaggactccgacgtgtacatcaccgataagtgcgtgctggacatgcggagcatggacttcaagagcaactccgccgtggcctggtccaacaagtccgatttcgcctgcgccaacgccttcaacaacagcattatccccgaggacacattcttcccaagccccgagagcagctgcgacgtgaagctggtggaaaagagcttcgagacagacaccaacctgaacttccagaacctgagcgtgatcggcttcagaatcctgctgctgaaagtggccggctttaacctgctgatgaccctgcggctgtggtccagctctagtcgcgccaagagaagcggatctggcgtgaagcagaccctgaatttcgacctgctgaagctggctggcgacgtggaatccaacccaggccctactagtatggactggatttggcgcatccttttccttgtcggcgctgctaccggcgcgcattccttcgaagacatccagatgacacagagccctagcagcctgtctgccagcgtgggagacagagtgaccatcacctgtagagccagccaggacatcagcaactacctgaactggtatcagcagaagcccggcaaggcccctaagctgctgatctactacaccagcagactgcacagcggcgtgcccagcagattttctggctctggcagcggcaccgacttcaccctgacaatatctagcctccagcctgaggacttcgccacctactattgccagcagggcaacaccctgccttacacatttggacagggcaccaaggtggaaatcaagagaggcggaggcggaagtggaggcggaggatctggcggcggaggctctgaagtgcagctggttgaatcaggtggcggcctggttcaacctggcggatctctgagactgagctgtgccgccagcggcttcaccttcagcgactactttatgagctgggtccgacaggcccctggcaaaggacttgaatgggtcgccaccatcagcaatggcggcacctacacttactaccccgacagcgtgaagggcagattcaccatctccagagacaacagcaagaacaccctgtacctccagatgaactccctgagagccgaggacaccgccgtgtactactgcgccagattcgacggctacatcttcgactattggggccagggcaccctggtcacagtctcttctacgcgtgaggacctgaagaacgtgttcccacctgaggtggccgtgttcgagcctagcgaggccgagatcagccacacccagaaagccaccctcgtgtgcctggctaccggcttctaccccgaccatgtggaactgtcttggtgggtcaacggcaaagaggtgcacagcggcgtgtgtaccgacccccagccactgaaagaacagcccgccctgaacgacagccggtactgcctgagcagcagactgagagtgtccgccaccttctggcagaacccccggaaccacttcagatgccaggtgcagttctacggcctgagcgagaacgacgagtggacccaggacagagccaagcccgtgacccagatcgtgtctgccgaagcctggggcagagccgattgcggctttaccagcgagagctaccagcagggcgtgctgagcgccaccatcctgtacgagatcctgctgggcaaggccaccctgtacgccgtgctggtgtctgccctggtgctgatggctatggtcaagcggaaggacagccggggataa

SEQ ID NO: 32614 - DNA, 1878 bp, synthetic construct
  source 1..1878: mol_type = other DNA
atggccttaccagtgaccgccttgctcctgccgctggccttgctgctccacgccgccaggccggacatccagatgacccagagccccagcagcctgtctgccagcgtgggcgacagagtgaccatcacctgtcggagcagccagagcatcgtgcactccgtgggcaacaccttcctggaatggtatcagcagaagcccggcaaggcccccaagctgctgatctacaaggtgtccaacagattcagcggcgtgcccagcaggtttagcggctctggcagcggcaccgacttcaccctgaccatctctagcctccagcccgaggacttcgccacctactactgttttcaaggcagccagttcccctacaccttcggccagggaacaaaggtggaaatcaagcggctcgaggacctgaagaacgtgttcccacctgaggtggccgtgttcgagcctagcaaggccgagatcgcccacacccagaaagccaccctcgtgtgcctggctaccggcttctaccccgaccatgtggaactgtcttggtgggtcaacggcaaagaggtgcacagcggcgtgtgtaccgacccccagccactgaaagaacagcccgccctgaacgacagccggtactgcctgagcagcagactgagagtgtccgccaccttctggcagaacccccggaaccacttcagatgccaggtgcagttctacggcctgagcgagaacgacgagtggacccaggacagagccaagcccgtgacccagatcgtgtctgccgaagcctggggcagagccgattgcggcatcaccagcgccagctaccaccagggcgtgctgagcgccaccatcctgtacgagatcctgctgggcaaggccaccctgtacgccgtgctggtgtctgccctggtgctgatggctatggtcaagcggaaggacagccggggaagggccaagcgatctggatctggagcaacaaacttctcactactcaaacaagcaggtgacgtggaggagaatcccgggcctactagtatggactggatttggcgcatccttttccttgtcggcgctgctaccggcgcgcattccttcgaagtgcaactggtggaaagcggaggcggcctggtgcagcctggcggatctctgagactgagctgtgccgccagcggctacgagttcagccggtcctggatgaactgggtgcgccaggcccctggcaagggactggaatgggtgggaagaatctaccccggcgacggcgacaccaactacagcggcaagttcaagggccggttcaccatcagcgccgacaccagcaagaacaccgcctacctccagatgaacagcctgcgggccgaggataccgccgtgtactactgtgccagagatggcagctcctgggactggtacttcgacgtgtggggacagggaacccttgtgaccgtgtccagcacgcgtatccagaaccctgatcctgccgtgtaccagctgcgggatagcaagagcagcgacaagagcgtgtgtctgttcaccgacttcgacagccagaccaacgtgtcccagagcaaggactccgacgtgtacatcaccgataagtgcgtgctggacatgcggagcatggacttcaagagcaactccgccgtggcctggtccaacaagtccgatttcgcctgcgccaacgccttcaacaacagcattatccccgaggacacattcttcccaagccccgagagcagctgcgacgtgaagctggtggaaaagagcttcgagacagacaccaacctgaacttccagaacctgagcgtgatcggcttcagaatcctgctgctgaaagtggccggctttaacctgctgatgaccctgcggctgtggtccagctaa

SEQ ID NO: 32615 - DNA, 1881 bp, synthetic construct
  source 1..1881: mol_type = other DNA
atggccttaccagtgaccgccttgctcctgccgctggccttgctgctccacgccgccaggccggacatccagatgacccagagccccagcagcctgtctgccagcgtgggcgacagagtgaccatcacctgtcggagcagccagagcatcgtgcactccgtgggcaacaccttcctggaatggtatcagcagaagcccggcaaggcccccaagctgctgatctacaaggtgtccaacagattcagcggcgtgcccagcaggtttagcggctctggcagcggcaccgacttcaccctgaccatctctagcctccagcccgaggacttcgccacctactactgttttcaaggcagccagttcccctacaccttcggccagggaacaaaggtggaaatcaagcggctcgaggacctgaagaacgtgttcccacctgaggtggccgtgttcgagcctagcgaggccgagatcagccacacccagaaagccaccctcgtgtgcctggctaccggcttctaccccgaccatgtggaactgtcttggtgggtcaacggcaaagaggtgcacagcggcgtgtgtaccgacccccagccactgaaagaacagcccgccctgaacgacagccggtactgcctgagcagcagactgagagtgtccgccaccttctggcagaacccccggaaccacttcagatgccaggtgcagttctacggcctgagcgagaacgacgagtggacccaggacagagccaagcccgtgacccagatcgtgtctgccgaagcctggggcagagccgattgcggctttaccagcgagagctaccagcagggcgtgctgagcgccaccatcctgtacgagatcctgctgggcaaggccaccctgtacgccgtgctggtgtctgccctggtgctgatggctatggtcaagcggaaggacagccggggaagggccaagcgatctggatctggagcaacaaacttctcactactcaaacaagcaggtgacgtggaggagaatcccgggcctactagtatggactggatttggcgcatccttttccttgtcggcgctgctaccggcgcgcattccttcgaagaagtgcaactggtggaaagcggaggcggcctggtgcagcctggcggatctctgagactgagctgtgccgccagcggctacgagttcagccggtcctggatgaactgggtgcgccaggcccctggcaagggactggaatgggtgggaagaatctaccccggcgacggcgacaccaactacagcggcaagttcaagggccggttcaccatcagcgccgacaccagcaagaacaccgcctacctccagatgaacagcctgcgggccgaggataccgccgtgtactactgtgccagagatggcagctcctgggactggtacttcgacgtgtggggacagggaacccttgtgaccgtgtccagcacgcgtatccagaaccctgatcctgccgtgtaccagctgcgggatagcaagagcagcgacaagagcgtgtgtctgttcaccgacttcgacagccagaccaacgtgtcccagagcaaggactccgacgtgtacatcaccgataagtgcgtgctggacatgcggagcatggacttcaagagcaactccgccgtggcctggtccaacaagtccgatttcgcctgcgccaacgccttcaacaacagcattatccccgaggacacattcttcccaagccccgagagcagctgcgacgtgaagctggtggaaaagagcttcgagacagacaccaacctgaacttccagaacctgagcgtgatcggcttcagaatcctgctgctgaaagtggccggctttaacctgctgatgaccctgcggctgtggtccagctaa

SEQ ID NO: 32616 - DNA, 1881 bp, synthetic construct
  source 1..1881: mol_type = other DNA
atggccttaccagtgaccgccttgctcctgccgctggccttgctgctccacgccgccaggccggacatccagatgacccagagccccagcagcctgtctgccagcgtgggcgacagagtgaccatcacctgtcggagcagccagagcatcgtgcactccgtgggcaacaccttcctggaatggtatcagcagaagcccggcaaggcccccaagctgctgatctacaaggtgtccaacagattcagcggcgtgcccagcaggtttagcggctctggcagcggcaccgacttcaccctgaccatctctagcctccagcccgaggacttcgccacctactactgttttcaaggcagccagttcccctacaccttcggccagggaacaaaggtggaaatcaagcggctcgaggacctgaagaacgtgttcccacctgaggtggccgtgttcgagcctagcaaggccgagatcgcccacacccagaaagccaccctcgtgtgcctggctaccggcttctaccccgaccatgtggaactgtcttggtgggtcaacggcaaagaggtgcacagcggcgtgtgtaccgacccccagccactgaaagaacagcccgccctgaacgacagccggtactgcctgagcagcagactgagagtgtccgccaccttctggcagaacccccggaaccacttcagatgccaggtgcagttctacggcctgagcgagaacgacgagtggacccaggacagagccaagcccgtgacccagatcgtgtctgccgaagcctggggcagagccgattgcggcatcaccagcgccagctaccaccagggcgtgctgagcgccaccatcctgtacgagatcctgctgggcaaggccaccctgtacgccgtgctggtgtctgccctggtgctgatggctatggtcaagcggaaggacagccggggaagggccaagcgatctggatctggagcaacaaacttctcactactcaaacaagcaggtgacgtggaggagaatcccgggcctactagtatggactggatttggcgcatccttttccttgtcggcgctgctaccggcgcgcattccttcgaagaagtgcaactggtggaaagcggaggcggcctggtgcagcctggcggatctctgagactgagctgtgccgccagcggctacgagttcagccggtcctggatgaactgggtgcgccaggcccctggcaagggactggaatgggtgggaagaatctaccccggcgacggcgacaccaactacagcggcaagttcaagggccggttcaccatcagcgccgacaccagcaagaacaccgcctacctccagatgaacagcctgcgggccgaggataccgccgtgtactactgtgccagagatggcagctcctgggactggtacttcgacgtgtggggacagggaacccttgtgaccgtgtccagcacgcgtatccagaaccctgatcctgccgtgtaccagctgcgggatagcaagagcagcgacaagagcgtgtgtctgttcaccgacttcgacagccagaccaacgtgtcccagagcaaggactccgacgtgtacatcaccgataagtgcgtgctggacatgcggagcatggacttcaagagcaactccgccgtggcctggtccaacaagtccgatttcgcctgcgccaacgccttcaacaacagcattatccccgaggacacattcttcccaagccccgagagcagctgcgacgtgaagctggtggaaaagagcttcgagacagacaccaacctgaacttccagaacctgagcgtgatcggcttcagaatcctgctgctgaaagtggccggctttaacctgctgatgaccctgcggctgtggtccagctaa

SEQ ID NO: 32617 - DNA, 1881 bp, synthetic construct; identical to SEQ ID NO: 32615
  source 1..1881: mol_type = other DNA

SEQ ID NO: 32618 - DNA, 2943 bp, synthetic construct
  source 1..2943: mol_type = other DNA
atggccttaccagtgaccgccttgctcctgccgctggccttgctgctccacgccgccaggccggaagttcagctggttcagagcggagccgaagtgaagaagcctggcgagagcctgaagattagctgcaaaggcagcggctacggcttcaccagctattggatcggctgggtccgacagatgcctggcaaaggactggaatggatgggcatcattcaccccgacgacagcgacaccaagtacagccctagcttccagggccaagtgaccatcagcgccgacaagagcatcagcacagcctacctccagtggtcctctctgaaggccagcgataccgccatgtactactgcgccagcagctacctgagaggactgtggggcggctacttcgatttttggggccagggcacactggtcaccgttagttctctcgaggacctgaagaacgtgttcccacctgaggtggccgtgttcgagcctagcgaggccgagatcagccacacccagaaagccaccctcgtgtgcctggctaccggcttctaccccgaccatgtggaactgtcttggtgggtcaacggcaaagaggtgcacagcggcgtgtctaccgacccccagccactgaaagaacagcccgccctgaacgacagccggtactgcctgagcagcagactgagagtgtccgccaccttctggcagaacccccggaaccacttcagatgccaggtgcagttctacggcctgagcgagaacgacgagtggacccaggacagagccaagcccgtgacccagatcgtgtctgccgaagcctggggcagagccgattgcggatcccagagcttcggcctgctggaccccaagctgtgctacctgctggatggcatcctgttcatctacggcgtgatcctgaccgccctgttcctgagagtgaagttcagcagaagcgccgacgcccctgcctaccagcagggacagaaccaactgtacaacgagctgaacctgggcagacgggaagagtacgacgtgctggacaagcggagaggcagggaccctgagatgggcggaaagccccggagaaagaacccccaggaaggactgtataacgaactccagaaagacaagatggccgaagcctacagcgagatcggcatgaagggcgagcggagaagaggcaagggccacgatggcctgtaccagggcctgagcaccgccaccaaggacacctatgacgccctgcacatgcaggccctgcctccaagaagggccaagcgatctggatctggagcaacaaacttctcactactcaaacaagcaggtgacgtggaggagaatcccgggcctactagtatggactggatttggcgcatccttttccttgtcggcgctgctaccggcgcgcattccttcgaactgcaaagcgtgctgacacagcctcctagcgcctctggaacacctggacagagagtgacaatcagctgctccggcagctccagcaacatcggcagcaactacgtgaactggtatcagcagctgcctggcacagcccctaaactgctgatctacggcgactaccagaggccaagcggcgtgccagatagattcagcggcagcaagtctggcacaagcgccagcctggctatctctggactgagaagcgaggacgaggccgactactactgtgccaccagagatgatagcctgagcggcagcgtggtgtttggcacaggcacaaagctgacagtgctgggcacgcgtatccagaaccctgatcctgccgtgtaccagctgcgggatagcaagagcagcgacaagagcgtgtgtctgttcaccgacttcgacagccagaccaacgtgtcccagagcaaggactccgacgtgtacatcaccgataagaccgtgctggacatgcggagcatggacttcaagagcaactccgccgtggcctggtccaacaagtccgatttcgcctgcgccaacgccttcaacaacagcattatccccgaggacacattcttcccaagccccgagagcagctgcggtaccatcactcaaggtttggcagtgtcaaccatctcatcattctttccacctggctaccaagtgtccttctgcctggtcatggtgctgctgttcgccgtggataccggcctgtacttcagcgtcaagaccaacatccggtccagcaccagagactggaaggaccacaagttcaagtggcggaaggaccctcaggacaagagggccaagcgatctggatctggagcaacaaacttctcactactcaaacaagcaggtgacgtggaggagaatcccgggccttctagaatgtaccggatgcagctgctgagctgtatcgccctgtctctggccctggtcacaaatagcaactgggttaacgtgatctccgacctgaagaagatcgaggacctgatccagtccatgcacatcgacgccacactgtacaccgagagcgacgtgcaccctagctgtaaagtgaccgccatgaagtgctttctgctggaactgcaagtgatctccctggaaagcggcgacgccagcatccacgacaccgtgaagaacctgattatcctggctaacaacagcctgagcagcaacggcaacgtgaccgagtccggctgtaaagagtgcgaggaactggaagagaagaatatcaaagagttcctccagagcttcgtgcacatcgtgcagatgttcatcaacaccagcaagatcgaagtgatgtaccctcctccttacctggacaacgagaagtccaacggcaccatcatccacgtgaagggcaagcacctgtgtccttctccactgttccccggacctagcaagcctttctgggtgctcgttgttgttggcggcgtgctggcctgttacagcctgctggttaccgtggccttcatcatcttttgggtccgaagcaagcggagctaa

SEQ ID NO: 32619 - DNA, 1857 bp, synthetic construct; identical to SEQ ID NO: 32277
  source 1..1857: mol_type = other DNA

SEQ ID NO: 32620 - DNA, 1857 bp, synthetic construct; identical to SEQ ID NO: 32281
  source 1..1857: mol_type = other DNA

SEQ ID NO: 32621 - DNA, 1857 bp, synthetic construct; identical to SEQ ID NO: 32280
  source 1..1857: mol_type = other DNA

SEQ ID NO: 32622 - DNA, 2145 bp, synthetic construct
  source 1..2145: mol_type = other DNA
atggccttaccagtgaccgccttgctcctgccgctggccttgctgctccacgccgccaggccggacatcgtgatgacccagacccccctgaccctgagcgtgacaatcggacagcctgccagcatctcctgcaagagcagccagagcctgctggacagcgacggcaagacctacctgaactggctgctgcagaggccaggccagagccccgagagactgatctacctggtgtccaagctggactccggcgtgcccgatagattcacaggcagcggctccggcaccgacttcaccctgaagatcagccgggtggaagccgaggacctgggcgtgtactgttgttggcagggcacccacttcccttacaccttcggcggagggaccaaggtggaaatcaagctcgaggacctgaagaacgtgttcccacctgaggtggccgtgttcgagcctagcgaggccgagatcagccacacccagaaagccaccctcgtgtgcctggctaccggcttctaccccgaccatgtggaactgtcttggtgggtcaacggcaaagaggtgcacagcggcgtgtctaccgacccccagccactgaaagaacagcccgccctgaacgacagccggtactgcctgagcagcagactgagagtgtccgccaccttctggcagaacccccggaaccacttcagatgccaggtgcagttctacggcctgagcgagaacgacgagtggacccaggacagagccaagcccgtgacccagatcgtgtctgccgaagcctggggcagagccgattgcggatcccagagcttcggcctgctggaccccaagctgtgctacctgctggatggcatcctgttcatctacggcgtgatcctgaccgccctgttcctgagagtgaagttcagcagaagcgccgacgcccctgcctaccagcagggacagaaccaactgtacaacgagctgaacctgggcagacgggaagagtacgacgtgctggacaagcggagaggcagggaccctgagatgggcggaaagccccggagaaagaacccccaggaaggactgtataacgaactccagaaagacaagatggccgaagcctacagcgagatcggcatgaagggcgagcggagaagaggcaagggccacgatggcctgtaccagggcctgagcaccgccaccaaggacacctatgacgccctgcacatgcaggccctgcctccaagaagggccaagcgatctggatctggagcaacaaacttctcactactcaaacaagcaggtgacgtggaggagaatcccgggcctactagtatggactggatttggcgcatccttttccttgtcggcgctgctaccggcgcgcattccttcgaacaggtgcaactgcagcagcctggcgctgaacttgtgcggccaggcgcctctgtgaagctgagctgtaaagccagcggctacaccttcaccagctactggatgaactgggtcaagcagcgcccaggccagggcctggaatggatcggaatgatcgaccccagcgacagcgagacacactacaaccacatcttcaaggacaaggccaccctgaccgtggacaagtccagcagcacagcctacctgcaactgtccagcctgaccagcgaggacagcgccgtgtactactgcgcccggaacctgtatctgtggggccagggaacaagcgtgaccgtgtctagcacgcgtatccagaaccctgatcctgccgtgtaccagctgcgggatagcaagagcagcgacaagagcgtgtgtctgttcaccgacttcgacagccagaccaacgtgtcccagagcaaggactccgacgtgtacatcaccgataagtgcgtgctggacatgcggagcatggacttcaagagcaactccgccgtggcctggtccaacaagtccgatttcgcctgcgccaacgccttcaacaacagcattatccccgaggacacattcttcccaagccccgagagcagctgcgacgtgaagctggtggaaaagagcttcgagacagacaccaacctgaacttccagaacctgagcgtgatcggcttcagaatcctgctgctgaaagtggccggctttaacctgctgatgaccctgcggctgtggtccagctaa

SEQ ID NO: 32623 - DNA, 2604 bp, synthetic construct
  source 1..2604: mol_type = other DNA
atggccttaccagtgaccgccttgctcctgccgctggccttgctgctccacgccgccaggccggacatccagttgacccagtcccccagctcactcagcgccagtgtgggggaccgggtgaccattacctgtaaagccagtcagagtgtggactatgacggggatagcttcctgaattggtatcagcagaagcctggcaaagccccaaagctgctgatctacgctgcatctaatctggagtcaggcgtgccttccaggttctccggtagtgggtctgggaccgatttcacattgaccatttcatccctccaacccgaggatttcgctacatattactgtcagcagtccaatgaggaccctctcacctttggccagggcaccaaagttgaaattaagagactcgaggacctgaagaacgtgttcccacctgaggtggccgtgttcgagcctagcgaggccgagatcagccacacccagaaagccaccctcgtgtgcctggctaccggcttctaccccgaccatgtggaactgtcttggtgggtcaacggcaaagaggtgcacagcggcgtgtgtaccgacccccagccactgaaagaacagcccgccctgaacgacagccggtactgcctgagcagcagactgagagtgtccgccaccttctggcagaacccccggaaccacttcagatgccaggtgcagttctacggcctgagcgagaacgacgagtggacccaggacagagccaagcccgtgacccagatcgtgtctgccgaagcctggggcagagccgattgcggctttaccagcgagagctaccagcagggcgtgctgagcgcctactacatgtacttgttgctgctgctgaagtccgtggtgtacttcgccatcatcacatgctgcctgctgcggagaaccgccttctgctgcaacggcgagaagtctagggccaagcgatctggatctggagcaacaaacttctcactactcaaacaagcaggtgacgtggaggagaatcccgggcctactagtatggactggatttggcgcatccttttccttgtcggcgctgctaccggcgcgcattccttcgaagaagtccaacttgtggagtctggagggggcctggtgcagcccggcggctctctcagactgtcttgtgcggcaagcggctacaccttcacctcttactggatagaatgggtgaggcaggcacctggaaagggactggagtggattggagagattctgccaggagggggagatacaaattacaatgaaatcttcaaggggcgggccaccttttcagcggataccagcaagaatacagcttacctgcagatgaatagcctccgggcagaagataccgctgtttattattgcacgagacgggtgccaataagactggactattgggggcaagggactcttgtcaccgtcagttcaacgcgtcctcacaccaagcccagcgtgttcgtgatgaagaacggcaccaacgtggcctgcctcgtgaaagagttctaccccaaggacatcaggatcaacctggtgtccagcaagaagatcaccgagttcgaccccgccatcgtgatctcccccagcggcaagtacaacgccgtgaagctggggaagtacgaggacagcaacagcgtgacctgctccgtgcagcacgacaacaagaccgtgcacagcaccgactttgaagtgaaaaccgactccaccgaccacgtgaagcccaaagagacagagaacaccaagcagcccagcaagagctgccacaagcccaaggccatcgtgcacaccgagaaagtgaacatgatgagcctgaccgtgctgggcctgcggatgctgttcgccaaaaccgtggccgtgaacttcctgctgaccgccaagctgttcttcctccgcgccaagagaagcggatctggcgtgaagcagaccctgaatttcgacctgctgaagctggctggcgacgtggaatccaacccaggcccttctagaggccatatgaccgagtacaagcccacggtgcgcctcgccacccgcgacgacgtccccagggccgtacgcaccctcgccgccgcgttcgccgactaccccgccacgcgccacaccgtcgatccggaccgccacatcgagcgggtcaccgagctgcaagaactcttcctcacgcgcgtcgggctcgacatcggcaaggtgtgggtcgcggacgacggcgccgcggtggcggtctggaccacgccggagagcgtcgaagcgggggcggtgttcgccgagatcggcccgcgcatggccgagttgagcggttcccggctggccgcgcagcaacagatggaaggcctcctggcgccgcaccggcccaaggagcccgcgtggttcctggccaccgtcggcgtctcgcccgaccaccagggcaagggtctgggcagcgccgtcgtgctccccggagtggaggcggccgagcgcgccggggtgcccgccttcctggagacctccgcgccccgcaacctccccttctacgagcggctcggcttcaccgtcaccgccgacgtcgaggtgcccgaaggaccgcgcacctggtgcatgacccgcaagcccggtgcctga

SEQ ID NO: 32624 - DNA, 1530 bp, synthetic construct
  source 1..1530: mol_type = other DNA
atggccttaccagtgaccgccttgctcctgccgctggccttgctgctccacgccgccaggccggacttcgtgatgacacagagccctgatagcctggccgtgtctctcggcgagcgagtgaccatgagctgcaagtctagccagagcctgctgaacagcggcaaccagaagaactacctgacctggtatcagcagaagcccggccagcctcctaagctgctgatctactgggccagcaccagagaaagcggcgtgcccgatagattttctggctctggcagcggcaccgacttcaccctgacaatttctagcctgcaagccgaggacgtggccgtgtactactgccagaacgactacagctacccctacaccttcggccagggcaccaagctggaaatcaaaggcggaggcggaagtggaggcggaggatctggcggcggaggctctgaagtgcaactggttcagagcggagccgagctgaagaaacctggggccagcgtgaaggtgtcctgtaaagccagcggctacacctttaccgactactacatgaaatgggtccgacaggccccaggccagggactcgaatggatcggcgatattatccccagcaacggggccaccttctacaaccagaaattcaagggccgcgtgaccatcaccgtggacaagagcacaagcaccgcctacatggaactgagcagcctgagaagcgaggacaccgccgtgtattattgcgccagaagccatctgctgcgggccagttggttcgcctattggggacagggaaccctggtcaccgttagctctacgcgtggaatgaggactgaggatcttcccaaagctgtcgtctttctcgaaccccaatggtatcgggtgctcgaaaaagactctgtgacactgaaatgccaaggggcctactctcccgaggacaactccacacagtggtttcataatgagtccctcatcagctctcaggccagctcttatttcattgatgccgctacagtggacgactccggcgagtatcggtgtcagaccaatctgtctacactgtctgaccccgtgcagcttgaggtccacattggatggttgctcttgcaagccccacgctgggttttcaaagaggaagatccaatccatctgcggtgccacagctggaaaaacaccgctctccacaaagtcacatacctgcaaaatggcaaaggacgcaaatacttccatcacaattccgatttttacattccgaaggctaccctgaaagacagcggcagctatttctgccggggactcgtcggctccaagaatgtgtcctccgaaaccgtgaatatcacgattacccaaggactggctgtgcctacaatctctagcttctttccgcctggataccaagtctccttctgtcttgtgatggtcctcctgtttgctgtggacacaggactgtacttttccgtgaaaacgaacatccgcagctccacacgcgattggaaagatcacaagtttaaatggcgcaaagatccccaggacaagtaa

SEQ ID NO: 32625 - DNA, 1929 bp, synthetic construct
  source 1..1929: mol_type = other DNA
atggccttaccagtgaccgccttgctcctgccgctggccttgctgctccacgccgccaggccgctcgaggacctgaagaacgtgttcccacctgaggtggccgtgttcgagcctagcgaggccgagatcagccacacccagaaagccaccctcgtgtgcctggctaccggcttctaccccgaccatgtggaactgtcttggtgggtcaacggcaaagaggtgcacagcggcgtgtgtaccgacccccagccactgaaagaacagcccgccctgaacgacagccggtactgcctgagcagcagactgagagtgtccgccaccttctggcagaacccccggaaccacttcagatgccaggtgcagttctacggcctgagcgagaacgacgagtggacccaggacagagccaagcccgtgacccagatcgtgtctgccgaagcctggggcagagccgattgcgacgtgaagctggtggaaaagagcttcgagacagacaccaacctgaacttccagaacctgagcgtgatcggcttcagaatcctgctgctgaaagtggccggctttaacctgctgatgaccctgcggctgtggtccagcagggccaagcgatctggatctggagcaacaaacttctcactactcaaacaagcaggtgacgtggaggagaatcccgggcctactagcaccatggccttaccagtgaccgccttgctcctgccgctggccttgctgctccacgccgccaggccggacttcgtgatgacacagagccctgatagcctggccgtgtctctcggcgagcgagtgaccatgagctgcaagtctagccagagcctgctgaacagcggcaaccagaagaactacctgacctggtatcagcagaagcccggccagcctcctaagctgctgatctactgggccagcaccagagaaagcggcgtgcccgatagattttctggctctggcagcggcaccgacttcaccctgacaatttctagcctgcaagccgaggacgtggccgtgtactactgccagaacgactacagctacccctacaccttcggccagggcaccaagctggaaatcaaaggcggaggcggaagtggaggcggaggatctggcggcggaggctctgaagtgcaactggttcagagcggagccgagctgaagaaacctggggccagcgtgaaggtgtcctgtaaagccagcggctacacctttaccgactactacatgaaatgggtccgacaggccccaggccagggactcgaatggatcggcgatattatccccagcaacggggccaccttctacaaccagaaattcaagggccgcgtgaccatcaccgtggacaagagcacaagcaccgcctacatggaactgagcagcctgagaagcgaggacaccgccgtgtattattgcgccagaagccatctgctgcgggccagttggttcgcctattggggacagggaaccctggtcaccgttagctctacgcgtatccagaaccctgatcctgccgtgtaccagctgcgggatagcaagagcagcgacaagagcgtgtgtctgttcaccgacttcgacagccagaccaacgtgtcccagagcaaggactccgacgtgtacatcaccgataagtgcgtgctggacatgcggagcatggacttcaagagcaactccgccgtggcctggtccaacaagtccgatttcgcctgcgccaacgccttcaacaacagcattatccccgaggacacattcttcccaagccccgagagcagctgcggctttaccagcgagagctaccagcagggcgtgctgagcgccaccatcctgtacgagatcctgctgggcaaggccaccctgtacgccgtgctggtgtctgccctggtgctgatggctatggtcaagcggaaggacagccggggataa

SEQ ID NO: 32626 - DNA, 1893 bp, synthetic construct; identical to SEQ ID NO: 32352
  source 1..1893: mol_type = other DNA

SEQ ID NO: 32627 - DNA, 1893 bp, synthetic construct; identical to SEQ ID NO: 32350
  source 1..1893: mol_type = other DNA

SEQ ID NO: 32628 - DNA, 1893 bp, synthetic construct; identical to SEQ ID NO: 32351
  source 1..1893: mol_type = other DNA

SEQ ID NO: 32629 - DNA, 2988 bp, synthetic construct
  source 1..2988: mol_type = other DNA
atggccttaccagtgaccgccttgctcctgccgctggccttgctgctccacgccgccaggccggacatcgtgatgacacagagccctgatagcctggccgtgtctctgggagagagagccaccatcaactgcaagagcagccagagcctgctgaacagcggcaaccagaagaactacctggcctggtatcagcagaagcccggccagcctcctaagctgctgatctactggggcagcaccagatccacaggcgtgcccgatagattttctggctctggcagcggcaccgacttcaccctgacaatttctagcctgcaagccgaggacgtggccgtgtactactgccagaacgactacacataccccttcaccttcggccagggcaccaagctggaaatcaaactcgaggacctgaagaacgtgttcccacctgaggtggccgtgttcgagcctagcgaggccgagatcagccacacccagaaagccaccctcgtgtgcctggctaccggcttctaccccgaccatgtggaactgtcttggtgggtcaacggcaaagaggtgcacagcggcgtgtgtaccgacccccagccactgaaagaacagcccgccctgaacgacagccggtactgcctgagcagcagactgagagtgtccgccaccttctggcagaacccccggaaccacttcagatgccaggtgcagttctacggcctgagcgagaacgacgagtggacccaggacagagccaagcccgtgacccagatcgtgtctgccgaagcctggggcagagccgattgcggctttaccagcgagagctaccagcagggcgtgctgagcgccaccatcctgtacgagatcctgctgggcaaggccaccctgtacgccgtgctggtgtctgccctggtgctgatggctatggtcaagcggaaggacagccggggaagggccaagcgatctggatctggagcaacaaacttctcactactcaaacaagcaggtgacgtggaggagaatcccgggcctactagtaccatggactggatttggcgcatccttttccttgtcggcgctgctaccggcgcccattccgggccccaggtgcagctggttgaatctggtggcggagttgtgcagcctggcagaagcctgagactgtcttgtgccgccagcggctatagaagcagcgtgtgcatgggctggttcagacaggcccctggcaaaggactggaaagagtggccctgatcggcagagatggcagcaccacctacatcgacagcgtgaagggcagattcaccatcagccgggacaacagcaagaacaccctgtacctccagatgaacagcctgagagccgaggacaccgccgtgtactattgtgccagaggactcggctattgggcctgcgagtacaactattggggccagggcacactggtcaccgtttctagcggatccggcggcggaggatctggcggaggcggatctgggggcggaggctctttcgaacaagttcagctggttcagagcggagccgaagtgaagaaacctggggcctctgtgaaggtgtcctgcaaggcttccggctataccttcaccagcttttggctgaactgggtccgacaggcccctggacaaggactggaatggatgggcaacatctaccccagcaccagctacaccgtgtacaaccagaaattcaaggaccgcgtgaccatgaccagggacaccagcacaagcacagtgtacatggaactgagcagcctgcggagcgaggataccgccgtgtattattgcgccagaacctggcggggcaacagcttcgattattggggccagggaaccaccgtgaccgtgtcatctacgcgtatccagaaccctgatcctgccgtgtaccagctgcgggatagcaagagcagcgacaagagcgtgtgtctgttcaccgacttcgacagccagaccaacgtgtcccagagcaaggactccgacgtgtacatcaccgataagtgcgtgctggacatgcggagcatggacttcaagagcaactccgccgtggcctggtccaacaagtccgatttcgcctgcgccaacgccttcaacaacagcattatccccgaggacacattcttcccaagccccgagagcagctgcgacgtgaagctggtggaaaagagcttcgagacagacaccaacctgaacttccagaacctgagcgtgatcggcttcagaatcctgctgctgaaagtggccggctttaacctgctgatgaccctgcggctgtggtccagccgcgccaagagaagcggatctggcgtgaagcagaccctgaatttcgacctgctgaagctggctggcgacgtggaatccaacccaggcccttctagaggccatatgaccgagtacaagcccacggtgcgcctcgccacccgcgacgacgtccccagggccgtacgcaccctcgccgccgcgttcgccgactaccccgccacgcgccacaccgtcgatccggaccgccacatcgagcgggtcaccgagctgcaagaactcttcctcacgcgcgtcgggctcgacatcggcaaggtgtgggtcgcggacgacggcgccgcggtggcggtctggaccacgccggagagcgtcgaagcgggggcggtgttcgccgagatcggcccgcgcatggccgagttgagcggttcccggctggccgcgcagcaacagatggaaggcctcctggcgccgcaccggcccaaggagcccgcgtggttcctggccaccgtcggcgtctcgcccgaccaccagggcaagggtctgggcagcgccgtcgtgctccccggagtggaggcggccgagcgcgccggggtgcccgccttcctggagacctccgcgccccgcaacctccccttctacgagcggctcggcttcaccgtcaccgccgacgtcgaggtgcccgaaggaccgcgcacctggtgcatgacccgcaagcccggtgcctga

SEQ ID NO: 32630 - DNA, 2988 bp, synthetic construct
  source 1..2988: mol_type = other DNA
atggccttaccagtgaccgccttgctcctgccgctggccttgctgctccacgccgccaggccggacatcgtgatgacacagagccctgatagcctggccgtgtctctgggagagagagccaccatcaactgcaagagcagccagagcctgctgaacagcggcaacaacaagaactacgtgacatggtatcagcagaagcccggccagcctcctaagctgctgatctactggggcagcaccagatccacaggcgtgcccgatagattttctggctctggcagcggcaccgacttcaccctgacaatttctagcctgcaagccgaggacgtggccgtgtactactgccagaacgactacacataccccttcaccttcggccagggcaccaagctggaaatcaaactcgaggacctgaagaacgtgttcccacctgaggtggccgtgttcgagcctagcgaggccgagatcagccacacccagaaagccaccctcgtgtgcctggctaccggcttctaccccgaccatgtggaactgtcttggtgggtcaacggcaaagaggtgcacagcggcgtgtgtaccgacccccagccactgaaagaacagcccgccctgaacgacagccggtactgcctgagcagcagactgagagtgtccgccaccttctggcagaacccccggaaccacttcagatgccaggtgcagttctacggcctgagcgagaacgacgagtggacccaggacagagccaagcccgtgacccagatcgtgtctgccgaagcctggggcagagccgattgcggctttaccagcgagagctaccagcagggcgtgctgagcgccaccatcctgtacgagatcctgctgggcaaggccaccctgtacgccgtgctggtgtctgccctggtgctgatggctatggtcaagcggaaggacagccggggaagggccaagcgatctggatctggagcaacaaacttctcactactcaaacaagcaggtgacgtggaggagaatcccgggcctactagtaccatggactggatttggcgcatccttttccttgtcggcgctgctaccggcgcccattccgggccccaggtgcagctggttgaatctggtggcggagttgtgcagcctggcagaagcctgagactgtcttgtgccgccagcggctatagaagcagcgtgtgcatgggctggttcagacaggcccctggcaaaggactggaaagagtggccctgatcggcagagatggcagcaccacctacatcgacagcgtgaagggcagattcaccatcagccgggacaacagcaagaacaccctgtacctccagatgaacagcctgagagccgaggacaccgccgtgtactattgtgccagaggactcggctattgggcctgcgagtacaactattggggccagggcacactggtcaccgtttctagcggatccggcggcggaggatctggcggaggcggatctgggggcggaggctctttcgaacaagttcagctggttcagagcggagccgaagtgaagaaacctggggcctctgtgaaggtgtcctgcaaggcttccggctataccttcaccagcttttggctgaactgggtccgacaggcccctggacaaggactggaatggatgggcaacatctaccccagcaccagctacaccgtgtacaaccagaaattcaaggaccgcgtgaccatgaccagggacaccagcacaagcacagtgtacatggaactgagcagcctgcggagcgaggataccgccgtgtattattgcgccagaacctggcggggcaacagcttcgattattggggccagggaaccaccgtgaccgtgtcatctacgcgtatccagaaccctgatcctgccgtgtaccagctgcgggatagcaagagcagcgacaagagcgtgtgtctgttcaccgacttcgacagccagaccaacgtgtcccagagcaaggactccgacgtgtacatcaccgataagtgcgtgctggacatgcggagcatggacttcaagagcaactccgccgtggcctggtccaacaagtccgatttcgcctgcgccaacgccttcaacaacagcattatccccgaggacacattcttcccaagccccgagagcagctgcgacgtgaagctggtggaaaagagcttcgagacagacaccaacctgaacttccagaacctgagcgtgatcggcttcagaatcctgctgctgaaagtggccggctttaacctgctgatgaccctgcggctgtggtccagccgcgccaagagaagcggatctggcgtgaagcagaccctgaatttcgacctgctgaagctggctggcgacgtggaatccaacccaggcccttctagaggccatatgaccgagtacaagcccacggtgcgcctcgccacccgcgacgacgtccccagggccgtacgcaccctcgccgccgcgttcgccgactaccccgccacgcgccacaccgtcgatccggaccgccacatcgagcgggtcaccgagctgcaagaactcttcctcacgcgcgtcgggctcgacatcggcaaggtgtgggtcgcggacgacggcgccgcggtggcggtctggaccacgccggagagcgtcgaagcgggggcggtgttcgccgagatcggcccgcgcatggccgagttgagcggttcccggctggccgcgcagcaacagatggaaggcctcctggcgccgcaccggcccaaggagcccgcgtggttcctggccaccgtcggcgtctcgcccgaccaccagggcaagggtctgggcagcgccgtcgtgctccccggagtggaggcggccgagcgcgccggggtgcccgccttcctggagacctccgcgccccgcaacctccccttctacgagcggctcggcttcaccgtcaccgccgacgtcgaggtgcccgaaggaccgcgcacctggtgcatgacccgcaagcccggtgcctga

SEQ ID NO: 32631 - DNA, 2988 bp, synthetic construct
  source 1..2988: mol_type = other DNA
atggccttaccagtgaccgccttgctcctgccgctggccttgctgctccacgccgccaggccggacatcgtgatgacacagagccctgatagcctggccgtgtctctgggagagagagccaccatcaactgcaagagcagccagagcctgctgaacagcggcaaccagaagaactacctggcctggtatcagcagaagcccggccagcctcctaagctgctgatctactggggcagcaccagatccacaggcgtgcccgatagattttctggctctggcagcggcaccgacttcaccctgacaatttctagcctgcaagccgaggacgtggccgtgtactactgccagaacgactacacataccccttcaccttcggccagggcaccaagctggaaatcaaactcgaggacctgaagaacgtgttcccacctgaggtggccgtgttcgagcctagcgaggccgagatcagccacacccagaaagccaccctcgtgtgcctggctaccggcttctaccccgaccatgtggaactgtcttggtgggtcaacggcaaagaggtgcacagcggcgtgtgtaccgacccccagccactgaaagaacagcccgccctgaacgacagccggtactgcctgagcagcagactgagagtgtccgccaccttctggcagaacccccggaaccacttcagatgccaggtgcagttctacggcctgagcgagaacgacgagtggacccaggacagagccaagcccgtgacccagatcgtgtctgccgaagcctggggcagagccgattgcggctttaccagcgagagctaccagcagggcgtgctgagcgccaccatcctgtacgagatcctgctgggcaaggccaccctgtacgccgtgctggtgtctgccctggtgctgatggctatggtcaagcggaaggacagccggggaagggccaagcgatctggatctggagcaacaaacttctcactactcaaacaagcaggtgacgtggaggagaatcccgggcctactagtaccatggactggatttggcgcatccttttccttgtcggcgctgctaccggcgcccattccgggccccaggtgcagctggttgaatctggtggcggagttgtgcagcctggcagaagcctgagactgtcttgtgccgccagcggctatagaagcagcgtgtgcatgggctggttcagacaggcccctggcaaaggactggaaagagtggccctgatcggcagagatggcagcaccacctacatcgacagcgtgaagggcagattcaccatcagccgggacaacagcaagaacaccctgtacctccagatgaacagcctgagagccgaggacaccgccgtgtactattgtgccagaggactcggctattgggcctgcgagtacaactattggggccagggcacactggtcaccgtttctagcggatccggcggcggaggatctggcggaggcggatctgggggcggaggctctttcgaacaagttcagctggttcagagcggagccgaagtgaagaaacctggggcctctgtgaaggtgtcctgcaaggcttccggctataccttcaccagcttttggctgaactgggtccgacaggcccctggacaaggactggaatggatgggcaacatctaccccagcgacagctacaccgtgtacaaccagaaattcaaggaccgcgtgaccatgaccagggacaccagcacaagcacagtgtacatggaactgagcagcctgcggagcgaggataccgccgtgtattattgcgccagaacctggcggggcaacagcttcgattattggggccagggaaccaccgtgaccgtgtcatctacgcgtatccagaaccctgatcctgccgtgtaccagctgcgggatagcaagagcagcgacaagagcgtgtgtctgttcaccgacttcgacagccagaccaacgtgtcccagagcaaggactccgacgtgtacatcaccgataagtgcgtgctggacatgcggagcatggacttcaagagcaactccgccgtggcctggtccaacaagtccgatttcgcctgcgccaacgccttcaacaacagcattatccccgaggacacattcttcccaagccccgagagcagctgcgacgtgaagctggtggaaaagagcttcgagacagacaccaacctgaacttccagaacctgagcgtgatcggcttcagaatcctgctgctgaaagtggccggctttaacctgctgatgaccctgcggctgtggtccagccgcgccaagagaagcggatctggcgtgaagcagaccctgaatttcgacctgctgaagctggctggcgacgtggaatccaacccaggcccttctagaggccatatgaccgagtacaagcccacggtgcgcctcgccacccgcgacgacgtccccagggccgtacgcaccctcgccgccgcgttcgccgactaccccgccacgcgccacaccgtcgatccggaccgccacatcgagcgggtcaccgagctgcaagaactcttcctcacgcgcgtcgggctcgacatcggcaaggtgtgggtcgcggacgacggcgccgcggtggcggtctggaccacgccggagagcgtcgaagcgggggcggtgttcgccgagatcggcccgcgcatggccgagttgagcggttcccggctggccgcgcagcaacagatggaaggcctcctggcgccgcaccggcccaaggagcccgcgtggttcctggccaccgtcggcgtctcgcccgaccaccagggcaagggtctgggcagcgccgtcgtgctccccggagtggaggcggccgagcgcgccggggtgcccgccttcctggagacctccgcgccccgcaacctccccttctacgagcggctcggcttcaccgtcaccgccgacgtcgaggtgcccgaaggaccgcgcacctggtgcatgacccgcaagcccggtgcctga

SEQ ID NO: 32632 - DNA, 2988 bp, synthetic construct
  source 1..2988: mol_type = other DNA
atggccttaccagtgaccgccttgctcctgccgctggccttgctgctccacgccgccaggccggacatcgtgatgacacagagccctgatagcctggccgtgtctctgggagagagagccaccatcaactgcaagagcagccagagcctgctgaacagcggcaacaacaagaactacgtgacatggtatcagcagaagcccggccagcctcctaagctgctgatctactggggcagcaccagatccacaggcgtgcccgatagattttctggctctggcagcggcaccgacttcaccctgacaatttctagcctgcaagccgaggacgtggccgtgtactactgccagaacgactacacataccccttcaccttcggccagggcaccaagctggaaatcaaactcgaggacctgaagaacgtgttcccacctgaggtggccgtgttcgagcctagcgaggccgagatcagccacacccagaaagccaccctcgtgtgcctggctaccggcttctaccccgaccatgtggaactgtcttggtgggtcaacggcaaagaggtgcacagcggcgtgtgtaccgacccccagccactgaaagaacagcccgccctgaacgacagccggtactgcctgagcagcagactgagagtgtccgccaccttctggcagaacccccggaaccacttcagatgccaggtgcagttctacggcctgagcgagaacgacgagtggacccaggacagagccaagcccgtgacccagatcgtgtctgccgaagcctggggcagagccgattgcggctttaccagcgagagctaccagcagggcgtgctgagcgccaccatcctgtacgagatcctgctgggcaaggccaccctgtacgccgtgctggtgtctgccctggtgctgatggctatggtcaagcggaaggacagccggggaagggccaagcgatctggatctggagcaacaaacttctcactactcaaacaagcaggtgacgtggaggagaatcccgggcctactagtaccatggactggatttggcgcatccttttccttgtcggcgctgctaccggcgcccattccgggccccaggtgcagctggttgaatctggtggcggagttgtgcagcctggcagaagcctgagactgtcttgtgccgccagcggctatagaagcagcgtgtgcatgggctggttcagacaggcccctggcaaaggactggaaagagtggccctgatcggcagagatggcagcaccacctacatcgacagcgtgaagggcagattcaccatcagccgggacaacagcaagaacaccctgtacctccagatgaacagcctgagagccgaggacaccgccgtgtactattgtgccagaggactcggctattgggcctgcgagtacaactattggggccagggcacactggtcaccgtttctagcggatccggcggcggaggatctggcggaggcggatctgggggcggaggctctttcgaacaagttcagctggttcagagcggagccgaagtgaagaaacctggggcctctgtgaaggtgtcctgcaaggcttccggctataccttcaccagcttttggctgaactgggtccgacaggcccctggacaaggactggaatggatgggcaacatctaccccagcgacagctacaccgtgtacaaccagaaattcaaggaccgcgtgaccatgaccagggacaccagcacaagcacagtgtacatggaactgagcagcctgcggagcgaggataccgccgtgtattattgcgccagaacctggcggggcaacagcttcgattattggggccagggaaccaccgtgaccgtgtcatctacgcgtatccagaaccctgatcctgccgtgtaccagctgcgggatagcaagagcagcgacaagagcgtgtgtctgttcaccgacttcgacagccagaccaacgtgtcccagagcaaggactccgacgtgtacatcaccgataagtgcgtgctggacatgcggagcatggacttcaagagcaactccgccgtggcctggtccaacaagtccgatttcgcctgcgccaacgccttcaacaacagcattatccccgaggacacattcttcccaagccccgagagcagctgcgacgtgaagctggtggaaaagagcttcgagacagacaccaacctgaacttccagaacctgagcgtgatcggcttcagaatcctgctgctgaaagtggccggctttaacctgctgatgaccctgcggctgtggtccagccgcgccaagagaagcggatctggcgtgaagcagaccctgaatttcgacctgctgaagctggctggcgacgtggaatccaacccaggcccttctagaggccatatgaccgagtacaagcccacggtgcgcctcgccacccgcgacgacgtccccagggccgtacgcaccctcgccgccgcgttcgccgactaccccgccacgcgccacaccgtcgatccggaccgccacatcgagcgggtcaccgagctgcaagaactcttcctcacgcgcgtcgggctcgacatcggcaaggtgtgggtcgcggacgacggcgccgcggtggcggtctggaccacgccggagagcgtcgaagcgggggcggtgttcgccgagatcggcccgcgcatggccgagttgagcggttcccggctggccgcgcagcaacagatggaaggcctcctggcgccgcaccggcccaaggagcccgcgtggttcctggccaccgtcggcgtctcgcccgaccaccagggcaagggtctgggcagcgccgtcgtgctccccggagtggaggcggccgagcgcgccggggtgcccgccttcctggagacctccgcgccccgcaacctccccttctacgagcggctcggcttcaccgtcaccgccgacgtcgaggtgcccgaaggaccgcgcacctggtgcatgacccgcaagcccggtgcctga

SEQ ID NO: 32633 - DNA, 2988 bp, synthetic construct
  source 1..2988: mol_type = other DNA
atggccttaccagtgaccgccttgctcctgccgctggccttgctgctccacgccgccaggccggacatcgtgatgacacagagccctgatagcctggccgtgtctctgggagagagagccaccatcaactgcaagagcagccagagcctgctgaacagcggcaaccagaagaactacctggcctggtatcagcagaagcccggccagcctcctaagctgctgatctactggggcagcaccagatccacaggcgtgcccgatagattttctggctctggcagcggcaccgacttcaccctgacaatttctagcctgcaagccgaggacgtggccgtgtactactgccagaacgactacacataccccttcaccttcggccagggcaccaagctggaaatcaaactcgaggacctgaagaacgtgttcccacctgaggtggccgtgttcgagcctagcgaggccgagatcagccacacccagaaagccaccctcgtgtgcctggctaccggcttctaccccgaccatgtggaactgtcttggtgggtcaacggcaaagaggtgcacagcggcgtgtgtaccgacccccagccactgaaagaacagcccgccctgaacgacagccggtactgcctgagcagcagactgagagtgtccgccaccttctggcagaacccccggaaccacttcagatgccaggtgcagttctacggcctgagcgagaacgacgagtggacccaggacagagccaagcccgtgacccagatcgtgtctgccgaagcctggggcagagccgattgcggctttaccagcgagagctaccagcagggcgtgctgagcgccaccatcctgtacgagatcctgctgggcaaggccaccctgtacgccgtgctggtgtctgccctggtgctgatggctatggtcaagcggaaggacagccggggaagggccaagcgatctggatctggagcaacaaacttctcactactcaaacaagcaggtgacgtggaggagaatcccgggcctactagtaccatggactggatttggcgcatccttttccttgtcggcgctgctaccggcgcccattccgggccccaggtgcagctggttgaatctggtggcggagttgtgcagcctggcagaagcctgagactgtcttgtgccgccagcggctatagaagcagcgtgtgcatgggctggttcagacaggcccctggcaaaggactggaaagagtggccctgatcggcagagatggcagcaccacctacatcgacagcgtgaagggcagattcaccatcagccgggacaacagcaagaacaccctgtacctccagatgaacagcctgagagccgaggacaccgccgtgtactattgtgccagaggactcggctattgggcctgcgagtacaactattggggccagggcacactggtcaccgtttctagcggatccggcggcggaggatctggcggaggcggatctgggggcggaggctctttcgaacaagttcagctgcaacagcctggggccgaactcgttagacctggcgcttctgtgaagctgtcctgcaaggccagcggctacacctttaccagctactggatcaactgggtcaagcagcggcctggacagggcctcgaatggatcggcaatatctaccccagcgacagctacaccaactacaatcagaagttcaaggacaaggccacactgaccgtggacaagtctagcagcaccgcctacatgcagctgagcagccctacaagcgaggacagcgccgtgtattattgcacccggtcttggcggggcaacagcttcgattattggggccagggcacaaccctgaccgtgtcatctacgcgtatccagaaccctgatcctgccgtgtaccagctgcgggatagcaagagcagcgacaagagcgtgtgtctgttcaccgacttcgacagccagaccaacgtgtcccagagcaaggactccgacgtgtacatcaccgataagtgcgtgctggacatgcggagcatggacttcaagagcaactccgccgtggcctggtccaacaagtccgatttcgcctgcgccaacgccttcaacaacagcattatccccgaggacacattcttcccaagccccgagagcagctgcgacgtgaagctggtggaaaagagcttcgagacagacaccaacctgaacttccagaacctgagcgtgatcggcttcagaatcctgctgctgaaagtggccggctttaacctgctgatgaccctgcggctgtggtccagccgcgccaagagaagcggatctggcgtgaagcagaccctgaatttcgacctgctgaagctggctggcgacgtggaatccaacccaggcccttctagaggccatatgaccgagtacaagcccacggtgcgcctcgccacccgcgacgacgtccccagggccgtacgcaccctcgccgccgcgttcgccgactaccccgccacgcgccacaccgtcgatccggaccgccacatcgagcgggtcaccgagctgcaagaactcttcctcacgcgcgtcgggctcgacatcggcaaggtgtgggtcgcggacgacggcgccgcggtggcggtctggaccacgccggagagcgtcgaagcgggggcggtgttcgccgagatcggcccgcgcatggccgagttgagcggttcccggctggccgcgcagcaacagatggaaggcctcctggcgccgcaccggcccaaggagcccgcgtggttcctggccaccgtcggcgtctcgcccgaccaccagggcaagggtctgggcagcgccgtcgtgctccccggagtggaggcggccgagcgcgccggggtgcccgccttcctggagacctccgcgccccgcaacctccccttctacgagcggctcggcttcaccgtcaccgccgacgtcgaggtgcccgaaggaccgcgcacctggtgcatgacccgcaagcccggtgcctga

SEQ ID NO: 32634 - DNA, 1875 bp, synthetic construct; identical to SEQ ID NO: 32306
  source 1..1875: mol_type = other DNA

SEQ ID NO: 32635 - DNA, 1893 bp, synthetic construct; identical to SEQ ID NO: 32305
  source 1..1893: mol_type = other DNA

SEQ ID NO: 32636 - DNA, 2988 bp, synthetic construct
  source 1..2988: mol_type = other DNA
atggccttaccagtgaccgccttgctcctgccgctggccttgctgctccacgccgccaggccggacatcgtgatgacacagagccctgatagcctggccgtgtctctgggagagagagccaccatcaactgcaagagcagccagagcctgctgaacagcggcaacaacaagaactacgtgacatggtatcagcagaagcccggccagcctcctaagctgctgatctactggggcagcaccagatccacaggcgtgcccgatagattttctggctctggcagcggcaccgacttcaccctgacaatttctagcctgcaagccgaggacgtggccgtgtactactgccagaacgactacacataccccttcaccttcggccagggcaccaagctggaaatcaaactcgaggacctgaagaacgtgttcccacctgaggtggccgtgttcgagcctagcgaggccgagatcagccacacccagaaagccaccctcgtgtgcctggctaccggcttctaccccgaccatgtggaactgtcttggtgggtcaacggcaaagaggtgcacagcggcgtgtgtaccgacccccagccactgaaagaacagcccgccctgaacgacagccggtactgcctgagcagcagactgagagtgtccgccaccttctggcagaacccccggaaccacttcagatgccaggtgcagttctacggcctgagcgagaacgacgagtggacccaggacagagccaagcccgtgacccagatcgtgtctgccgaagcctggggcagagccgattgcggctttaccagcgagagctaccagcagggcgtgctgagcgccaccatcctgtacgagatcctgctgggcaaggccaccctgtacgccgtgctggtgtctgccctggtgctgatggctatggtcaagcggaaggacagccggggaagggccaagcgatctggatctggagcaacaaacttctcactactcaaacaagcaggtgacgtggaggagaatcccgggcctactagtaccatggactggatttggcgcatccttttccttgtcggcgctgctaccggcgcccattccgggccccaggtgcagctggttgaatctggtggcggagttgtgcagcctggcagaagcctgagactgtcttgtgccgccagcggctatagaagcagcgtgtgcatgggctggttcagacaggcccctggcaaaggactggaaagagtggccctgatcggcagagatggcagcaccacctacatcgacagcgtgaagggcagattcaccatcagccgggacaacagcaagaacaccctgtacctccagatgaacagcctgagagccgaggacaccgccgtgtactattgtgccagaggactcggctattgggcctgcgagtacaactattggggccagggcacactggtcaccgtttctagcggatccggcggcggaggatctggcggaggcggatctgggggcggaggctctttcgaacaagttcagctgcaacagcctggggccgaactcgttagacctggcgcttctgtgaagctgtcctgcaaggccagcggctacacctttaccagctactggatcaactgggtcaagcagcggcctggacagggcctcgaatggatcggcaatatctaccccagcgacagctacaccaactacaatcagaagttcaaggacaaggccacactgaccgtggacaagtctagcagcaccgcctacatgcagctgagcagccctacaagcgaggacagcgccgtgtattattgcacccggtcttggcggggcaacagcttcgattattggggccagggcacaaccctgaccgtgtcatctacgcgtatccagaaccctgatcctgccgtgtaccagctgcgggatagcaagagcagcgacaagagcgtgtgtctgttcaccgacttcgacagccagaccaacgtgtcccagagcaaggactccgacgtgtacatcaccgataagtgcgtgctggacatgcggagcatggacttcaagagcaactccgccgtggcctggtccaacaagtccgatttcgcctgcgccaacgccttcaacaacagcattatccccgaggacacattcttcccaagccccgagagcagctgcgacgtgaagctggtggaaaagagcttcgagacagacaccaacctgaacttccagaacctgagcgtgatcggcttcagaatcctgctgctgaaagtggccggctttaacctgctgatgaccctgcggctgtggtccagccgcgccaagagaagcggatctggcgtgaagcagaccctgaatttcgacctgctgaagctggctggcgacgtggaatccaacccaggcccttctagaggccatatgaccgagtacaagcccacggtgcgcctcgccacccgcgacgacgtccccagggccgtacgcaccctcgccgccgcgttcgccgactaccccgccacgcgccacaccgtcgatccggaccgccacatcgagcgggtcaccgagctgcaagaactcttcctcacgcgcgtcgggctcgacatcggcaaggtgtgggtcgcggacgacggcgccgcggtggcggtctggaccacgccggagagcgtcgaagcgggggcggtgttcgccgagatcggcccgcgcatggccgagttgagcggttcccggctggccgcgcagcaacagatggaaggcctcctggcgccgcaccggcccaaggagcccgcgtggttcctggccaccgtcggcgtctcgcccgaccaccagggcaagggtctgggcagcgccgtcgtgctccccggagtggaggcggccgagcgcgccggggtgcccgccttcctggagacctccgcgccccgcaacctccccttctacgagcggctcggcttcaccgtcaccgccgacgtcgaggtgcccgaaggaccgcgcacctggtgcatgacccgcaagcccggtgcctga

SEQ ID NO: 32637 - DNA, 2988 bp, synthetic construct; identical to SEQ ID NO: 32632
  source 1..2988: mol_type = other DNA

SEQ ID NO: 32638 - DNA, 2148 bp, synthetic construct
  source 1..2148: mol_type = other DNA
atggccttaccagtgaccgccttgctcctgccgctggccttgctgctccacgccgccaggccggacatcgtgatgacacagagccctagcagcctgacagtgacagccggcgagaaagtgaccatgagctgcaagagcagccagagcctgctgaacagcggcaaccagaagaactacctgacctggtatcagcagaagcccggccagcctcctaagctgctgatctactgggccagcaccagagaaagcggcgtgcccgatagattcacaggcagcggcagcggaaccgacttcaccctgacaatcagctctgtgcaggccgaggatctggccgtgtactactgccagaacgactacagctaccccttcacctttggctccggcaccaagctggaaatcaaaggcggaggcggaagtggaggcggaggatctggcggcggaggctctcaagttcagctgcaacagcctggggccgaactcgttagacctggcgcttctgtgaagctgtcctgcaaggccagcggctacacctttaccagctactggatcaactgggtcaagcagcggcctggacagggcctcgaatggatcggcaatatctaccccagcgacagctacaccaactacaatcagaagttcaaggacaaggccacactgaccgtggacaagtctagcagcaccgcctacatgcagctgagcagccctacaagcgaggacagcgccgtgtattattgcacccggtcttggcggggcaacagcttcgattattggggccagggcacaaccctgaccgtgtcatctacgcgtaccacgacgccagcgccgcgaccaccaacaccggcgcccaccatcgcgtcgcagcccctgtccctgcgcccagaggcgtgccggccagcggcggggggcgcagtgcacacgagggggctggacttcgcctgtgacatctacatctgggcgcccttggccgggacttgtggggtccttctcctgtcactggttatcaccctttactgcaaacggggcagaaagaaactcctgtatatattcaaacaaccatttatgagaccagtacaaactactcaagaggaagatggctgtagctgccgatttccagaagaagaagaaggaggatgtgaactgagagtgaagttcagcaggagcgcagacgcccccgcgtaccagcagggccagaaccagctctataacgagctgaatctaggacgaagagaggagtacgatgttttggacaagagacgtggccgggaccctgagatggggggaaagccgagaaggaagaaccctcaggaaggcctgtacaatgaactgcagaaagataagatggcggaggcctacagtgagattgggatgaaaggcgagcgccggaggggcaaggggcacgatggcctttaccagggtctcagtacagccaccaaggacacctacgacgcccttcacatgcaggccctgccccctcgctctagtggctccggcgagggcagaggaagtctactaacctgcggagatgtggaagaaaatcctggcccacatatgaccgagtacaagcccacggtgcgcctcgccacccgcgacgacgtccccagggccgtacgcaccctcgccgccgcgttcgccgactaccccgccacgcgccacaccgtcgatccggaccgccacatcgagcgggtcaccgagctgcaagaactcttcctcacgcgcgtcgggctcgacatcggcaaggtgtgggtcgcggacgacggcgccgcggtggcggtctggaccacgccggagagcgtcgaagcgggggcggtgttcgccgagatcggcccgcgcatggccgagttgagcggttcccggctggccgcgcagcaacagatggaaggcctcctggcgccgcaccggcccaaggagcccgcgtggttcctggccaccgtcggcgtctcgcccgaccaccagggcaagggtctgggcagcgccgtcgtgctccccggagtggaggcggccgagcgcgccggggtgcccgccttcctggagacctccgcgccccgcaacctccccttctacgagcggctcggcttcaccgtcaccgccgacgtcgaggtgcccgaaggaccgcgcacctggtgcatgacccgcaagcccggtgcctga

SEQ ID NO: 32639 - DNA, 1851 bp, synthetic construct
  source 1..1851: mol_type = other DNA
atggccttaccagtgaccgccttgctcctgccgctggccttgctgctccacgccgccaggccgcagatcgtgctgacacagagccctgccatcatgtccgcttctcccggcgagaaagtgaccatcacatgtagcgccagcagcagcgtgtcctacctgcactggtttcagcagaagcccggcacaagccctaagctgtgggtgtacagcaccagcaatctgcctagcggagtgcctgccagatttggcggatctggcagcggcacatcttacagcctgaccatcagccggatggaagccgaagatgccgccacctactattgccagcagcggagcatctacccaccttggacatttggaggcggcaccaagctggaaatcaaactcgaggacctgaagaacgtgttcccacctgaggtggccgtgttcgagcctagcgaggccgagatcagccacacccagaaagccaccctcgtgtgcctggctaccggcttctaccccgaccatgtggaactgtcttggtgggtcaacggcaaagaggtgcacagcggcgtgtgtaccgacccccagccactgaaagaacagcccgccctgaacgacagccggtactgcctgagcagcagactgagagtgtccgccaccttctggcagaacccccggaaccacttcagatgccaggtgcagttctacggcctgagcgagaacgacgagtggacccaggacagagccaagcccgtgacccagatcgtgtctgccgaagcctggggcagagccgattgcggctttaccagcgagagctaccagcagggcgtgctgagcgccaccatcctgtacgagatcctgctgggcaaggccaccctgtacgccgtgctggtgtctgccctggtgctgatggctatggtcaagcggaaggacagccggggaagggccaagcgatctggatctggagcaacaaacttctcactactcaaacaagcaggtgacgtggaggagaatcccgggcctactagtatggactggatttggcgcatccttttccttgtcggcgctgctaccggcgcgcattccttcgaagttcagctccagcagtctggccccgagcttgtgaaacctggcgcttccatgaagatcagctgcaaggccagcggctacagcttcaccggctacaccatgaactgggtcaagcagagccacggcaagaacctggaatggatcggcctgattaacccctacaacggcggcacctcctacaaccagaagttcaagggcaaagccacactgaccatcgacaagagcagcagcaccgcctacatggaactgctgagcctgacctctgaggacagcgccgtgtactactgcgccagagattacggctacgtgctggactattggggccagggcacaaccctgacagtgtctagtacgcgtatccagaaccctgatcctgccgtgtaccagctgcgggatagcaagagcagcgacaagagcgtgtgtctgttcaccgacttcgacagccagaccaacgtgtcccagagcaaggactccgacgtgtacatcaccgataagtgcgtgctggacatgcggagcatggacttcaagagcaactccgccgtggcctggtccaacaagtccgatttcgcctgcgccaacgccttcaacaacagcattatccccgaggacacattcttcccaagccccgagagcagctgcgacgtgaagctggtggaaaagagcttcgagacagacaccaacctgaacttccagaacctgagcgtgatcggcttcagaatcctgctgctgaaagtggccggctttaacctgctgatgaccctgcggctgtggtccagctaa

SEQ ID NO: 32640 - DNA, 1905 bp, synthetic construct
  source 1..1905: mol_type = other DNA
atggccttaccagtgaccgccttgctcctgccgctggccttgctgctccacgccgccaggccggagatcgtgctgacacagtctcccgccacactgtcactgtctccaggcgaaagagccacactgagctgtagcgtgtccagcagcatcagcagcagcaacctgcactggtatcagcagaagcctggacaggcccctcggctgctgatctacagcacatctaatctggcctctggcatccccgccagattttctggctctggaagcggcaccgacttcaccctgaccataagcagcctggaacctgaggacttcgccgtgtactactgccagcagtggtccagctatccccacacatttggcggaggcaccaaggtggaaatcaagagactcgagatccagaaccctgatcctgccgtgtaccagctgcgggatagcaagagcagcgacaagagcgtgtgtctgttcaccgacttcgacagccagaccaacgtgtcccagagcaaggactccgacgtgtacatcaccgataagtgcgtgctggacatgcggagcatggacttcaagagcaactccgccgtggcctggtccaacaagtccgatttcgcctgcgccaacgccttcaacaacagcattatccccgaggacacattcttcccaagcagcgacgtgccctgcgacgtgaagctggtggaaaagagcttcgagacagacaccaacctgaacttccagaacctgagcgtgatcggcttcagaatcctgctgctgaaagtggccggctttaacctgctgatgaccctgcggctgtggtccagccgcgccaagagaagcggatctggcgtgaagcagaccctgaatttcgacctgctgaagctggctggcgacgtggaatccaacccaggccctactagtatggactggatttggcgcatccttttccttgtcggcgctgctaccggcgcgcattccttcgaacaggttcagctggttcagagcggagccgaagtgaagaaacctggggcctctgtgaaggtgtcctgcaaggcttccggctacacctttaccaactacctgatcgagtgggtccgacaggctccaggacaaggactggaatggatgggcctgattaaccctggcagcggcggcaccaactacaacgagaagttcaagggcagagtgaccatgaccaccgacaccagcacaagcaccgcctacatggaactgcggagcctgagaagcgacgacaccgccgtgtattattgcgccagaagaagccctctcggctcttggatctactacgcctatgacggcgtggcctattggggccagggaacactggttacagtgtcctctgccagcacgcgtgaggacctgaagaacgtgttcccacctgaggtggccgtgttcgagcctagcaaggccgagatcgcccacacccagaaagccaccctcgtgtgcctggctaccggcttctaccccgaccatgtggaactgtcttggtgggtcaacggcaaagaggtgcacagcggcgtgtgtaccgacccccagccactgaaagaacagcccgccctgaacgacagccggtactgcctgagcagcagactgagagtgtccgccaccttctggcagaacccccggaaccacttcagatgccaggtgcagttctacggcctgagcgagaacgacgagtggacccaggacagagccaagcccgtgacccagatcgtgtctgccgaagcctggggcagagccgattgcggcatcaccagcgccagctaccaccagggcgtgctgagcgccaccatcctgtacgagatcctgctgggcaaggccaccctgtacgccgtgctggtgtctgccctggtgctgatggctatggtcaagcggaaggacagccggggataa

SEQ ID NO: 32641 - DNA, 1899 bp, synthetic construct; identical to SEQ ID NO: 32288
  source 1..1899: mol_type = other DNA

SEQ ID NO: 32642 - DNA, 1905 bp, synthetic construct
  source 1..1905: mol_type = other DNA
atggccttaccagtgaccgccttgctcctgccgctggccttgctgctccacgccgccaggccggagatcgtgctgacacagtctcccgccacactgtcactgtctccaggcgaaagagccacactgagctgtagcgtgtccagcagcatcagcagcagcaacctgcactggtatcagcagaagcctggacaggcccctcggctgctgatctacggcacatctaatctggcctctggcatccccgccagattttctggctctggaagcggcaccgacttcaccctgaccataagcagcctggaacctgaggacttcgccgtgtactactgccagcagtggtccagctatccctacacatttggcggaggcaccaaggtggaaatcaagagactcgagatccagaaccctgatcctgccgtgtaccagctgcgggatagcaagagcagcgacaagagcgtgtgtctgttcaccgacttcgacagccagaccaacgtgtcccagagcaaggactccgacgtgtacatcaccgataagtgcgtgctggacatgcggagcatggacttcaagagcaactccgccgtggcctggtccaacaagtccgatttcgcctgcgccaacgccttcaacaacagcattatccccgaggacacattcttcccaagcagcgacgtgccctgcgacgtgaagctggtggaaaagagcttcgagacagacaccaacctgaacttccagaacctgagcgtgatcggcttcagaatcctgctgctgaaagtggccggctttaacctgctgatgaccctgcggctgtggtccagccgcgccaagagaagcggatctggcgtgaagcagaccctgaatttcgacctgctgaagctggctggcgacgtggaatccaacccaggccctactagtatggactggatttggcgcatccttttccttgtcggcgctgctaccggcgcgcattccttcgaacaggttcagctggttcagagcggagccgaagtgaagaaacctggggcctctgtgaaggtgtcctgcaaggcttccggctacacctttaccaactacctgatcgagtgggtccgacaggctccaggacaaggactggaatggatgggcctgattaaccctggcagcggcggcaccaactacaacgagaagttcaagggcagagtgaccatgaccaccgacaccagcacaagcaccgcctacatggaactgcggagcctgagaagcgacgacaccgccgtgtattattgcgccagaagaagccctctcggctcttggatctactacgcctatgacggcgtggcctattggggccagggaacactggttacagtgtcctctgccagcacgcgtgaggacctgaagaacgtgttcccacctgaggtggccgtgttcgagcctagcaaggccgagatcgcccacacccagaaagccaccctcgtgtgcctggctaccggcttctaccccgaccatgtggaactgtcttggtgggtcaacggcaaagaggtgcacagcggcgtgtgtaccgacccccagccactgaaagaacagcccgccctgaacgacagccggtactgcctgagcagcagactgagagtgtccgccaccttctggcagaacccccggaaccacttcagatgccaggtgcagttctacggcctgagcgagaacgacgagtggacccaggacagagccaagcccgtgacccagatcgtgtctgccgaagcctggggcagagccgattgcggcatcaccagcgccagctaccaccagggcgtgctgagcgccaccatcctgtacgagatcctgctgggcaaggccaccctgtacgccgtgctggtgtctgccctggtgctgatggctatggtcaagcggaaggacagccggggataa

SEQ ID NO: 32643 - DNA, 1899 bp, synthetic construct
  source 1..1899: mol_type = other DNA
atggccttaccagtgaccgccttgctcctgccgctggccttgctgctccacgccgccaggccggagatcgtgctgacacagtctcccgccacactgtcactgtctccaggcgaaagagccacactgagctgtagcgtgtccagcagcatcagcagcagcaacctgcactggtatcagcagaagcctggacaggcccctcggctgctgatctacggcacatctaatctggcctctggcatccccgccagattttctggctctggaagcggcaccgacttcaccctgaccataagcagcctggaacctgaggacttcgccgtgtactactgccagcagtggtccagctatccctacacatttggcggaggcaccaaggtggaaatcaagagactcgagatccagaaccctgatcctgccgtgtaccagctgcgggatagcaagagcagcgacaagagcgtgtgtctgttcaccgacttcgacagccagaccaacgtgtcccagagcaaggactccgacgtgtacatcaccgataagtgcgtgctggacatgcggagcatggacttcaagagcaactccgccgtggcctggtccaacaagtccgatttcgcctgcgccaacgccttcaacaacagcattatccccgaggacacattcttcccaagcagcgacgtgccctgcgacgtgaagctggtggaaaagagcttcgagacagacaccaacctgaacttccagaacctgagcgtgatcggcttcagaatcctgctgctgaaagtggccggctttaacctgctgatgaccctgcggctgtggtccagccgcgccaagagaagcggatctggcgtgaagcagaccctgaatttcgacctgctgaagctggctggcgacgtggaatccaacccaggccctactagtatggactggatttggcgcatccttttccttgtcggcgctgctaccggcgcgcattccttcgaacaggttcagctggttcagagcggagccgaagtgaagaaacctggggcctctgtgaaggtgtcctgcaaggcttccggctacacctttaccaactacctgatcgagtgggtccgacaggctccaggacaaggactggaatggatgggcctgattaaccctggcagcggcggcaccaactacaacgagaagttcaagggcagagtgaccatgaccaccgacaccagcacaagcaccgcctacatggaactgcggagcctgagaagcgacgacaccgccgtgtattattgcgccagaagaagccctctcggctcttggatctactacgcctatgacggcgtggcctattggggccagggaacactggttacagtgtcctctacgcgtgaggacctgaagaacgtgttcccacctgaggtggccgtgttcgagcctagcaaggccgagatcgcccacacccagaaagccaccctcgtgtgcctggctaccggcttctaccccgaccatgtggaactgtcttggtgggtcaacggcaaagaggtgcacagcggcgtgtgtaccgacccccagccactgaaagaacagcccgccctgaacgacagccggtactgcctgagcagcagactgagagtgtccgccaccttctggcagaacccccggaaccacttcagatgccaggtgcagttctacggcctgagcgagaacgacgagtggacccaggacagagccaagcccgtgacccagatcgtgtctgccgaagcctggggcagagccgattgcggcatcaccagcgccagctaccaccagggcgtgctgagcgccaccatcctgtacgagatcctgctgggcaaggccaccctgtacgccgtgctggtgtctgccctggtgctgatggctatggtcaagcggaaggacagccggggataa

SEQ ID NO: 32644 - DNA, 1899 bp, synthetic construct
  source 1..1899: mol_type = other DNA
atggccttaccagtgaccgccttgctcctgccgctggccttgctgctccacgccgccaggccggagatcgtgctgacacagtctcccgccacactgtcactgtctccaggcgaaagagccacactgagctgtagcgtgtccagcagcatcagcagcagcaacctgcactggtatcagcagaagcctggacaggcccctcggctgctgatctacggcacatctaatctggcctctggcatccccgccagattttctggctctggaagcggcaccgacttcaccctgaccataagcagcctggaacctgaggacttcgccgtgtactactgccagcagtggtccagctatcccttcacatttggcggaggcaccaaggtggaaatcaagagactcgagatccagaaccctgatcctgccgtgtaccagctgcgggatagcaagagcagcgacaagagcgtgtgtctgttcaccgacttcgacagccagaccaacgtgtcccagagcaaggactccgacgtgtacatcaccgataagtgcgtgctggacatgcggagcatggacttcaagagcaactccgccgtggcctggtccaacaagtccgatttcgcctgcgccaacgccttcaacaacagcattatccccgaggacacattcttcccaagcagcgacgtgccctgcgacgtgaagctggtggaaaagagcttcgagacagacaccaacctgaacttccagaacctgagcgtgatcggcttcagaatcctgctgctgaaagtggccggctttaacctgctgatgaccctgcggctgtggtccagccgcgccaagagaagcggatctggcgtgaagcagaccctgaatttcgacctgctgaagctggctggcgacgtggaatccaacccaggccctactagtatggactggatttggcgcatccttttccttgtcggcgctgctaccggcgcgcattccttcgaacaggttcagctggttcagagcggagccgaagtgaagaaacctggggcctctgtgaaggtgtcctgcaaggcttccggctacacctttaccaactacctgatcgagtgggtccgacaggctccaggacaaggactggaatggatgggcctgattaaccctggcagcggcggcaccaactacaacgagaagttcaagggcagagtgaccatgaccaccgacaccagcacaagcaccgcctacatggaactgcggagcctgagaagcgacgacaccgccgtgtattattgcgccagaagaagccctctcggctcttggatctactacgcctatgacggcgtggcctattggggccagggaacactggttacagtgtcctctacgcgtgaggacctgaagaacgtgttcccacctgaggtggccgtgttcgagcctagcaaggccgagatcgcccacacccagaaagccaccctcgtgtgcctggctaccggcttctaccccgaccatgtggaactgtcttggtgggtcaacggcaaagaggtgcacagcggcgtgtgtaccgacccccagccactgaaagaacagcccgccctgaacgacagccggtactgcctgagcagcagactgagagtgtccgccaccttctggcagaacccccggaaccacttcagatgccaggtgcagttctacggcctgagcgagaacgacgagtggacccaggacagagccaagcccgtgacccagatcgtgtctgccgaagcctggggcagagccgattgcggcatcaccagcgccagctaccaccagggcgtgctgagcgccaccatcctgtacgagatcctgctgggcaaggccaccctgtacgccgtgctggtgtctgccctggtgctgatggctatggtcaagcggaaggacagccggggataa

SEQ ID NO: 32645 - DNA, 1869 bp, synthetic construct
  source 1..1869: mol_type = other DNA
atggccttaccagtgaccgccttgctcctgccgctggccttgctgctccacgccgccaggccgcagatcgtgctgacacagagccctgccatcatgtccgcttctcccggcgagaaagtgaccatcacatgtagcgccagcagcagcgtgtcctacctgcactggtttcagcagaagcccggcacaagccctaagctgtgggtgtacagcaccagcaatctgcctagcggagtgcctgccagatttggcggatctggcagcggcacatcttacagcctgaccatcagccggatggaagccgaagatgccgccacctactattgccagcagcggagcatctacccaccttggacatttggaggcggcaccaagctggaaatcaaactcgagatccagaaccctgatcctgccgtgtaccagctgcgggatagcaagagcagcgacaagagcgtgtgtctgttcaccgacttcgacagccagaccaacgtgtcccagagcaaggactccgacgtgtacatcaccgataagtgcgtgctggacatgcggagcatggacttcaagagcaactccgccgtggcctggtccaacaagtccgatttcgcctgcgccaacgccttcaacaacagcattatccccgaggacacattcttcccaagccccgagagcagctgcgacgtgaagctggtggaaaagagcttcgagacagacaccaacctgaacttccagaacctgagcgtgatcggcttcagaatcctgctgctgaaagtggccggctttaacctgctgatgaccctgcggctgtggtccagctctagtcgcgccaagagaagcggatctggcgtgaagcagaccctgaatttcgacctgctgaagctggctggcgacgtggaatccaacccaggccctactagtatggactggatttggcgcatccttttccttgtcggcgctgctaccggcgcgcattccttcgaagttcagctccagcagagcggccctgagcttgtgaaacctggcgcttccgtgaagatcagctgcaaggccagcggctacagcttcaccggctacaccatgaactgggtcaagcagtcccacggcaagaacctggaatggatcggcctgattaacccctacaacggcggcacctcctacaaccagaagttcaaggccaaggccacactgaccgtggacaagagcagcagcacagcctacatgcagctgaagtccctgaccagcgaggacagcgccgtgtactactgcgccagagattacggctacgtgctggactattggggccagggcacaagcgtgacagtgtctagtacgcgtgaggacctgaagaacgtgttcccacctgaggtggccgtgttcgagcctagcgaggccgagatcagccacacccagaaagccaccctcgtgtgcctggctaccggcttctaccccgaccatgtggaactgtcttggtgggtcaacggcaaagaggtgcacagcggcgtgtgtaccgacccccagccactgaaagaacagcccgccctgaacgacagccggtactgcctgagcagcagactgagagtgtccgccaccttctggcagaacccccggaaccacttcagatgccaggtgcagttctacggcctgagcgagaacgacgagtggacccaggacagagccaagcccgtgacccagatcgtgtctgccgaagcctggggcagagccgattgcggctttaccagcgagagctaccagcagggcgtgctgagcgccaccatcctgtacgagatcctgctgggcaaggccaccctgtacgccgtgctggtgtctgccctggtgctgatggctatggtcaagcggaaggacagccggggataa

SEQ ID NO: 32646 - DNA, 1869 bp, synthetic construct
  source 1..1869: mol_type = other DNA
atggccttaccagtgaccgccttgctcctgccgctggccttgctgctccacgccgccaggccgcagatcgtgctgacacagagccccgccatcatgtctgttagccctggcgagaaagtgaccatgacctgtagcgccagcagcagcgtgaactacatgcactggttccagcagaagcccggcacaagccctaagctgtgggtgtacagcaccagcaatctggcctctggcgtgccagccagattttctggctctggcagcggcaccagctacagcctgacaatcagcagcatggaagccgaggatgccgccacctactattgtcagcagcggagcatctacccaccttggacatttggcggaggcaccaagctggaaatcaaactcgagatccagaaccctgatcctgccgtgtaccagctgcgggatagcaagagcagcgacaagagcgtgtgtctgttcaccgacttcgacagccagaccaacgtgtcccagagcaaggactccgacgtgtacatcaccgataagtgcgtgctggacatgcggagcatggacttcaagagcaactccgccgtggcctggtccaacaagtccgatttcgcctgcgccaacgccttcaacaacagcattatccccgaggacacattcttcccaagccccgagagcagctgcgacgtgaagctggtggaaaagagcttcgagacagacaccaacctgaacttccagaacctgagcgtgatcggcttcagaatcctgctgctgaaagtggccggctttaacctgctgatgaccctgcggctgtggtccagctctagtcgcgccaagagaagcggatctggcgtgaagcagaccctgaatttcgacctgctgaagctggctggcgacgtggaatccaacccaggccctactagtatggactggatttggcgcatccttttccttgtcggcgctgctaccggcgcgcattccttcgaagttcagctccagcagtctggccccgagcttgtgaaacctggcgcttccatgaagatcagctgcaaggccagcggctacagcttcaccggctacaccatgaactgggtcaagcagagccacggcaagaacctggaatggatcggcctgattaacccctacaacggcggcacctcctacaaccagaagttcaagggcaaagccacactgaccatcgacaagagcagcagcaccgcctacatggaactgctgagcctgacctctgaggacagcgccgtgtactactgcgccagagattacggctacgtgctggactattggggccagggcacaaccctgacagtgtctagtacgcgtgaggacctgaagaacgtgttcccacctgaggtggccgtgttcgagcctagcgaggccgagatcagccacacccagaaagccaccctcgtgtgcctggctaccggcttctaccccgaccatgtggaactgtcttggtgggtcaacggcaaagaggtgcacagcggcgtgtgtaccgacccccagccactgaaagaacagcccgccctgaacgacagccggtactgcctgagcagcagactgagagtgtccgccaccttctggcagaacccccggaaccacttcagatgccaggtgcagttctacggcctgagcgagaacgacgagtggacccaggacagagccaagcccgtgacccagatcgtgtctgccgaagcctggggcagagccgattgcggctttaccagcgagagctaccagcagggcgtgctgagcgccaccatcctgtacgagatcctgctgggcaaggccaccctgtacgccgtgctggtgtctgccctggtgctgatggctatggtcaagcggaaggacagccggggataa

SEQ ID NO: 32647 - DNA, 1869 bp, synthetic construct; identical to SEQ ID NO: 32646
  source 1..1869: mol_type = other DNA

SEQ ID NO: 32648 - DNA, 1869 bp, synthetic construct
  source 1..1869: mol_type = other DNA
atggccttaccagtgaccgccttgctcctgccgctggccttgctgctccacgccgccaggccgcagatcgtgctgacacagagccctgccatcatgtccgcttctcccggcgagaaagtgaccatcacatgtagcgccagcagcagcgtgaattacctgcactggtttcagcagaagcccggcacaagccctaagctgtgggtgtacagcaccagcaatctgcctagcggagtgcctgccagatttggcggatctggcagcggcacatcttacagcctgaccatcagccggatggaagccgaagatgccgccacctactattgccagcagcggagcatctacccaccttggacatttggaggcggcaccaagctggaaatcaaactcgagatccagaaccctgatcctgccgtgtaccagctgcgggatagcaagagcagcgacaagagcgtgtgtctgttcaccgacttcgacagccagaccaacgtgtcccagagcaaggactccgacgtgtacatcaccgataagtgcgtgctggacatgcggagcatggacttcaagagcaactccgccgtggcctggtccaacaagtccgatttcgcctgcgccaacgccttcaacaacagcattatccccgaggacacattcttcccaagccccgagagcagctgcgacgtgaagctggtggaaaagagcttcgagacagacaccaacctgaacttccagaacctgagcgtgatcggcttcagaatcctgctgctgaaagtggccggctttaacctgctgatgaccctgcggctgtggtccagctctagtcgcgccaagagaagcggatctggcgtgaagcagaccctgaatttcgacctgctgaagctggctggcgacgtggaatccaacccaggccctactagtatggactggatttggcgcatccttttccttgtcggcgctgctaccggcgcgcattccttcgaagttcagctccagcagtctggccccgagcttgtgaaacctggcgcttccatgaagatcagctgcaaggccagcggctacagcttcaccggctacaccatgaactgggtcaagcagagccacggcaagaacctggaatggatcggcctgattaacccctacaacggcggcacctcctacaaccagaagttcaagggcaaagccacactgaccatcgacaagagcagcagcaccgcctacatggaactgctgagcctgacctctgaggacagcgccgtgtactactgcgccagagattacggctacgtgctggactattggggccagggcacaaccctgacagtgtctagtacgcgtgaggacctgaagaacgtgttcccacctgaggtggccgtgttcgagcctagcgaggccgagatcagccacacccagaaagccaccctcgtgtgcctggctaccggcttctaccccgaccatgtggaactgtcttggtgggtcaacggcaaagaggtgcacagcggcgtgtgtaccgacccccagccactgaaagaacagcccgccctgaacgacagccggtactgcctgagcagcagactgagagtgtccgccaccttctggcagaacccccggaaccacttcagatgccaggtgcagttctacggcctgagcgagaacgacgagtggacccaggacagagccaagcccgtgacccagatcgtgtctgccgaagcctggggcagagccgattgcggctttaccagcgagagctaccagcagggcgtgctgagcgccaccatcctgtacgagatcctgctgggcaaggccaccctgtacgccgtgctggtgtctgccctggtgctgatggctatggtcaagcggaaggacagccggggataa

SEQ ID NO: 32649 - DNA, 1869 bp, synthetic construct
  source 1..1869: mol_type = other DNA
atggccttaccagtgaccgccttgctcctgccgctggccttgctgctccacgccgccaggccgcagatcgtgctgacacagagccctgccatcatgtccgcttctcccggcgagaaagtgaccatcacatgtagcgccagcagcagcgtgtcctacctgcactggtttcagcagaagcccggcacaagccctaagctgtgggtgtacagcaccagcaatctgcctagcggagtgcctgccagatttggcggatctggcagcggcacatcttacagcctgaccatcagccggatggaagccgaagatgccgccacctactattgccagcagcggagcatctacccaccttggacatttggaggcggcaccaagctggaaatcaaactcgagatccagaaccctgatcctgccgtgtaccagctgcgggatagcaagagcagcgacaagagcgtgtgtctgttcaccgacttcgacagccagaccaacgtgtcccagagcaaggactccgacgtgtacatcaccgataagtgcgtgctggacatgcggagcatggacttcaagagcaactccgccgtggcctggtccaacaagtccgatttcgcctgcgccaacgccttcaacaacagcattatccccgaggacacattcttcccaagccccgagagcagctgcgacgtgaagctggtggaaaagagcttcgagacagacaccaacctgaacttccagaacctgagcgtgatcggcttcagaatcctgctgctgaaagtggccggctttaacctgctgatgaccctgcggctgtggtccagctctagtcgcgccaagagaagcggatctggcgtgaagcagaccctgaatttcgacctgctgaagctggctggcgacgtggaatccaacccaggccctactagtatggactggatttggcgcatccttttccttgtcggcgctgctaccggcgcgcattccttcgaagttcagctccagcagtctggccccgagcttgtgaaacctggcgcttccatgaagatcagctgcaaggccagcggctacagcttcaccggctacaccatgaactgggtcaagcagagccacggcaagaacctggaatggatcggcctgattaacccctacaacggcggcacctcctacaaccagaagttcaagggcaaagccacactgaccatcgacaagagcagcagcaccgcctacatggaactgctgagcctgacctctgaggacagcgccgtgtactactgcgccagagattacggctacgtgctggactattggggccagggcacaaccctgacagtgtctagtacgcgtgaggacctgaagaacgtgttcccacctgaggtggccgtgttcgagcctagcgaggccgagatcagccacacccagaaagccaccctcgtgtgcctggctaccggcttctaccccgaccatgtggaactgtcttggtgggtcaacggcaaagaggtgcacagcggcgtgtgtaccgacccccagccactgaaagaacagcccgccctgaacgacagccggtactgcctgagcagcagactgagagtgtccgccaccttctggcagaacccccggaaccacttcagatgccaggtgcagttctacggcctgagcgagaacgacgagtggacccaggacagagccaagcccgtgacccagatcgtgtctgccgaagcctggggcagagccgattgcggctttaccagcgagagctaccagcagggcgtgctgagcgccaccatcctgtacgagatcctgctgggcaaggccaccctgtacgccgtgctggtgtctgccctggtgctgatggctatggtcaagcggaaggacagccggggataa

SEQ ID NO: 32650 - DNA, 1851 bp, synthetic construct
  source 1..1851: mol_type = other DNA
atggccttaccagtgaccgccttgctcctgccgctggccttgctgctccacgccgccaggccgcagatcgtgctgacacagagccccgccatcatgtctgttagccctggcgagaaagtgaccatgacctgtagcgccagcagcagcgtgaactacatgcactggttccagcagaagcccggcacaagccctaagctgtgggtgtacagcaccagcaatctggcctctggcgtgccagccagattttctggctctggcagcggcaccagctacagcctgacaatcagcagcatggaagccgaggatgccgccacctactattgtcagcagcggagcatctacccaccttggacatttggcggaggcaccaagctggaaatcaaactcgaggacctgaagaacgtgttcccacctgaggtggccgtgttcgagcctagcaaggccgagatcgcccacacccagaaagccaccctcgtgtgcctggctaccggcttctaccccgaccatgtggaactgtcttggtgggtcaacggcaaagaggtgcacagcggcgtgtgtaccgacccccagccactgaaagaacagcccgccctgaacgacagccggtactgcctgagcagcagactgagagtgtccgccaccttctggcagaacccccggaaccacttcagatgccaggtgcagttctacggcctgagcgagaacgacgagtggacccaggacagagccaagcccgtgacccagatcgtgtctgccgaagcctggggcagagccgattgcggcatcaccagcgccagctaccaccagggcgtgctgagcgccaccatcctgtacgagatcctgctgggcaaggccaccctgtacgccgtgctggtgtctgccctggtgctgatggctatggtcaagcggaaggacagccggggaagggccaagcgatctggatctggagcaacaaacttctcactactcaaacaagcaggtgacgtggaggagaatcccgggcctactagtatggactggatttggcgcatccttttccttgtcggcgctgctaccggcgcgcattccttcgaagttcagctccagcagagcggccctgagcttgtgaaacctggcgcttccgtgaagatcagctgcaaggccagcggctacagcttcaccggctacaccatgaactgggtcaagcagtcccacggcaagaacctggaatggatcggcctgattaacccctacaacggcggcacctcctacaaccagaagttcaaggccaaggccacactgaccgtggacaagagcagcagcacagcctacatgcagctgaagtccctgaccagcgaggacagcgccgtgtactactgcgccagagattacggctacgtgctggactattggggccagggcacaagcgtgacagtgtctagtacgcgtatccagaaccctgatcctgccgtgtaccagctgcgggatagcaagagcagcgacaagagcgtgtgtctgttcaccgacttcgacagccagaccaacgtgtcccagagcaaggactccgacgtgtacatcaccgataagtgcgtgctggacatgcggagcatggacttcaagagcaactccgccgtggcctggtccaacaagtccgatttcgcctgcgccaacgccttcaacaacagcattatccccgaggacacattcttcccaagcagcgacgtgccctgcgacgtgaagctggtggaaaagagcttcgagacagacaccaacctgaacttccagaacctgagcgtgatcggcttcagaatcctgctgctgaaagtggccggctttaacctgctgatgaccctgcggctgtggtccagctaa

SEQ ID NO: 32651 - DNA, 1851 bp, synthetic construct
  source 1..1851: mol_type = other DNA
atggccttaccagtgaccgccttgctcctgccgctggccttgctgctccacgccgccaggccgcagatcgtgctgacacagagccctgccatcatgtccgcttctcccggcgagaaagtgaccatcacatgtagcgccagcagcagcgtgtcctacctgcactggtttcagcagaagcccggcacaagccctaagctgtgggtgtacagcaccagcaatctgcctagcggagtgcctgccagatttggcggatctggcagcggcacatcttacagcctgaccatcagccggatggaagccgaagatgccgccacctactattgccagcagcggagcatctacccaccttggacatttggaggcggcaccaagctggaaatcaaactcgaggacctgaagaacgtgttcccacctgaggtggccgtgttcgagcctagcaaggccgagatcgcccacacccagaaagccaccctcgtgtgcctggctaccggcttctaccccgaccatgtggaactgtcttggtgggtcaacggcaaagaggtgcacagcggcgtgtgtaccgacccccagccactgaaagaacagcccgccctgaacgacagccggtactgcctgagcagcagactgagagtgtccgccaccttctggcagaacccccggaaccacttcagatgccaggtgcagttctacggcctgagcgagaacgacgagtggacccaggacagagccaagcccgtgacccagatcgtgtctgccgaagcctggggcagagccgattgcggcatcaccagcgccagctaccaccagggcgtgctgagcgccaccatcctgtacgagatcctgctgggcaaggccaccctgtacgccgtgctggtgtctgccctggtgctgatggctatggtcaagcggaaggacagccggggaagggccaagcgatctggatctggagcaacaaacttctcactactcaaacaagcaggtgacgtggaggagaatcccgggcctactagtatggactggatttggcgcatccttttccttgtcggcgctgctaccggcgcgcattccttcgaagttcagctccagcagtctggccccgagcttgtgaaacctggcgcttccatgaagatcagctgcaaggccagcggctacagcttcaccggctacaccatgaactgggtcaagcagagccacggcaagaacctggaatggatcggcctgattaacccctacaacggcggcacctcctacaaccagaagttcaagggcaaagccacactgaccatcgacaagagcagcagcaccgcctacatggaactgctgagcctgacctctgaggacagcgccgtgtactactgcgccagagattacggctacgtgctggactattggggccagggcacaaccctgacagtgtctagtacgcgtatccagaaccctgatcctgccgtgtaccagctgcgggatagcaagagcagcgacaagagcgtgtgtctgttcaccgacttcgacagccagaccaacgtgtcccagagcaaggactccgacgtgtacatcaccgataagtgcgtgctggacatgcggagcatggacttcaagagcaactccgccgtggcctggtccaacaagtccgatttcgcctgcgccaacgccttcaacaacagcattatccccgaggacacattcttcccaagcagcgacgtgccctgcgacgtgaagctggtggaaaagagcttcgagacagacaccaacctgaacttccagaacctgagcgtgatcggcttcagaatcctgctgctgaaagtggccggctttaacctgctgatgaccctgcggctgtggtccagctaa

SEQ ID NO: 32652 - DNA, 2553 bp, synthetic construct
  source 1..2553: mol_type = other DNA
atggccttaccagtgaccgccttgctcctgccgctggccttgctgctccacgccgccaggccgcagatcgtgctgacacagagccccgccatcatgtctgttagccctggcgagaaagtgaccatgacctgtagcgccagcagcagcgtgaactacatgcactggttccagcagaagcccggcacaagccctaagctgtgggtgtacagcaccagcaatctggcctctggcgtgccagccagattttctggctctggcagcggcaccagctacagcctgacaatcagcagcatggaagccgaggatgccgccacctactattgtcagcagcggagcatctacccaccttggacatttggcggaggcaccaagctggaaatcaaactcgagatccagaaccctgatcctgccgtgtaccagctgcgggatagcaagagcagcgacaagagcgtgtgtctgttcaccgacttcgacagccagaccaacgtgtcccagagcaaggactccgacgtgtacatcaccgataagtgcgtgctggacatgcggagcatggacttcaagagcaactccgccgtggcctggtccaacaagtccgatttcgcctgcgccaacgccttcaacaacagcattatccccgaggacacattcttcccaagcagcgacgtgccctgcgacgtgaagctggtggaaaagagcttcgagacagacaccaacctgaacttccagaacctgagcgtgatcggcttcagaatcctgctgctgaaagtggccggctttaacctgctgatgaccctgcggctgtggtccagccgcgccaagagaagcggatctggcgtgaagcagaccctgaatttcgacctgctgaagctggctggcgacgtggaatccaacccaggccctactagtatggactggatttggcgcatccttttccttgtcggcgctgctaccggcgcgcattccttcgaagttcagctccagcagagcggccctgagcttgtgaaacctggcgcttccgtgaagatcagctgcaaggccagcggctacagcttcaccggctacaccatgaactgggtcaagcagtcccacggcaagaacctggaatggatcggcctgattaacccctacaacggcggcacctcctacaaccagaagttcaaggccaaggccacactgaccgtggacaagagcagcagcacagcctacatgcagctgaagtccctgaccagcgaggacagcgccgtgtactactgcgccagagattacggctacgtgctggactattggggccagggcacaagcgtgacagtgtctagtacgcgtgaggacctgaagaacgtgttcccacctgaggtggccgtgttcgagcctagcaaggccgagatcgcccacacccagaaagccaccctcgtgtgcctggctaccggcttctaccccgaccatgtggaactgtcttggtgggtcaacggcaaagaggtgcacagcggcgtgtgtaccgacccccagccactgaaagaacagcccgccctgaacgacagccggtactgcctgagcagcagactgagagtgtccgccaccttctggcagaacccccggaaccacttcagatgccaggtgcagttctacggcctgagcgagaacgacgagtggacccaggacagagccaagcccgtgacccagatcgtgtctgccgaagcctggggcagagccgattgcggcatcaccagcgccagctaccaccagggcgtgctgagcgccaccatcctgtacgagatcctgctgggcaaggccaccctgtacgccgtgctggtgtctgccctggtgctgatggctatggtcaagcggaaggacagccggggaagggccaagcgatctggatctggagcaacaaacttctcactactcaaacaagcaggtgacgtggaggagaatcccgggccttctagaggccatatgaccgagtacaagcccacggtgcgcctcgccacccgcgacgacgtccccagggccgtacgcaccctcgccgccgcgttcgccgactaccccgccacgcgccacaccgtcgatccggaccgccacatcgagcgggtcaccgagctgcaagaactcttcctcacgcgcgtcgggctcgacatcggcaaggtgtgggtcgcggacgacggcgccgcggtggcggtctggaccacgccggagagcgtcgaagcgggggcggtgttcgccgagatcggcccgcgcatggccgagttgagcggttcccggctggccgcgcagcaacagatggaaggcctcctggcgccgcaccggcccaaggagcccgcgtggttcctggccaccgtcggcgtctcgcccgaccaccagggcaagggtctgggcagcgccgtcgtgctccccggagtggaggcggccgagcgcgccggggtgcccgccttcctggagacctccgcgccccgcaacctccccttctacgagcggctcggcttcaccgtcaccgccgacgtcgaggtgcccgaaggaccgcgcacctggtgcatgacccgcaagcccggtgcctga

SEQ ID NO: 32653 - DNA, 1851 bp, synthetic construct; identical to SEQ ID NO: 32639
  source 1..1851: mol_type = other DNA

SEQ ID NO: 32654 - DNA, 1851 bp, synthetic construct
  source 1..1851: mol_type = other DNA
atggccttaccagtgaccgccttgctcctgccgctggccttgctgctccacgccgccaggccgcagatcgtgctgacacagagccctgccatcatgtccgcttctcccggcgagaaagtgaccatcacatgtagcgccagcagcagcgtgaattacctgcactggtttcagcagaagcccggcacaagccctaagctgtgggtgtacagcaccagcaatctgcctagcggagtgcctgccagatttggcggatctggcagcggcacatcttacagcctgaccatcagccggatggaagccgaagatgccgccacctactattgccagcagcggagcatctacccaccttggacatttggaggcggcaccaagctggaaatcaaactcgaggacctgaagaacgtgttcccacctgaggtggccgtgttcgagcctagcgaggccgagatcagccacacccagaaagccaccctcgtgtgcctggctaccggcttctaccccgaccatgtggaactgtcttggtgggtcaacggcaaagaggtgcacagcggcgtgtgtaccgacccccagccactgaaagaacagcccgccctgaacgacagccggtactgcctgagcagcagactgagagtgtccgccaccttctggcagaacccccggaaccacttcagatgccaggtgcagttctacggcctgagcgagaacgacgagtggacccaggacagagccaagcccgtgacccagatcgtgtctgccgaagcctggggcagagccgattgcggctttaccagcgagagctaccagcagggcgtgctgagcgccaccatcctgtacgagatcctgctgggcaaggccaccctgtacgccgtgctggtgtctgccctggtgctgatggctatggtcaagcggaaggacagccggggaagggccaagcgatctggatctggagcaacaaacttctcactactcaaacaagcaggtgacgtggaggagaatcccgggcctactagtatggactggatttggcgcatccttttccttgtcggcgctgctaccggcgcgcattccttcgaagttcagctccagcagtctggccccgagcttgtgaaacctggcgcttccatgaagatcagctgcaaggccagcggctacagcttcaccggctacaccatgaactgggtcaagcagagccacggcaagaacctggaatggatcggcctgattaacccctacaacggcggcacctcctacaaccagaagttcaagggcaaagccacactgaccatcgacaagagcagcagcaccgcctacatggaactgctgagcctgacctctgaggacagcgccgtgtactactgcgccagagattacggctacgtgctggactattggggccagggcacaaccctgacagtgtctagtacgcgtatccagaaccctgatcctgccgtgtaccagctgcgggatagcaagagcagcgacaagagcgtgtgtctgttcaccgacttcgacagccagaccaacgtgtcccagagcaaggactccgacgtgtacatcaccgataagtgcgtgctggacatgcggagcatggacttcaagagcaactccgccgtggcctggtccaacaagtccgatttcgcctgcgccaacgccttcaacaacagcattatccccgaggacacattcttcccaagccccgagagcagctgcgacgtgaagctggtggaaaagagcttcgagacagacaccaacctgaacttccagaacctgagcgtgatcggcttcagaatcctgctgctgaaagtggccggctttaacctgctgatgaccctgcggctgtggtccagctaa

SEQ ID NO: 32655 - DNA, 1851 bp, synthetic construct; identical to SEQ ID NO: 32639
  source 1..1851: mol_type = other DNA

SEQ ID NO: 32656 - DNA, 1851 bp, synthetic construct; identical to SEQ ID NO: 32639
  source 1..1851: mol_type = other DNA

SEQ ID NO: 32657 - DNA, 1869 bp, synthetic construct; identical to SEQ ID NO: 32645
  source 1..1869: mol_type = other DNA

SEQ ID NO: 32658 - DNA, 1869 bp, synthetic construct; identical to SEQ ID NO: 32646
  source 1..1869: mol_type = other DNA

SEQ ID NO: 32659 - DNA, 1869 bp, synthetic construct; identical to SEQ ID NO: 32646
  source 1..1869: mol_type = other DNA

SEQ ID NO: 32660 - DNA, 1869 bp, synthetic construct; identical to SEQ ID NO: 32648
  source 1..1869: mol_type = other DNA

SEQ ID NO: 32661 - DNA, 1869 bp, synthetic construct; identical to SEQ ID NO: 32649
  source 1..1869: mol_type = other DNA

SEQ ID NO: 32662 - DNA, 2553 bp, synthetic construct; identical to SEQ ID NO: 32652
  source 1..2553: mol_type = other DNA

SEQ ID NO: 32663 - DNA, 1851 bp, synthetic construct; identical to SEQ ID NO: 32650
  source 1..1851: mol_type = other DNA

SEQ ID NO: 32664 - DNA, 1851 bp, synthetic construct; identical to SEQ ID NO: 32651
  source 1..1851: mol_type = other DNA

SEQ ID NO: 32665 - DNA, 2127 bp, synthetic construct
  source 1..2127: mol_type = other DNA
atggccttaccagtgaccgccttgctcctgccgctggccttgctgctccacgccgccaggccgcagatcgtgctgacacagagccctgccatcatgtccgcttctcccggcgagaaagtgaccatcacatgtagcgccagcagcagcgtgtcctacctgcactggtttcagcagaagcccggcacaagccctaagctgtgggtgtacagcaccagcaatctgcctagcggagtgcctgccagatttggcggatctggcagcggcacatcttacagcctgaccatcagccggatggaagccgaagatgccgccacctactattgccagcagcggagcatctacccaccttggacatttggaggcggcaccaagctggaaatcaaaggcggaggcggaagtggaggcggaggatctggcggcggaggctctgaagttcagctccagcagtctggccccgagcttgtgaaacctggcgcttccatgaagatcagctgcaaggccagcggctacagcttcaccggctacaccatgaactgggtcaagcagagccacggcaagaacctggaatggatcggcctgattaacccctacaacggcggcacctcctacaaccagaagttcaagggcaaagccacactgaccatcgacaagagcagcagcaccgcctacatggaactgctgagcctgacctctgaggacagcgccgtgtactactgcgccagagattacggctacgtgctggactattggggccagggcacaaccctgacagtgtctagtacgcgtaccacgacgccagcgccgcgaccaccaacaccggcgcccaccatcgcgtcgcagcccctgtccctgcgcccagaggcgtgccggccagcggcggggggcgcagtgcacacgagggggctggacttcgcctgtgacatctacatctgggcgcccttggccgggacttgtggggtccttctcctgtcactggttatcaccctttactgcaaacggggcagaaagaaactcctgtatatattcaaacaaccatttatgagaccagtacaaactactcaagaggaagatggctgtagctgccgatttccagaagaagaagaaggaggatgtgaactgagagtgaagttcagcaggagcgcagacgcccccgcgtaccagcagggccagaaccagctctataacgagctgaatctaggacgaagagaggagtacgatgttttggacaagagacgtggccgggaccctgagatggggggaaagccgagaaggaagaaccctcaggaaggcctgtacaatgaactgcagaaagataagatggcggaggcctacagtgagattgggatgaaaggcgagcgccggaggggcaaggggcacgatggcctttaccagggtctcagtacagccaccaaggacacctacgacgcccttcacatgcaggccctgccccctcgctctagtggctccggcgagggcagaggaagtctactaacctgcggagatgtggaagaaaatcctggcccacatatgaccgagtacaagcccacggtgcgcctcgccacccgcgacgacgtccccagggccgtacgcaccctcgccgccgcgttcgccgactaccccgccacgcgccacaccgtcgatccggaccgccacatcgagcgggtcaccgagctgcaagaactcttcctcacgcgcgtcgggctcgacatcggcaaggtgtgggtcgcggacgacggcgccgcggtggcggtctggaccacgccggagagcgtcgaagcgggggcggtgttcgccgagatcggcccgcgcatggccgagttgagcggttcccggctggccgcgcagcaacagatggaaggcctcctggcgccgcaccggcccaaggagcccgcgtggttcctggccaccgtcggcgtctcgcccgaccaccagggcaagggtctgggcagcgccgtcgtgctccccggagtggaggcggccgagcgcgccggggtgcccgccttcctggagacctccgcgccccgcaacctccccttctacgagcggctcggcttcaccgtcaccgccgacgtcgaggtgcccgaaggaccgcgcacctggtgcatgacccgcaagcccggtgcctga

SEQ ID NO: 32666 - DNA, 2127 bp, synthetic construct
  source 1..2127: mol_type = other DNA
atggccttaccagtgaccgccttgctcctgccgctggccttgctgctccacgccgccaggccgcagatcgtgctgacacagagccccgccatcatgtctgttagccctggcgagaaagtgaccatgacctgtagcgccagcagcagcgtgaactacatgcactggttccagcagaagcccggcacaagccctaagctgtgggtgtacagcaccagcaatctggcctctggcgtgccagccagattttctggctctggcagcggcaccagctacagcctgacaatcagcagcatggaagccgaggatgccgccacctactattgtcagcagcggagcatctacccaccttggacatttggcggaggcaccaagctggaaatcaaaggcggaggcggaagtggaggcggaggatctggcggcggaggctctgaagttcagctccagcagagcggccctgagcttgtgaaacctggcgcttccgtgaagatcagctgcaaggccagcggctacagcttcaccggctacaccatgaactgggtcaagcagtcccacggcaagaacctggaatggatcggcctgattaacccctacaacggcggcacctcctacaaccagaagttcaaggccaaggccacactgaccgtggacaagagcagcagcacagcctacatgcagctgaagtccctgaccagcgaggacagcgccgtgtactactgcgccagagattacggctacgtgctggactattggggccagggcacaagcgtgacagtgtctagtacgcgtaccacgacgccagcgccgcgaccaccaacaccggcgcccaccatcgcgtcgcagcccctgtccctgcgcccagaggcgtgccggccagcggcggggggcgcagtgcacacgagggggctggacttcgcctgtgacatctacatctgggcgcccttggccgggacttgtggggtccttctcctgtcactggttatcaccctttactgcaaacggggcagaaagaaactcctgtatatattcaaacaaccatttatgagaccagtacaaactactcaagaggaagatggctgtagctgccgatttccagaagaagaagaaggaggatgtgaactgagagtgaagttcagcaggagcgcagacgcccccgcgtaccagcagggccagaaccagctctataacgagctgaatctaggacgaagagaggagtacgatgttttggacaagagacgtggccgggaccctgagatggggggaaagccgagaaggaagaaccctcaggaaggcctgtacaatgaactgcagaaagataagatggcggaggcctacagtgagattgggatgaaaggcgagcgccggaggggcaaggggcacgatggcctttaccagggtctcagtacagccaccaaggacacctacgacgcccttcacatgcaggccctgccccctcgctctagtggctccggcgagggcagaggaagtctactaacctgcggagatgtggaagaaaatcctggcccacatatgaccgagtacaagcccacggtgcgcctcgccacccgcgacgacgtccccagggccgtacgcaccctcgccgccgcgttcgccgactaccccgccacgcgccacaccgtcgatccggaccgccacatcgagcgggtcaccgagctgcaagaactcttcctcacgcgcgtcgggctcgacatcggcaaggtgtgggtcgcggacgacggcgccgcggtggcggtctggaccacgccggagagcgtcgaagcgggggcggtgttcgccgagatcggcccgcgcatggccgagttgagcggttcccggctggccgcgcagcaacagatggaaggcctcctggcgccgcaccggcccaaggagcccgcgtggttcctggccaccgtcggcgtctcgcccgaccaccagggcaagggtctgggcagcgccgtcgtgctccccggagtggaggcggccgagcgcgccggggtgcccgccttcctggagacctccgcgccccgcaacctccccttctacgagcggctcggcttcaccgtcaccgccgacgtcgaggtgcccgaaggaccgcgcacctggtgcatgacccgcaagcccggtgcctga

SEQ ID NO: 32667 - DNA, 2160 bp, synthetic construct
  source 1..2160: mol_type = other DNA
atggccttaccagtgaccgccttgctcctgccgctggccttgctgctccacgccgccaggccggagatcgtgctgacacagtctcccgccacactgtcactgtctccaggcgaaagagccacactgagctgtagcgtgtccagcagcatcagcagcagcaacctgcactggtatcagcagaagcctggacaggcccctcggctgctgatctacggcacatctaatctggcctctggcatccccgccagattttctggctctggaagcggcaccgacttcaccctgaccataagcagcctggaacctgaggacttcgccgtgtactactgccagcagtggtccagctatccctacacatttggcggaggcaccaaggtggaaatcaagagaggcggaggcggaagtggaggcggaggatctggcggcggaggctctcaggttcagctggttcagagcggagccgaagtgaagaaacctggggcctctgtgaaggtgtcctgcaaggcttccggctacacctttaccaactacctgatcgagtgggtccgacaggctccaggacaaggactggaatggatgggcctgattaaccctggcagcggcggcaccaactacaacgagaagttcaagggcagagtgaccatgaccaccgacaccagcacaagcaccgcctacatggaactgcggagcctgagaagcgacgacaccgccgtgtattattgcgccagaagaagccctctcggctcttggatctactacgcctatgacggcgtggcctattggggccagggaacactggttacagtgtcctctacgcgtaccacgacgccagcgccgcgaccaccaacaccggcgcccaccatcgcgtcgcagcccctgtccctgcgcccagaggcgtgccggccagcggcggggggcgcagtgcacacgagggggctggacttcgcctgtgacatctacatctgggcgcccttggccgggacttgtggggtccttctcctgtcactggttatcaccctttactgcaaacggggcagaaagaaactcctgtatatattcaaacaaccatttatgagaccagtacaaactactcaagaggaagatggctgtagctgccgatttccagaagaagaagaaggaggatgtgaactgagagtgaagttcagcaggagcgcagacgcccccgcgtaccagcagggccagaaccagctctataacgagctgaatctaggacgaagagaggagtacgatgttttggacaagagacgtggccgggaccctgagatggggggaaagccgagaaggaagaaccctcaggaaggcctgtacaatgaactgcagaaagataagatggcggaggcctacagtgagattgggatgaaaggcgagcgccggaggggcaaggggcacgatggcctttaccagggtctcagtacagccaccaaggacacctacgacgcccttcacatgcaggccctgccccctcgctctagtggctccggcgagggcagaggaagtctactaacctgcggagatgtggaagaaaatcctggcccacatatgaccgagtacaagcccacggtgcgcctcgccacccgcgacgacgtccccagggccgtacgcaccctcgccgccgcgttcgccgactaccccgccacgcgccacaccgtcgatccggaccgccacatcgagcgggtcaccgagctgcaagaactcttcctcacgcgcgtcgggctcgacatcggcaaggtgtgggtcgcggacgacggcgccgcggtggcggtctggaccacgccggagagcgtcgaagcgggggcggtgttcgccgagatcggcccgcgcatggccgagttgagcggttcccggctggccgcgcagcaacagatggaaggcctcctggcgccgcaccggcccaaggagcccgcgtggttcctggccaccgtcggcgtctcgcccgaccaccagggcaagggtctgggcagcgccgtcgtgctccccggagtggaggcggccgagcgcgccggggtgcccgccttcctggagacctccgcgccccgcaacctccccttctacgagcggctcggcttcaccgtcaccgccgacgtcgaggtgcccgaaggaccgcgcacctggtgcatgacccgcaagcccggtgcctga

SEQ ID NO: 32668 - DNA, 2160 bp, synthetic construct
  source 1..2160: mol_type = other DNA
atggccttaccagtgaccgccttgctcctgccgctggccttgctgctccacgccgccaggccggagatcgtgctgacacagtctcccgccacactgtcactgtctccaggcgaaagagccacactgagctgtagcgtgtccagcagcatcagcagcagcaacctgcactggtatcagcagaagcctggacaggcccctcggctgctgatctacggcacatctaatctggcctctggcatccccgccagattttctggctctggaagcggcaccgacttcaccctgaccataagcagcctggaacctgaggacttcgccgtgtactactgccagcagtggtccagctatcccttcacatttggcggaggcaccaaggtggaaatcaagagaggcggaggcggaagtggaggcggaggatctggcggcggaggctctcaggttcagctggttcagagcggagccgaagtgaagaaacctggggcctctgtgaaggtgtcctgcaaggcttccggctacacctttaccaactacctgatcgagtgggtccgacaggctccaggacaaggactggaatggatgggcctgattaaccctggcagcggcggcaccaactacaacgagaagttcaagggcagagtgaccatgaccaccgacaccagcacaagcaccgcctacatggaactgcggagcctgagaagcgacgacaccgccgtgtattattgcgccagaagaagccctctcggctcttggatctactacgcctatgacggcgtggcctattggggccagggaacactggttacagtgtcctctacgcgtaccacgacgccagcgccgcgaccaccaacaccggcgcccaccatcgcgtcgcagcccctgtccctgcgcccagaggcgtgccggccagcggcggggggcgcagtgcacacgagggggctggacttcgcctgtgacatctacatctgggcgcccttggccgggacttgtggggtccttctcctgtcactggttatcaccctttactgcaaacggggcagaaagaaactcctgtatatattcaaacaaccatttatgagaccagtacaaactactcaagaggaagatggctgtagctgccgatttccagaagaagaagaaggaggatgtgaactgagagtgaagttcagcaggagcgcagacgcccccgcgtaccagcagggccagaaccagctctataacgagctgaatctaggacgaagagaggagtacgatgttttggacaagagacgtggccgggaccctgagatggggggaaagccgagaaggaagaaccctcaggaaggcctgtacaatgaactgcagaaagataagatggcggaggcctacagtgagattgggatgaaaggcgagcgccggaggggcaaggggcacgatggcctttaccagggtctcagtacagccaccaaggacacctacgacgcccttcacatgcaggccctgccccctcgctctagtggctccggcgagggcagaggaagtctactaacctgcggagatgtggaagaaaatcctggcccacatatgaccgagtacaagcccacggtgcgcctcgccacccgcgacgacgtccccagggccgtacgcaccctcgccgccgcgttcgccgactaccccgccacgcgccacaccgtcgatccggaccgccacatcgagcgggtcaccgagctgcaagaactcttcctcacgcgcgtcgggctcgacatcggcaaggtgtgggtcgcggacgacggcgccgcggtggcggtctggaccacgccggagagcgtcgaagcgggggcggtgttcgccgagatcggcccgcgcatggccgagttgagcggttcccggctggccgcgcagcaacagatggaaggcctcctggcgccgcaccggcccaaggagcccgcgtggttcctggccaccgtcggcgtctcgcccgaccaccagggcaagggtctgggcagcgccgtcgtgctccccggagtggaggcggccgagcgcgccggggtgcccgccttcctggagacctccgcgccccgcaacctccccttctacgagcggctcggcttcaccgtcaccgccgacgtcgaggtgcccgaaggaccgcgcacctggtgcatgacccgcaagcccggtgcctga

SEQ ID NO: 32669 - DNA, 2160 bp, synthetic construct
  source 1..2160: mol_type = other DNA
atggccttaccagtgaccgccttgctcctgccgctggccttgctgctccacgccgccaggccggagatcgtgctgacacagtctcccgccacactgtcactgtctccaggcgaaagagccacactgagctgtagcgtgtccagcagcatcagcagcagcaacctgcactggtatcagcagaagcctggacaggcccctcggctgctgatctacgccacatctaatctggcctctggcatccccgccagattttctggctctggaagcggcaccgacttcaccctgaccataagcagcctggaacctgaggacttcgccgtgtactactgccagcagtggtccagctatccccacacatttggcggaggcaccaaggtggaaatcaagagaggcggaggcggaagtggaggcggaggatctggcggcggaggctctcaggttcagctggttcagagcggagccgaagtgaagaaacctggggcctctgtgaaggtgtcctgcaaggcttccggctacacctttaccaactacctgatcgagtgggtccgacaggctccaggacaaggactggaatggatgggcctgattaaccctggcagcggcggcaccaactacaacgagaagttcaagggcagagtgaccatgaccaccgacaccagcacaagcaccgcctacatggaactgcggagcctgagaagcgacgacaccgccgtgtattattgcgccagaagaagccctctcggctcttggatctactacgcctatgacggcgtggcctattggggccagggaacactggttacagtgtcctctacgcgtaccacgacgccagcgccgcgaccaccaacaccggcgcccaccatcgcgtcgcagcccctgtccctgcgcccagaggcgtgccggccagcggcggggggcgcagtgcacacgagggggctggacttcgcctgtgacatctacatctgggcgcccttggccgggacttgtggggtccttctcctgtcactggttatcaccctttactgcaaacggggcagaaagaaactcctgtatatattcaaacaaccatttatgagaccagtacaaactactcaagaggaagatggctgtagctgccgatttccagaagaagaagaaggaggatgtgaactgagagtgaagttcagcaggagcgcagacgcccccgcgtaccagcagggccagaaccagctctataacgagctgaatctaggacgaagagaggagtacgatgttttggacaagagacgtggccgggaccctgagatggggggaaagccgagaaggaagaaccctcaggaaggcctgtacaatgaactgcagaaagataagatggcggaggcctacagtgagattgggatgaaaggcgagcgccggaggggcaaggggcacgatggcctttaccagggtctcagtacagccaccaaggacacctacgacgcccttcacatgcaggccctgccccctcgctctagtggctccggcgagggcagaggaagtctactaacctgcggagatgtggaagaaaatcctggcccacatatgaccgagtacaagcccacggtgcgcctcgccacccgcgacgacgtccccagggccgtacgcaccctcgccgccgcgttcgccgactaccccgccacgcgccacaccgtcgatccggaccgccacatcgagcgggtcaccgagctgcaagaactcttcctcacgcgcgtcgggctcgacatcggcaaggtgtgggtcgcggacgacggcgccgcggtggcggtctggaccacgccggagagcgtcgaagcgggggcggtgttcgccgagatcggcccgcgcatggccgagttgagcggttcccggctggccgcgcagcaacagatggaaggcctcctggcgccgcaccggcccaaggagcccgcgtggttcctggccaccgtcggcgtctcgcccgaccaccagggcaagggtctgggcagcgccgtcgtgctccccggagtggaggcggccgagcgcgccggggtgcccgccttcctggagacctccgcgccccgcaacctccccttctacgagcggctcggcttcaccgtcaccgccgacgtcgaggtgcccgaaggaccgcgcacctggtgcatgacccgcaagcccggtgcctga

SEQ ID NO: 32670 - DNA, 2160 bp, synthetic construct
  source 1..2160: mol_type = other DNA
atggccttaccagtgaccgccttgctcctgccgctggccttgctgctccacgccgccaggccggagatcgtgctgacacagtctcccgccacactgtcactgtctccaggcgaaagagccacactgagctgtagcgtgtccagcagcatcagcagcagcaacctgcactggtatcagcagaagcctggacaggcccctcggctgctgatctacagcacatctaatctggcctctggcatccccgccagattttctggctctggaagcggcaccgacttcaccctgaccataagcagcctggaacctgaggacttcgccgtgtactactgccagcagtggtccagctatccccacacatttggcggaggcaccaaggtggaaatcaagagaggcggaggcggaagtggaggcggaggatctggcggcggaggctctcaggttcagctggttcagagcggagccgaagtgaagaaacctggggcctctgtgaaggtgtcctgcaaggcttccggctacacctttaccaactacctgatcgagtgggtccgacaggctccaggacaaggactggaatggatgggcctgattaaccctggcagcggcggcaccaactacaacgagaagttcaagggcagagtgaccatgaccaccgacaccagcacaagcaccgcctacatggaactgcggagcctgagaagcgacgacaccgccgtgtattattgcgccagaagaagccctctcggctcttggatctactacgcctatgacggcgtggcctattggggccagggaacactggttacagtgtcctctacgcgtaccacgacgccagcgccgcgaccaccaacaccggcgcccaccatcgcgtcgcagcccctgtccctgcgcccagaggcgtgccggccagcggcggggggcgcagtgcacacgagggggctggacttcgcctgtgacatctacatctgggcgcccttggccgggacttgtggggtccttctcctgtcactggttatcaccctttactgcaaacggggcagaaagaaactcctgtatatattcaaacaaccatttatgagaccagtacaaactactcaagaggaagatggctgtagctgccgatttccagaagaagaagaaggaggatgtgaactgagagtgaagttcagcaggagcgcagacgcccccgcgtaccagcagggccagaaccagctctataacgagctgaatctaggacgaagagaggagtacgatgttttggacaagagacgtggccgggaccctgagatggggggaaagccgagaaggaagaaccctcaggaaggcctgtacaatgaactgcagaaagataagatggcggaggcctacagtgagattgggatgaaaggcgagcgccggaggggcaaggggcacgatggcctttaccagggtctcagtacagccaccaaggacacctacgacgcccttcacatgcaggccctgccccctcgctctagtggctccggcgagggcagaggaagtctactaacctgcggagatgtggaagaaaatcctggcccacatatgaccgagtacaagcccacggtgcgcctcgccacccgcgacgacgtccccagggccgtacgcaccctcgccgccgcgttcgccgactaccccgccacgcgccacaccgtcgatccggaccgccacatcgagcgggtcaccgagctgcaagaactcttcctcacgcgcgtcgggctcgacatcggcaaggtgtgggtcgcggacgacggcgccgcggtggcggtctggaccacgccggagagcgtcgaagcgggggcggtgttcgccgagatcggcccgcgcatggccgagttgagcggttcccggctggccgcgcagcaacagatggaaggcctcctggcgccgcaccggcccaaggagcccgcgtggttcctggccaccgtcggcgtctcgcccgaccaccagggcaagggtctgggcagcgccgtcgtgctccccggagtggaggcggccgagcgcgccggggtgcccgccttcctggagacctccgcgccccgcaacctccccttctacgagcggctcggcttcaccgtcaccgccgacgtcgaggtgcccgaaggaccgcgcacctggtgcatgacccgcaagcccggtgcctga

SEQ ID NO: 32671 - DNA, 1875 bp, synthetic construct
  source 1..1875: mol_type = other DNA
atggccttaccagtgaccgccttgctcctgccgctggccttgctgctccacgccgccaggccgcaatctgtgctgacccagcctccaagcgtgtccgtttctcctggacagaccgccagcatcacctgtagcggagataagctgggcgacaagtacgcctgctggtatcagcagaagcccggccagtctcctgtgctggtcatctaccaggataccaagaggcccagcggcatccccgagagattttccggcagcaacagcggcaataccgccacactgacaatcagcggcacccaggctatggacgaggccgactactattgccaggcttgggattccgatggcaaggccacagtggtgtttggcaccggcaccaaggtggaaatcaagctcgaggacctgaagaacgtgttcccacctgaggtggccgtgttcgagcctagcgaggccgagatcagccacacccagaaagccaccctcgtgtgcctggctaccggcttctaccccgaccatgtggaactgtcttggtgggtcaacggcaaagaggtgcacagcggcgtgtgtaccgacccccagccactgaaagaacagcccgccctgaacgacagccggtactgcctgagcagcagactgagagtgtccgccaccttctggcagaacccccggaaccacttcagatgccaggtgcagttctacggcctgagcgagaacgacgagtggacccaggacagagccaagcccgtgacccagatcgtgtctgccgaagcctggggcagagccgattgcggctttaccagcgagagctaccagcagggcgtgctgagcgccaccatcctgtacgagatcctgctgggcaaggccaccctgtacgccgtgctggtgtctgccctggtgctgatggctatggtcaagcggaaggacagccggggaagggccaagcgatctggatctggagcaacaaacttctcactactcaaacaagcaggtgacgtggaggagaatcccgggcctactagtatggactggatttggcgcatccttttccttgtcggcgctgctaccggcgcgcattccttcgaagaggttcagctgcttgagtctggcggaggactggttcaacctggcggaagcctgagactgtcttgtgccgccagcggcttcacctttagcagctacgccatgagctgggtccgacaggctcctggcaaaggactggaatgggtgtccgccatctctggctctggcggcagcacatattacgccgactctgtgaagggcagattcaccatcagccgggacaacagcaagaacaccctgtacctccagatgaacagcctgagagccgaggacaccgccgtgtactactgtgccaaagagcagtgggagggcgactacttcagcgccttcgatatttggggccagggcacaatggtcaccgtgtctagcacgcgtatccagaaccctgatcctgccgtgtaccagctgcgggatagcaagagcagcgacaagagcgtgtgtctgttcaccgacttcgacagccagaccaacgtgtcccagagcaaggactccgacgtgtacatcaccgataagtgcgtgctggacatgcggagcatggacttcaagagcaactccgccgtggcctggtccaacaagtccgatttcgcctgcgccaacgccttcaacaacagcattatccccgaggacacattcttcccaagccccgagagcagctgcgacgtgaagctggtggaaaagagcttcgagacagacaccaacctgaacttccagaacctgagcgtgatcggcttcagaatcctgctgctgaaagtggccggctttaacctgctgatgaccctgcggctgtggtccagctaa

SEQ ID NO: 32672 - DNA, 1893 bp, synthetic construct
  source 1..1893: mol_type = other DNA
atggccttaccagtgaccgccttgctcctgccgctggccttgctgctccacgccgccaggccgaacttcatgctgacccagcctcacagcgtgtccgagtctccaggcaagaccgtgaccatcagctgcacaagaagaagcggctctatcgccagcaactacgtgcagtggtatcagcagaggccaggcagcgcacctaccaccgtgatctacgaggataaccagaggccaagcggcgtgcccgatagattttctggcagcatcgacagcagcagcaacagcgccagcctgacaatcagcggcctgaaaacagaggacgaggccgactactactgccagagctatgatctggctgccgacgtgcgcgtggtgtttggcactggaacaaaagtgaccgtgagctccctcgaggacctgaagaacgtgttcccacctgaggtggccgtgttcgagcctagcgaggccgagatcagccacacccagaaagccaccctcgtgtgcctggctaccggcttctaccccgaccatgtggaactgtcttggtgggtcaacggcaaagaggtgcacagcggcgtgtgtaccgacccccagccactgaaagaacagcccgccctgaacgacagccggtactgcctgagcagcagactgagagtgtccgccaccttctggcagaacccccggaaccacttcagatgccaggtgcagttctacggcctgagcgagaacgacgagtggacccaggacagagccaagcccgtgacccagatcgtgtctgccgaagcctggggcagagccgattgcggctttaccagcgagagctaccagcagggcgtgctgagcgccaccatcctgtacgagatcctgctgggcaaggccaccctgtacgccgtgctggtgtctgccctggtgctgatggctatggtcaagcggaaggacagccggggaagggccaagcgatctggatctggagcaacaaacttctcactactcaaacaagcaggtgacgtggaggagaatcccgggcctactagtatggactggatttggcgcatccttttccttgtcggcgctgctaccggcgcgcattccttcgaagttcagctgcttgaatcaggcggcggactggttcaacctggcggatctctgagactgagctgtgccgccagcggcttcacctttagcagctacgccatgtcctgggtccgacaggctcctggcaaaggactggaatgggtgtccgccatctctggctcaggcggcagcacatattacgccgactctgtgaagggcagattcaccatcagccgggacaacagcaagaacaccctgtacctccagatgaacagcctgagagccgaggacaccgccgtgtactattgtgccaaaggcggcgagaacaccttcgagtctcaccctgtggccttcgacatctggggccagggaacaatggtcaccgtgtctagtacgcgtatccagaaccctgatcctgccgtgtaccagctgcgggatagcaagagcagcgacaagagcgtgtgtctgttcaccgacttcgacagccagaccaacgtgtcccagagcaaggactccgacgtgtacatcaccgataagtgcgtgctggacatgcggagcatggacttcaagagcaactccgccgtggcctggtccaacaagtccgatttcgcctgcgccaacgccttcaacaacagcattatccccgaggacacattcttcccaagccccgagagcagctgcgacgtgaagctggtggaaaagagcttcgagacagacaccaacctgaacttccagaacctgagcgtgatcggcttcagaatcctgctgctgaaagtggccggctttaacctgctgatgaccctgcggctgtggtccagctaa

SEQ ID NO: 32673 - DNA, 2169 bp, synthetic construct
  source 1..2169: mol_type = other DNA
atggccttaccagtgaccgccttgctcctgccgctggccttgctgctccacgccgccaggccgaacttcatgctgacccagcctcacagcgtgtccgagtctccaggcaagaccgtgaccatcagctgcacaagaaacagcggctctatcgccagcaactacgtgcagtggtatcagcagaggccaggcagcgcacctaccaccgtgatctacgaggataaccagaggccaagcggcgtgcccgatagattttctggcagcatcgacagcagcagcaacagcgccagcctgacaatcagcggcctgaaaacagaggacgaggccgactactactgccagagctatgatctggctgccgacgtgcgcgtggtgtttggcactggaacaaaagtgaccgtgagctccggcggaggcggaagtggaggcggaggatctggcggcggaggctctgaagttcagctgcttgaatcaggcggcggactggttcaacctggcggatctctgagactgagctgtgccgccagcggcttcacctttagcagctacgccatgtcctgggtccgacaggctcctggcaaaggactggaatgggtgtccgccatctctggctcaggcggcagcacatattacgccgactctgtgaagggcagattcaccatcagccgggacaacagcaagaacaccctgtacctccagatgaacagcctgagagccgaggacaccgccgtgtactattgtgccaaaggcggcgagaacaccttcgagtctcaccctgtggccttcgacatctggggccagggaacaatggtcaccgtgtctagtacgcgtaccacgacgccagcgccgcgaccaccaacaccggcgcccaccatcgcgtcgcagcccctgtccctgcgcccagaggcgtgccggccagcggcggggggcgcagtgcacacgagggggctggacttcgcctgtgacatctacatctgggcgcccttggccgggacttgtggggtccttctcctgtcactggttatcaccctttactgcaaacggggcagaaagaaactcctgtatatattcaaacaaccatttatgagaccagtacaaactactcaagaggaagatggctgtagctgccgatttccagaagaagaagaaggaggatgtgaactgagagtgaagttcagcaggagcgcagacgcccccgcgtaccagcagggccagaaccagctctataacgagctgaatctaggacgaagagaggagtacgatgttttggacaagagacgtggccgggaccctgagatggggggaaagccgagaaggaagaaccctcaggaaggcctgtacaatgaactgcagaaagataagatggcggaggcctacagtgagattgggatgaaaggcgagcgccggaggggcaaggggcacgatggcctttaccagggtctcagtacagccaccaaggacacctacgacgcccttcacatgcaggccctgccccctcgctctagtggctccggcgagggcagaggaagtctactaacctgcggagatgtggaagaaaatcctggcccacatatgaccgagtacaagcccacggtgcgcctcgccacccgcgacgacgtccccagggccgtacgcaccctcgccgccgcgttcgccgactaccccgccacgcgccacaccgtcgatccggaccgccacatcgagcgggtcaccgagctgcaagaactcttcctcacgcgcgtcgggctcgacatcggcaaggtgtgggtcgcggacgacggcgccgcggtggcggtctggaccacgccggagagcgtcgaagcgggggcggtgttcgccgagatcggcccgcgcatggccgagttgagcggttcccggctggccgcgcagcaacagatggaaggcctcctggcgccgcaccggcccaaggagcccgcgtggttcctggccaccgtcggcgtctcgcccgaccaccagggcaagggtctgggcagcgccgtcgtgctccccggagtggaggcggccgagcgcgccggggtgcccgccttcctggagacctccgcgccccgcaacctccccttctacgagcggctcggcttcaccgtcaccgccgacgtcgaggtgcccgaaggaccgcgcacctggtgcatgacccgcaagcccggtgcctga

SEQ ID NO: 32674 - DNA, 1875 bp, synthetic construct
  source 1..1875: mol_type = other DNA
atggccttaccagtgaccgccttgctcctgccgctggccttgctgctccacgccgccaggccggacatcgtgctgacccagagccctctgagcctggccgtgtctctgggacagcctgccatcatcagctgcaaggccagccagagcgtgtcctttgccggcacctctctgatgcactggtatcaccagaagcccggccagcagcccagactgctgatctacagagccagcaacctggaagccggcgtgcccgatagattttccggcagcggcagcaagaccgacttcaccctgaccatcagccccgtggaagccgaagatgccgccacctactactgccagcagagcagagagtacccctacaccttcggcggaggcaccaagctggaaatcaagaggctcgaggacctgaagaacgtgttcccacctgaggtggccgtgttcgagcctagcgaggccgagatcagccacacccagaaagccaccctcgtgtgcctggctaccggcttctaccccgaccgtgtggaactgtcttggtgggtcaacggcaaagaggtgcacagcggcgtgtgtaccgacccccagccactgaaagaacagcccgccctgaacgacagccggtactgcctgagcagcagactgagagtgtccgccaccttctggcagaacccccggaaccacttcagatgccaggtgcagttctacggcctgagcgagaacgacgagtggacccaggacagagccaagcccgtgacccagatcgtgtctgccgaagcctggggcagagccgattgcggctttaccagcgagagctaccagcagggcgtgctgagcgcctactacatgtacttgttgctgctgctgaagtccgtggtgtacttcgccatcatcacatgctgcctgctgcggagaaccgccttctgctgcaacggcgagaagtctagggccaagcgatctggatctggagcaacaaacttctcactactcaaacaagcaggtgacgtggaggagaatcccgggcctactagtatggactggatttggcgcatccttttccttgtcggcgctgctaccggcgcgcattccttcgaacaggtccaactggtgcagagcggagccgaggtcgtgaagcctggcgcttccgtgaagattagctgcaaagccagcggctacacctttaccggctactttatgaactgggtcaagcagagccctggccagagcctggaatggatcggcagaatccacccctacgacggcgacaccttctacaaccagaagttccagggcaaggccaccctgacagtggacaagagcagcaacaccgcccacatggaactgctgagcctgaccagcgaggacttcgccgtgtactactgcaccagatacgacggcagccgggctatggactattggggccagggcaccaccgtgaccgtgtctagtacgcgtatccagaaccctgatcctgccgtgtaccagctgcgggatagcaagagcagcgacaagagcgtgtgtctgttcaccgacttcgacagccagaccaacgtgtcccagagcaaggactccgacgtgtacatcaccgataagtgcgtgctggacatgcggagcatggacttcaagagcaactccgccgtggcctggtccaacaagtccgatttcgcctgcgccaacgccttcaacaacagcattatccccgaggacacattcttcccaagccccgagagcagctgcgacgtgaagctggtggaaaagagcttcgagacagacaccaacctgaacttccagaacctgagcgtgatcggcttcagaatcctgctgctgaaagtggccggctttaacctgctgatgaccctgcggctgtggtccagctaa

SEQ ID NO: 32675 - DNA, 1857 bp, synthetic construct
  source 1..1857: mol_type = other DNA
atggccttaccagtgaccgccttgctcctgccgctggccttgctgctccacgccgccaggccggacgagatcgtgatgacccagacccctgccaccctgtctgtgtctgccggcgagagagtgaccattacctgcaaggccagccagagcgtgtccaacgacgtgacctggtatcagcagaagcccggccaggcccccagactgctgatctacagcgccagcaacagatacagcggcgtgcccgccagattttccggcagcggctacggcaccgagttcaccttcaccatcagcagcgtgcagagcgaggacttcgccgtgtacttctgtcagcaagactacagcagcttcggccagggcaccaagctggaaatcaagaggctcgaggacctgaagaacgtgttcccacctgaggtggccgtgttcgagcctagcgaggccgagatcagccacacccagaaagccaccctcgtgtgcctggctaccggcttctaccccgaccatgtggaactgtcttggtgggtcaacggcaaagaggtgcacagcggcgtgtgtaccgacccccagccactgaaagaacagcccgccctgaacgacagccggtactgcctgagcagcagactgagagtgtccgccaccttctggcagaacccccggaaccacttcagatgccaggtgcagttctacggcctgagcgagaacgacgagtggacccaggacagagccaagcccgtgacccagatcgtgtctgccgaagcctggggcagagccgattgcgacgtgaagctggtggaaaagagcttcgagacagacaccaacctgaacttccagaacctgagcgtgatcggcttcagaatcctgctgctgaaagtggccggctttaacctgctgatgaccctgcggctgtggtccagcagggccaagcgatctggatctggagcaacaaacttctcactactcaaacaagcaggtgacgtggaggagaatcccgggcctactagtatggactggatttggcgcatccttttccttgtcggcgctgctaccggcgcgcattccttcgaacaggtgcagctggtggaatctggacctggcgtggtgcagcctggcagaagcctgagaatcagctgtgccgtgtccggcttcagcgtgaccaactacggcgtgcactgggtgcgccagccacctggaaaaggactggaatggctgggcgtgatctgggctggcggcatcaccaactacaacagcgccttcatgtcccggctgaccatctccaaggacaacagcaagaacaccgtgtacctccagatgaacagcctgcgggccgaggacaccgccatgtactactgtgcttccagaggcggccactacggctacgccctggattattggggccagggaaccctcgtgaccgtgtcctctacgcgtatccagaaccctgatcctgccgtgtaccagctgcgggatagcaagagcagcgacaagagcgtgtgtctgttcaccgacttcgacagccagaccaacgtgtcccagagcaaggactccgacgtgtacatcaccgataagtgcgtgctggacatgcggagcatggacttcaagagcaactccgccgtggcctggtccaacaagtccgatttcgcctgcgccaacgccttcaacaacagcattatccccgaggacacattcttcccaagccccgagagcagctgcggctttaccagcgagagctaccagcagggcgtgctgagcgccaccatcctgtacgagatcctgctgggcaaggccaccctgtacgccgtgctggtgtctgccctggtgctgatggctatggtcaagcggaaggacagccggggataa

SEQ ID NO: 32676 - DNA, 2646 bp, synthetic construct
  source 1..2646: mol_type = other DNA
atggccttaccagtgaccgccttgctcctgccgctggccttgctgctccacgccgccaggccggacgagatcgtgatgacccagacccctgccaccctgtctgtgtctgccggcgagagagtgaccattacctgcaaggccagccagagcgtgtccaacgacgtgacctggtatcagcagaagcccggccaggcccccagactgctgatctacagcgccagcaacagatacagcggcgtgcccgccagattttccggcagcggctacggcaccgagttcaccttcaccatcagcagcgtgcagagcgaggacttcgccgtgtacttctgtcagcaagactacagcagcttcggccagggcaccaagctggaaatcaagaggctcgaggggaaaccaattcccaaccctcttctgggactggattcaaccggcagcggcgaggacctgaagaacgtgttcccacctgaggtggccgtgttcgagcctagcaaggccgagatcgcccacacccagaaagccaccctcgtgtgcctggctaccggcttctaccccgaccatgtggaactgtcttggtgggtcaacggcaaagaggtgcacagcggcgtgtgtaccgacccccagccactgaaagaacagcccgccctgaacgacagccggtactgcctgagcagcagactgagagtgtccgccaccttctggcagaacccccggaaccacttcagatgccaggtgcagttctacggcctgagcgagaacgacgagtggacccaggacagagccaagcccgtgacccagatcgtgtctgccgaagcctggggcagagccgattgcggcatcaccagcgccagctaccaccagggcgtgctgagcgccaccatcctgtacgagatcctgctgggcaaggccaccctgtacgccgtgctggtgtctgccctggtgctgatggctatggtcaagcggaaggacagccggggaagggccaagcgatctggatctggagcaacaaacttctcactactcaaacaagcaggtgacgtggaggagaatcccgggcctactagtatggactggatttggcgcatccttttccttgtcggcgctgctaccggcgcgcattccttcgaacaggtgcagctggtggaatctggacctggcgtggtgcagcctggcagaagcctgagaatcagctgtgccgtgtccggcttcagcgtgaccaactacggcgtgcactgggtgcgccagccacctggaaaaggactggaatggctgggcgtgatctgggctggcggcatcaccaactacaacagcgccttcatgtcccggctgaccatctccaaggacaacagcaagaacaccgtgtacctccagatgaacagcctgcgggccgaggacaccgccatgtactactgtgcttccagaggcggccactacggctacgccctggattattggggccagggaaccctcgtgaccgtgtcctctacgcgtgagcagaaactgatctcggaagaggatgggagcggcatccagaaccctgatcctgccgtgtaccagctgcgggatagcaagagcagcgacaagagcgtgtgtctgttcaccgacttcgacagccagaccaacgtgtcccagagcaaggactccgacgtgtacatcaccgataagtgcgtgctggacatgcggagcatggacttcaagagcaactccgccgtggcctggtccaacaagtccgatttcgcctgcgccaacgccttcaacaacagcattatccccgaggacacattcttcccaagcagcgacgtgccctgcgacgtgaagctggtggaaaagagcttcgagacagacaccaacctgaacttccagaacctgagcgtgatcggcttcagaatcctgctgctgaaagtggccggctttaacctgctgatgaccctgcggctgtggtccagccgcgccaagagaagcggatctggcgtgaagcagaccctgaatttcgacctgctgaagctggctggcgacgtggaatccaacccaggcccttctagaggccatatgaccgagtacaagcccacggtgcgcctcgccacccgcgacgacgtccccagggccgtacgcaccctcgccgccgcgttcgccgactaccccgccacgcgccacaccgtcgatccggaccgccacatcgagcgggtcaccgagctgcaagaactcttcctcacgcgcgtcgggctcgacatcggcaaggtgtgggtcgcggacgacggcgccgcggtggcggtctggaccacgccggagagcgtcgaagcgggggcggtgttcgccgagatcggcccgcgcatggccgagttgagcggttcccggctggccgcgcagcaacagatggaaggcctcctggcgccgcaccggcccaaggagcccgcgtggttcctggccaccgtcggcgtctcgcccgaccaccagggcaagggtctgggcagcgccgtcgtgctccccggagtggaggcggccgagcgcgccggggtgcccgccttcctggagacctccgcgccccgcaacctccccttctacgagcggctcggcttcaccgtcaccgccgacgtcgaggtgcccgaaggaccgcgcacctggtgcatgacccgcaagcccggtgcctga

SEQ ID NO: 32677 - DNA, 2559 bp, synthetic construct
  source 1..2559: mol_type = other DNA
atggccttaccagtgaccgccttgctcctgccgctggccttgctgctccacgccgccaggccggacgagatcgtgatgacccagacccctgccaccctgtctgtgtctgccggcgagagagtgaccattacctgcaaggccagccagagcgtgtccaacgacgtgacctggtatcagcagaagcccggccaggcccccagactgctgatctacagcgccagcaacagatacagcggcgtgcccgccagattttccggcagcggctacggcaccgagttcaccttcaccatcagcagcgtgcagagcgaggacttcgccgtgtacttctgtcagcaagactacagcagcttcggccagggcaccaagctggaaatcaagaggctcgagatccagaaccctgatcctgccgtgtaccagctgcgggatagcaagagcagcgacaagagcgtgtgtctgttcaccgacttcgacagccagaccaacgtgtcccagagcaaggactccgacgtgtacatcaccgataagtgcgtgctggacatgcggagcatggacttcaagagcaactccgccgtggcctggtccaacaagtccgatttcgcctgcgccaacgccttcaacaacagcattatccccgaggacacattcttcccaagcagcgacgtgccctgcgacgtgaagctggtggaaaagagcttcgagacagacaccaacctgaacttccagaacctgagcgtgatcggcttcagaatcctgctgctgaaagtggccggctttaacctgctgatgaccctgcggctgtggtccagccgcgccaagagaagcggatctggcgtgaagcagaccctgaatttcgacctgctgaagctggctggcgacgtggaatccaacccaggccctactagtatggactggatttggcgcatccttttccttgtcggcgctgctaccggcgcgcattccttcgaacaggtgcagctggtggaatctggacctggcgtggtgcagcctggcagaagcctgagaatcagctgtgccgtgtccggcttcagcgtgaccaactacggcgtgcactgggtgcgccagccacctggaaaaggactggaatggctgggcgtgatctgggctggcggcatcaccaactacaacagcgccttcatgtcccggctgaccatctccaaggacaacagcaagaacaccgtgtacctccagatgaacagcctgcgggccgaggacaccgccatgtactactgtgcttccagaggcggccactacggctacgccctggattattggggccagggaaccctcgtgaccgtgtcctctacgcgtgaggacctgaagaacgtgttcccacctgaggtggccgtgttcgagcctagcaaggccgagatcgcccacacccagaaagccaccctcgtgtgcctggctaccggcttctaccccgaccatgtggaactgtcttggtgggtcaacggcaaagaggtgcacagcggcgtgtgtaccgacccccagccactgaaagaacagcccgccctgaacgacagccggtactgcctgagcagcagactgagagtgtccgccaccttctggcagaacccccggaaccacttcagatgccaggtgcagttctacggcctgagcgagaacgacgagtggacccaggacagagccaagcccgtgacccagatcgtgtctgccgaagcctggggcagagccgattgcggcatcaccagcgccagctaccaccagggcgtgctgagcgccaccatcctgtacgagatcctgctgggcaaggccaccctgtacgccgtgctggtgtctgccctggtgctgatggctatggtcaagcggaaggacagccggggaagggccaagcgatctggatctggagcaacaaacttctcactactcaaacaagcaggtgacgtggaggagaatcccgggccttctagaggccatatgaccgagtacaagcccacggtgcgcctcgccacccgcgacgacgtccccagggccgtacgcaccctcgccgccgcgttcgccgactaccccgccacgcgccacaccgtcgatccggaccgccacatcgagcgggtcaccgagctgcaagaactcttcctcacgcgcgtcgggctcgacatcggcaaggtgtgggtcgcggacgacggcgccgcggtggcggtctggaccacgccggagagcgtcgaagcgggggcggtgttcgccgagatcggcccgcgcatggccgagttgagcggttcccggctggccgcgcagcaacagatggaaggcctcctggcgccgcaccggcccaaggagcccgcgtggttcctggccaccgtcggcgtctcgcccgaccaccagggcaagggtctgggcagcgccgtcgtgctccccggagtggaggcggccgagcgcgccggggtgcccgccttcctggagacctccgcgccccgcaacctccccttctacgagcggctcggcttcaccgtcaccgccgacgtcgaggtgcccgaaggaccgcgcacctggtgcatgacccgcaagcccggtgcctga

SEQ ID NO: 32678 - DNA, 1884 bp, synthetic construct; identical to SEQ ID NO: 32299
  source 1..1884: mol_type = other DNA

SEQ ID NO: 32679 - DNA, 1866 bp, synthetic construct
  source 1..1866: mol_type = other DNA
atggccttaccagtgaccgccttgctcctgccgctggccttgctgctccacgccgccaggccggagaacgtgctgacacagagccctgccatcatgagtgcctctccaggcgagaaagtgaccatgacctgtagagccagcagcagcgtgtccagcagctacctgcactggtatcagcagaagtccggcgcaagccccaaagtgtggatctacagcaccagcaatctggcctctggcgtgccaggcagattttctggctctggcagcggcacaagctacagcctgacaatcagctccgtggaagccgaagatgccgccacctactactgccagcagtacagcggctaccccatcacatttggagccggcaccaaggtggaagtgaagagactcgaggacctgaagaacgtgttcccacctgaggtggccgtgttcgagcctagcgaggccgagatcagccacacccagaaagccaccctcgtgtgcctggctaccggcttctaccccgaccatgtggaactgtcttggtgggtcaacggcaaagaggtgcacagcggcgtgtgtaccgacccccagccactgaaagaacagcccgccctgaacgacagccggtactgcctgagcagcagactgagagtgtccgccaccttctggcagaacccccggaaccacttcagatgccaggtgcagttctacggcctgagcgagaacgacgagtggacccaggacagagccaagcccgtgacccagatcgtgtctgccgaagcctggggcagagccgattgcggctttaccagcgagagctaccagcagggcgtgctgagcgccaccatcctgtacgagatcctgctgggcaaggccaccctgtacgccgtgctggtgtctgccctggtgctgatggctatggtcaagcggaaggacagccggggaagggccaagcgatctggatctggagcaacaaacttctcactactcaaacaagcaggtgacgtggaggagaatcccgggcctactagtatggactggatttggcgcatccttttccttgtcggcgctgctaccggcgcgcattccttcgaacaggttcagctcaaagaatctggccccgtgctggtggccccaagccagacactgtctatcacctgtaccgtgtccggcttcagcctggcctcctacaacatccactgggtccgacagcctccaggcaaaggactggaatggctgggagtgatttgggctggcggcagcaccaactacaacagcgcactgatgagccggctgagcatcagcaaggacaacagcaagagccaggtgttcctccagatgaactccctccagaccgacgacaccgccatgtactactgcgccaagagaagcgacgactacagttggttcgcctactggggccagggcacactggttactgtgtctgcttctacgcgtatccagaaccctgatcctgccgtgtaccagctgcgggatagcaagagcagcgacaagagcgtgtgtctgttcaccgacttcgacagccagaccaacgtgtcccagagcaaggactccgacgtgtacatcaccgataagtgcgtgctggacatgcggagcatggacttcaagagcaactccgccgtggcctggtccaacaagtccgatttcgcctgcgccaacgccttcaacaacagcattatccccgaggacacattcttcccaagccccgagagcagctgcgacgtgaagctggtggaaaagagcttcgagacagacaccaacctgaacttccagaacctgagcgtgatcggcttcagaatcctgctgctgaaagtggccggctttaacctgctgatgaccctgcggctgtggtccagctaa

SEQ ID NO: 32680 - DNA, 1863 bp, synthetic construct
  source 1..1863: mol_type = other DNA
atggccttaccagtgaccgccttgctcctgccgctggccttgctgctccacgccgccaggccggagaacgtgctgacacagagccctgccatcatgagtgcctctccaggcgagaaagtgaccatgacctgtagagccagcagcagcgtgtccagcagctacctgcactggtatcagcagaagtccggcgcaagccccaaagtgtggatctacagcaccagcaatctggcctctggcgtgccaggcagattttctggctctggcagcggcacaagctacagcctgacaatcagctccgtggaagccgaagatgccgccacctactactgccagcagtacagcggctaccccatcacatttggagccggcaccaaggtggaagtgaagagactcgaggacctgaagaacgtgttcccacctgaggtggccgtgttcgagcctagcgaggccgagatcagccacacccagaaagccaccctcgtgtgcctggctaccggcttctaccccgaccatgtggaactgtcttggtgggtcaacggcaaagaggtgcacagcggcgtgtgtaccgacccccagccactgaaagaacagcccgccctgaacgacagccggtactgcctgagcagcagactgagagtgtccgccaccttctggcagaacccccggaaccacttcagatgccaggtgcagttctacggcctgagcgagaacgacgagtggacccaggacagagccaagcccgtgacccagatcgtgtctgccgaagcctggggcagagccgattgcggctttaccagcgagagctaccagcagggcgtgctgagcgccaccatcctgtacgagatcctgctgggcaaggccaccctgtacgccgtgctggtgtctgccctggtgctgatggctatggtcaagcggaaggacagccggggaagggccaagcgatctggatctggagcaacaaacttctcactactcaaacaagcaggtgacgtggaggagaatcccgggcctactagtatggactggatttggcgcatccttttccttgtcggcgctgctaccggcgcgcattccttcgaacaagttcagctgcaagagtctggccctggcctggtcaagcctagccagacactgagcatcacatgcaccgtgtccggctttagcctggcctcctacaacatccactgggtccgacagcctccaggcaaaggactggaatggctgggagtgatttgggctggcggcagcaccaactacaacagcgcactgatgagccggctgaccatcagcaaggacaacagcaagaaccaggtgttcctgaagatgagcagcctgacagccgccgataccgccgtgtactactgtgccaagagaagcgacgactacagttggttcgcctactggggccagggcacactggttacagtcagctctacgcgtatccagaaccctgatcctgccgtgtaccagctgcgggatagcaagagcagcgacaagagcgtgtgtctgttcaccgacttcgacagccagaccaacgtgtcccagagcaaggactccgacgtgtacatcaccgataagtgcgtgctggacatgcggagcatggacttcaagagcaactccgccgtggcctggtccaacaagtccgatttcgcctgcgccaacgccttcaacaacagcattatccccgaggacacattcttcccaagccccgagagcagctgcgacgtgaagctggtggaaaagagcttcgagacagacaccaacctgaacttccagaacctgagcgtgatcggcttcagaatcctgctgctgaaagtggccggctttaacctgctgatgaccctgcggctgtggtccagctaa

SEQ ID NO: 32681 - DNA, 1857 bp, synthetic construct
  source 1..1857: mol_type = other DNA
atggccttaccagtgaccgccttgctcctgccgctggccttgctgctccacgccgccaggccggacgagatcgtgatgacccagacccctgccaccctgtctgtgtctgccggcgagagagtgaccattacctgcaaggccagccagagcgtgtccaacgacgtgacctggtatcagcagaagcccggccaggcccccagactgctgatctacagcgccagcaacagatacagcggcgtgcccgccagattttccggcagcggctacggcaccgagttcaccttcaccatcagcagcgtgcagagcgaggacttcgccgtgtacttctgtcagcaagactacagcagcttcggccagggcaccaagctggaaatcaagaggctcgaggacctgaagaacgtgttcccacctgaggtggccgtgttcgagcctagcaaggccgagatcgcccacacccagaaagccaccctcgtgtgcctggctaccggcttctaccccgaccatgtggaactgtcttggtgggtcaacggcaaagaggtgcacagcggcgtgtgtaccgacccccagccactgaaagaacagcccgccctgaacgacagccggtactgcctgagcagcagactgagagtgtccgccaccttctggcagaacccccggaaccacttcagatgccaggtgcagttctacggcctgagcgagaacgacgagtggacccaggacagagccaagcccgtgacccagatcgtgtctgccgaagcctggggcagagccgattgcggcatcaccagcgccagctaccaccagggcgtgctgagcgccaccatcctgtacgagatcctgctgggcaaggccaccctgtacgccgtgctggtgtctgccctggtgctgatggctatggtcaagcggaaggacagccggggaagggccaagcgatctggatctggagcaacaaacttctcactactcaaacaagcaggtgacgtggaggagaatcccgggcctactagtatggactggatttggcgcatccttttccttgtcggcgctgctaccggcgcgcattccttcgaacaggtgcagctggtggaatctggacctggcgtggtgcagcctggcagaagcctgagaatcagctgtgccgtgtccggcttcagcgtgaccaactacggcgtgcactgggtgcgccagccacctggaaaaggactggaatggctgggcgtgatctgggctggcggcatcaccaactacaacagcgccttcatgtcccggctgaccatctccaaggacaacagcaagaacaccgtgtacctccagatgaacagcctgcgggccgaggacaccgccatgtactactgtgcttccagaggcggccactacggctacgccctggattattggggccagggaaccctcgtgaccgtgtcctctacgcgtatccagaaccctgatcctgccgtgtaccagctgcgggatagcaagagcagcgacaagagcgtgtgtctgttcaccgacttcgacagccagaccaacgtgtcccagagcaaggactccgacgtgtacatcaccgataagtgcgtgctggacatgcggagcatggacttcaagagcaactccgccgtggcctggtccaacaagtccgatttcgcctgcgccaacgccttcaacaacagcattatccccgaggacacattcttcccaagcagcgacgtgccctgcgacgtgaagctggtggaaaagagcttcgagacagacaccaacctgaacttccagaacctgagcgtgatcggcttcagaatcctgctgctgaaagtggccggctttaacctgctgatgaccctgcggctgtggtccagctaa

SEQ ID NO: 32682 - DNA, 1866 bp, synthetic construct; identical to SEQ ID NO: 32679
  source 1..1866: mol_type = other DNA

SEQ ID NO: 32683 - DNA, 1872 bp, synthetic construct
  source 1..1872: mol_type = other DNA
atggccttaccagtgaccgccttgctcctgccgctggccttgctgctccacgccgccaggccggacatccagatgacacagagccctagcagcctgtctgccagcgtgggagacagagtgaccatcacatgcaaggccagccagagcgtgtccaacgacgtgacctggtatcagcagaagcctggacaggcccctaagctgctgatctacagcgccagcaacagatacagcggagtgcccgccagattttccggctctggctacggcaccgagttcacctttaccatcagcagcgtgcagagcgaggacttcgccgtgtacttctgccagcaagactacagcagcttcggccagggcaccaagctggaaatcaagagactcgagatccagaaccctgatcctgccgtgtaccagctgcgggatagcaagagcagcgacaagagcgtgtgtctgttcaccgacttcgacagccagaccaacgtgtcccagagcaaggactccgacgtgtacatcaccgataagtgcgtgctggacatgcggagcatggacttcaagagcaactccgccgtggcctggtccaacaagtccgatttcgcctgcgccaacgccttcaacaacagcattatccccgaggacacattcttcccaagccccgagagcagctgcgacgtgaagctggtggaaaagagcttcgagacagacaccaacctgaacttccagaacctgagcgtgatcggcttcagaatcctgctgctgaaagtggccggctttaacctgctgatgaccctgcggctgtggtccagctctagtcgcgccaagagaagcggatctggcgtgaagcagaccctgaatttcgacctgctgaagctggctggcgacgtggaatccaacccaggccctactagtatggactggatttggcgcatccttttccttgtcggcgctgctaccggcgcgcattccttcgaacaggtgcagctggtggaatctggacctggcgtggtgcagcctggcagaagcctgagaatcagctgtgccgtgtccggcttcagcgtgaccaactacggcgtgcactgggtgcgccagccacctggaaaaggactggaatggctgggcgtgatctgggctggcggcatcaccaactacaacagcgccttcatgtcccggctgaccatctccaaggacaacagcaagaacaccgtgtacctccagatgaacagcctgcgggccgaggacaccgccatgtactactgtgcttccagaggcggccactacggctacgccctggattattggggccagggaaccctcgtgaccgtgtcctctacgcgtgaggacctgaagaacgtgttcccacctgaggtggccgtgttcgagcctagcgaggccgagatcagccacacccagaaagccaccctcgtgtgcctggctaccggcttctaccccgaccatgtggaactgtcttggtgggtcaacggcaaagaggtgcacagcggcgtgtgtaccgacccccagccactgaaagaacagcccgccctgaacgacagccggtactgcctgagcagcagactgagagtgtccgccaccttctggcagaacccccggaaccacttcagatgccaggtgcagttctacggcctgagcgagaacgacgagtggacccaggacagagccaagcccgtgacccagatcgtgtctgccgaagcctggggcagagccgattgcggctttaccagcgagagctaccagcagggcgtgctgagcgccaccatcctgtacgagatcctgctgggcaaggccaccctgtacgccgtgctggtgtctgccctggtgctgatggctatggtcaagcggaaggacagccggggataa

SEQ ID NO: 32684 - DNA, 1854 bp, synthetic construct
  source 1..1854: mol_type = other DNA
atggccttaccagtgaccgccttgctcctgccgctggccttgctgctccacgccgccaggccggacatccagatgacacagagccctagcagcctgtctgccagcgtgggagacagagtgaccatcacatgcaaggccagccagagcgtgtccaacgacgtgacctggtatcagcagaagcctggacaggcccctaagctgctgatctacagcgccagcaacagatacagcggagtgcccgccagattttccggctctggctacggcaccgagttcacctttaccatcagcagcgtgcagagcgaggacttcgccgtgtacttctgccagcaagactacagcagcttcggccagggcaccaagctggaaatcaagagactcgaggacctgaagaacgtgttcccacctgaggtggccgtgttcgagcctagcaaggccgagatcgcccacacccagaaagccaccctcgtgtgcctggctaccggcttctaccccgaccatgtggaactgtcttggtgggtcaacggcaaagaggtgcacagcggcgtgtgtaccgacccccagccactgaaagaacagcccgccctgaacgacagccggtactgcctgagcagcagactgagagtgtccgccaccttctggcagaacccccggaaccacttcagatgccaggtgcagttctacggcctgagcgagaacgacgagtggacccaggacagagccaagcccgtgacccagatcgtgtctgccgaagcctggggcagagccgattgcggcatcaccagcgccagctaccaccagggcgtgctgagcgccaccatcctgtacgagatcctgctgggcaaggccaccctgtacgccgtgctggtgtctgccctggtgctgatggctatggtcaagcggaaggacagccggggaagggccaagcgatctggatctggagcaacaaacttctcactactcaaacaagcaggtgacgtggaggagaatcccgggcctactagtatggactggatttggcgcatccttttccttgtcggcgctgctaccggcgcgcattccttcgaacaggtgcagctggtggaatctggacctggcgtggtgcagcctggcagaagcctgagaatcagctgtgccgtgtccggcttcagcgtgaccaactacggcgtgcactgggtgcgccagccacctggaaaaggactggaatggctgggcgtgatctgggctggcggcatcaccaactacaacagcgccttcatgtcccggctgaccatctccaaggacaacagcaagaacaccgtgtacctccagatgaacagcctgcgggccgaggacaccgccatgtactactgtgcttccagaggcggccactacggctacgccctggattattggggccagggaaccctcgtgaccgtgtcctctacgcgtatccagaaccctgatcctgccgtgtaccagctgcgggatagcaagagcagcgacaagagcgtgtgtctgttcaccgacttcgacagccagaccaacgtgtcccagagcaaggactccgacgtgtacatcaccgataagtgcgtgctggacatgcggagcatggacttcaagagcaactccgccgtggcctggtccaacaagtccgatttcgcctgcgccaacgccttcaacaacagcattatccccgaggacacattcttcccaagccccgagagcagctgcgacgtgaagctggtggaaaagagcttcgagacagacaccaacctgaacttccagaacctgagcgtgatcggcttcagaatcctgctgctgaaagtggccggctttaacctgctgatgaccctgcggctgtggtccagctaa

SEQ ID NO: 32685 - DNA, 1872 bp, synthetic construct; identical to SEQ ID NO: 32683
  source 1..1872: mol_type = other DNA

SEQ ID NO: 32686 - DNA, 1854 bp, synthetic construct; identical to SEQ ID NO: 32684
  source 1..1854: mol_type = other DNA

SEQ ID NO: 32687 - DNA, 3321 bp, synthetic construct
  source 1..3321: mol_type = other DNA
atggccttaccagtgaccgccttgctcctgccgctggccttgctgctccacgccgccaggccggacgtcgtgatgacccagacaccactgagcctgcctgtgtctctgggcgatcaggccagcatcagctgtagaagcagccagagcctggtgcacagaaacggcaacacctacctgcactggtatctccagaagcctggacagagccccaagctgctgatccacaaggtgtccaacagattcagcggcgtgcccgacagattttctggcagcggcagcggaaccgacttcaccctgaagatcagcagagtggaagccgaggacctgggcgtgtacttctgtagccagagcacacacgtgccacctctgacatttggagccggcaccaagctggaactgaagagactcgagggacagcctaaggccaatcctaccgtgacactgttccctccaagcagcgaagaactccaggccaacaaggccacacttgtgtgcctgatctccgacttctaccctggggctgtgacagtggcttggaaggccgatggatctcctgtgaaagccggcgtggaaaccaccaagccatccaagcagagcaacaacaaatacgccgccagctcctacctgagcctgacacctgagcagtggaagtcccacagatcctacagctgccaagtgacccacgaaggcagcaccgtggaaaagacagtggcccctacagagtgcagccccatcaagaccgatgtgattacaatggaccccaaggacaactgctccaaggacgccaacgataccctgctgctccagctgaccaacaccagcgcctactacatgtacttgttgctgctgctgaagtccgtggtgtacttcgccatcatcacatgctgcctgctgcggagaaccgccttctgctgcaacggcgagaagtctggatccagagtgaagttcagcagaagcgccgacgcccctgcctaccagcagggacagaaccaactgtacaacgagctgaacctgggcagacgggaagagtacgacgtgctggacaagcggagaggcagggaccctgagatgggcggaaagccccggagaaagaacccccaggaaggactgtataacgaactccagaaagacaagatggccgaagcctacagcgagatcggcatgaagggcgagcggagaagaggcaagggccacgatggcctgtaccagggcctgagcaccgccaccaaggacacctatgacgccctgcacatgcaggccctgcctccaagaagggccaagcgatctggatctggagcaacaaacttctcactactcaaacaagcaggtgacgtggaggagaatcccgggcctactagtatggactggatttggcgcatccttttccttgtcggcgctgctaccggcgcgcattccttcgaagttcagctgctgcaaagcggccctgagctggaaaaacctggcgcttccgtgatgatctcctgcaaggccagcggctctagcttcaccggctacaacatgaactgggtccgacagaacatcggcaagagcctggaatggatcggcgctatcgacccttactacggcggcaccagctacaaccagaagttcaagggcagagccacactgaccgtggacaagagcagcagcacagcctacatgcacctgaagtccctgaccagcgaggacagcgccgtgtactattgtgtgtccggcatggaatactggggccagggcacaagcgtgaccgtttcttctacgcgtgcctctacaaagggaccctccgtgtttcctctggctcccagcagcaagtctacaagcggaggaacagccgctctgggctgcctggtcaaggattactttcccgagcctgtgaccgtgtcctggaatagcggagcactgacaagcggcgtgcacacctttccagccgtgctgcaaagcagcggcctgtactctctgagcagcgtggtcacagtgcctagctctagcctgggcacccagacctacatctgcaatgtgaaccacaagcctagcaacaccaaggtggacaagagagtggaacccaagagctgtgaagtgaaaaccgactccaccgaccacgtgaagcccaaagagacagagaacaccaagcagcccagcaagagctgccacaagcccaaggccatcgtgcacaccgagaaagtgaacatgatgagcctgaccgtgctgggcctgcggatgctgttcgccaaaaccgtggccgtgaacttcctgctgaccgccaagctgttcttcctcggtaccagggttaagttttccagatccgcagacgcacccgcttaccaacaagggcagaaccaactctacaatgaacttaatttggggcggagggaagagtacgacgttctggacaaaaggaggggacgagatcccgagatgggcggaaagcctcgaaggaagaatccgcaagaggggctttataacgaactccagaaagataaaatggcagaagcctatagtgagattgggatgaagggagaaaggaggaggggtaaaggtcacgatgggttgtaccaaggattgagcacagccactaaagatacctatgatgcgctccacatgcaggccctgccgccaagacgcgccaagagaagcggatctggcgtgaagcagaccctgaatttcgacctgctgaagctggctggcgacgtggaatccaacccaggcccttctagaggccatatgaccgagtacaagcccacggtgcgcctcgccacccgcgacgacgtccccagggccgtacgcaccctcgccgccgcgttcgccgactaccccgccacgcgccacaccgtcgatccggaccgccacatcgagcgggtcaccgagctgcaagaactcttcctcacgcgcgtcgggctcgacatcggcaaggtgtgggtcgcggacgacggcgccgcggtggcggtctggaccacgccggagagcgtcgaagcgggggcggtgttcgccgagatcggcccgcgcatggccgagttgagcggttcccggctggccgcgcagcaacagatggaaggcctcctggcgccgcaccggcccaaggagcccgcgtggttcctggccaccgtcggcgtctcgcccgaccaccagggcaagggtctgggcagcgccgtcgtgctccccggagtggaggcggccgagcgcgccggggtgcccgccttcctggagacctccgcgccccgcaacctccccttctacgagcggctcggcttcaccgtcaccgccgacgtcgaggtgcccgaaggaccgcgcacctggtgcatgacccgcaagcccggtgcctga

SEQ ID NO: 32688 - DNA, 2898 bp, synthetic construct
  source 1..2898: mol_type = other DNA
atggccttaccagtgaccgccttgctcctgccgctggccttgctgctccacgccgccaggccggacgagatcgtgatgacccagacccctgccaccctgtctgtgtctgccggcgagagagtgaccattacctgcaaggccagccagagcgtgtccaacgacgtgacctggtatcagcagaagcccggccaggcccccagactgctgatctacagcgccagcaacagatacagcggcgtgcccgccagattttccggcagcggctacggcaccgagttcaccttcaccatcagcagcgtgcagagcgaggacttcgccgtgtacttctgtcagcaagactacagcagcttcggccagggcaccaagctggaaatcaagaggctcgaggacctgaagaacgtgttcccacctgaggtggccgtgttcgagcctagcgaggccgagatcagccacacccagaaagccaccctcgtgtgcctggctaccggcttctaccccgaccatgtggaactgtcttggtgggtcaacggcaaagaggtgcacagcggcgtgtctaccgacccccagccactgaaagaacagcccgccctgaacgacagccggtactgcctgagcagcagactgagagtgtccgccaccttctggcagaacccccggaaccacttcagatgccaggtgcagttctacggcctgagcgagaacgacgagtggacccaggacagagccaagcccgtgacccagatcgtgtctgccgaagcctggggcagagccgattgcggatcccagagcttcggcctgctggaccccaagctgtgctacctgctggatggcatcctgttcatctacggcgtgatcctgaccgccctgttcctgagagtgaagttcagcagaagcgccgacgcccctgcctaccagcagggacagaaccaactgtacaacgagctgaacctgggcagacgggaagagtacgacgtgctggacaagcggagaggcagggaccctgagatgggcggaaagccccggagaaagaacccccaggaaggactgtataacgaactccagaaagacaagatggccgaagcctacagcgagatcggcatgaagggcgagcggagaagaggcaagggccacgatggcctgtaccagggcctgagcaccgccaccaaggacacctatgacgccctgcacatgcaggccctgcctccaagaagggccaagcgatctggatctggagcaacaaacttctcactactcaaacaagcaggtgacgtggaggagaatcccgggcctactagtatggactggatttggcgcatccttttccttgtcggcgctgctaccggcgcgcattccttcgaacaggtgcagctggtggaatctggacctggcgtggtgcagcctggcagaagcctgagaatcagctgtgccgtgtccggcttcagcgtgaccaactacggcgtgcactgggtgcgccagccacctggaaaaggactggaatggctgggcgtgatctgggctggcggcatcaccaactacaacagcgccttcatgtcccggctgaccatctccaaggacaacagcaagaacaccgtgtacctccagatgaacagcctgcgggccgaggacaccgccatgtactactgtgcttccagaggcggccactacggctacgccctggattattggggccagggaaccctcgtgaccgtgtcctctacgcgtatccagaaccctgatcctgccgtgtaccagctgcgggatagcaagagcagcgacaagagcgtgtgtctgttcaccgacttcgacagccagaccaacgtgtcccagagcaaggactccgacgtgtacatcaccgataagaccgtgctggacatgcggagcatggacttcaagagcaactccgccgtggcctggtccaacaagtccgatttcgcctgcgccaacgccttcaacaacagcattatccccgaggacacattcttcccaagccccgagagcagctgcggtaccatcactcaaggtttggcagtgtcaaccatctcatcattctttccacctggctaccaagtgtccttctgcctggtcatggtgctgctgttcgccgtggataccggcctgtacttcagcgtcaagaccaacatccggtccagcaccagagactggaaggaccacaagttcaagtggcggaaggaccctcaggacaagagggccaagcgatctggatctggagcaacaaacttctcactactcaaacaagcaggtgacgtggaggagaatcccgggccttctagaggccatatgaccgagtacaagcccacggtgcgcctcgccacccgcgacgacgtccccagggccgtacgcaccctcgccgccgcgttcgccgactaccccgccacgcgccacaccgtcgatccggaccgccacatcgagcgggtcaccgagctgcaagaactcttcctcacgcgcgtcgggctcgacatcggcaaggtgtgggtcgcggacgacggcgccgcggtggcggtctggaccacgccggagagcgtcgaagcgggggcggtgttcgccgagatcggcccgcgcatggccgagttgagcggttcccggctggccgcgcagcaacagatggaaggcctcctggcgccgcaccggcccaaggagcccgcgtggttcctggccaccgtcggcgtctcgcccgaccaccagggcaagggtctgggcagcgccgtcgtgctccccggagtggaggcggccgagcgcgccggggtgcccgccttcctggagacctccgcgccccgcaacctccccttctacgagcggctcggcttcaccgtcaccgccgacgtcgaggtgcccgaaggaccgcgcacctggtgcatgacccgcaagcccggtgcctga

SEQ ID NO: 32689 - DNA, 2904 bp, synthetic construct
  source 1..2904: mol_type = other DNA
atggccttaccagtgaccgccttgctcctgccgctggccttgctgctccacgccgccaggccggacgtcgtgatgacccagacaccactgagcctgcctgtgtctctgggcgatcaggccagcatcagctgtagaagcagccagagcctggtgcacagaaacggcaacacctacctgcactggtatctccagaagcctggacagagccccaagctgctgatccacaaggtgtccaacagattcagcggcgtgcccgacagattttctggcagcggcagcggaaccgacttcaccctgaagatcagcagagtggaagccgaggacctgggcgtgtacttctgtagccagagcacacacgtgccacctctgacatttggagccggcaccaagctggaactgaagagactcgaggacctgaagaacgtgttcccacctgaggtggccgtgttcgagcctagcgaggccgagatcagccacacccagaaagccaccctcgtgtgcctggctaccggcttctaccccgaccatgtggaactgtcttggtgggtcaacggcaaagaggtgcacagcggcgtgtctaccgacccccagccactgaaagaacagcccgccctgaacgacagccggtactgcctgagcagcagactgagagtgtccgccaccttctggcagaacccccggaaccacttcagatgccaggtgcagttctacggcctgagcgagaacgacgagtggacccaggacagagccaagcccgtgacccagatcgtgtctgccgaagcctggggcagagccgattgcggatcccagagcttcggcctgctggaccccaagctgtgctacctgctggatggcatcctgttcatctacggcgtgatcctgaccgccctgttcctgagagtgaagttcagcagaagcgccgacgcccctgcctaccagcagggacagaaccaactgtacaacgagctgaacctgggcagacgggaagagtacgacgtgctggacaagcggagaggcagggaccctgagatgggcggaaagccccagcggagaaagaacccccaggaaggactgtataacgaactccagaaagacaagatggccgaagcctacagcgagatcggcatgaagggcgagcggagaagaggcaagggccacgatggcctgtaccagggcctgagcaccgccaccaaggacacctatgacgccctgcacatgcaggccctgcctccaagaagggccaagcgatctggatctggagcaacaaacttctcactactcaaacaagcaggtgacgtggaggagaatcccgggcctactagtatggactggatttggcgcatccttttccttgtcggcgctgctaccggcgcgcattccttcgaagttcagctgctgcaaagcggccctgagctggaaaaacctggcgcttccgtgatgatctcctgcaaggccagcggctctagcttcaccggctacaacatgaactgggtccgacagaacatcggcaagagcctggaatggatcggcgctatcgacccttactacggcggcaccagctacaaccagaagttcaagggcagagccacactgaccgtggacaagagcagcagcacagcctacatgcacctgaagtccctgaccagcgaggacagcgccgtgtactattgtgtgtccggcatggaatactggggccagggcacaagcgtgaccgtttcttctacgcgtatccagaaccctgatcctgccgtgtaccagctgcgggatagcaagagcagcgacaagagcgtgtgtctgttcaccgacttcgacagccagaccaacgtgtcccagagcaaggactccgacgtgtacatcaccgataagtgcgtgctggacatgcggagcatggacttcaagagcaactccgccgtggcctggtccaacaagtccgatttcgcctgcgccaacgccttcaacaacagcattatccccgaggacacattcttcccaagccccgagagcagctgcggtaccatcactcaaggtttggcagtgtcaaccatctcatcattctttccacctggctaccaagtgtccttctgcctggtcatggtgctgctgttcgccgtggataccggcctgtacttcagcgtcaagaccaacatccggtccagcaccagagactggaaggaccacaagttcaagtggcggaaggaccctcaggacaagagggccaagcgatctggatctggagcaacaaacttctcactactcaaacaagcaggtgacgtggaggagaatcccgggccttctagaggccatatgaccgagtacaagcccacggtgcgcctcgccacccgcgacgacgtccccagggccgtacgcaccctcgccgccgcgttcgccgactaccccgccacgcgccacaccgtcgatccggaccgccacatcgagcgggtcaccgagctgcaagaactcttcctcacgcgcgtcgggctcgacatcggcaaggtgtgggtcgcggacgacggcgccgcggtggcggtctggaccacgccggagagcgtcgaagcgggggcggtgttcgccgagatcggcccgcgcatggccgagttgagcggttcccggctggccgcgcagcaacagatggaaggcctcctggcgccgcaccggcccaaggagcccgcgtggttcctggccaccgtcggcgtctcgcccgaccaccagggcaagggtctgggcagcgccgtcgtgctccccggagtggaggcggccgagcgcgccggggtgcccgccttcctggagacctccgcgccccgcaacctccccttctacgagcggctcggcttcaccgtcaccgccgacgtcgaggtgcccgaaggaccgcgcacctggtgcatgacccgcaagcccggtgcctga

SEQ ID NO: 32690 - DNA, 2973 bp, synthetic construct
  source 1..2973: mol_type = other DNA
atggccttaccagtgaccgccttgctcctgccgctggccttgctgctccacgccgccaggccggacgtcgtgatgacccagacaccactgagcctgcctgtgtctctgggcgatcaggccagcatcagctgtagaagcagccagagcctggtgcacagaaacggcaacacctacctgcactggtatctccagaagcctggacagagccccaagctgctgatccacaaggtgtccaacagattcagcggcgtgcccgacagattttctggcagcggcagcggaaccgacttcaccctgaagatcagcagagtggaagccgaggacctgggcgtgtacttctgtagccagagcacacacgtgccacctctgacatttggagccggcaccaagctggaactgaagagactcgaggacctgaagaacgtgttcccacctgaggtggccgtgttcgagcctagcgaggccgagatcagccacacccagaaagccaccctcgtgtgcctggctaccggcttctaccccgaccatgtggaactgtcttggtgggtcaacggcaaagaggtgcacagcggcgtgtctaccgacccccagccactgaaagaacagcccgccctgaacgacagccggtactgcctgagcagcagactgagagtgtccgccaccttctggcagaacccccggaaccacttcagatgccaggtgcagttctacggcctgagcgagaacgacgagtggacccaggacagagccaagcccgtgacccagatcgtgtctgccgaagcctggggcagagccgattgcggatcccagagcttcggcctgctggaccccaagctgtgctacctgctggatggcatcctgttcatctacggcgtgatcctgaccgccctgttcctgagagtgaagttcagcagaagcgccgacgcccctgcctaccagcagggacagaaccaactgtacaacgagctgaacctgggcagacgggaagagtacgacgtgctggacaagcggagaggcagggaccctgagatgggcggaaagccccagcggagaaagaacccccaggaaggactgtataacgaactccagaaagacaagatggccgaagcctacagcgagatcggcatgaagggcgagcggagaagaggcaagggccacgatggcctgtaccagggcctgagcaccgccaccaaggacacctatgacgccctgcacatgcaggccctgcctccaagaagggccaagcgatctggatctggagcaacaaacttctcactactcaaacaagcaggtgacgtggaggagaatcccgggcctactagtatggactggatttggcgcatccttttccttgtcggcgctgctaccggcgcgcattccttcgaagttcagctgctgcaaagcggccctgagctggaaaaacctggcgcttccgtgatgatctcctgcaaggccagcggctctagcttcaccggctacaacatgaactgggtccgacagaacatcggcaagagcctggaatggatcggcgctatcgacccttactacggcggcaccagctacaaccagaagttcaagggcagagccacactgaccgtggacaagagcagcagcacagcctacatgcacctgaagtccctgaccagcgaggacagcgccgtgtactattgtgtgtccggcatggaatactggggccagggcacaagcgtgaccgtttcttctacgcgtgcctctacaaagggaccctccgtgtttcctctggctcccagcagcaagtctacaagcggaggaacagccgctctgggctgcctggtcaaggattactttcccgagcctgtgaccgtgtcctggaatagcggagcactgacaagcggcgtgcacacctttccagccgtgctgcaaagcagcggcctgtactctctgagcagcgtggtcacagtgcctagctctagcctgggcacccagacctacatctgcaatgtgaaccacaagcctagcaacaccaaggtggacaagagagtggaacccaagagctgtatccccgaggacacattcttcccaagccccgagagcagctgcggtaccatcactcaaggtttggcagtgtcaaccatctcatcattctttccacctggctaccaagtgtccttctgcctggtcatggtgctgctgttcgccgtggataccggcctgtacttcagcgtcaagaccaacatccggtccagcaccagagactggaaggaccacaagttcaagtggcggaaggaccctcaggacaagagggccaagcgatctggatctggagcaacaaacttctcactactcaaacaagcaggtgacgtggaggagaatcccgggccttctagaggccatatgaccgagtacaagcccacggtgcgcctcgccacccgcgacgacgtccccagggccgtacgcaccctcgccgccgcgttcgccgactaccccgccacgcgccacaccgtcgatccggaccgccacatcgagcgggtcaccgagctgcaagaactcttcctcacgcgcgtcgggctcgacatcggcaaggtgtgggtcgcggacgacggcgccgcggtggcggtctggaccacgccggagagcgtcgaagcgggggcggtgttcgccgagatcggcccgcgcatggccgagttgagcggttcccggctggccgcgcagcaacagatggaaggcctcctggcgccgcaccggcccaaggagcccgcgtggttcctggccaccgtcggcgtctcgcccgaccaccagggcaagggtctgggcagcgccgtcgtgctccccggagtggaggcggccgagcgcgccggggtgcccgccttcctggagacctccgcgccccgcaacctccccttctacgagcggctcggcttcaccgtcaccgccgacgtcgaggtgcccgaaggaccgcgcacctggtgcatgacccgcaagcccggtgcctga

SEQ ID NO: 32691 - DNA, 2928 bp, synthetic construct
  source 1..2928: mol_type = other DNA
atggccttaccagtgaccgccttgctcctgccgctggccttgctgctccacgccgccaggccggacgtcgtgatgacccagacaccactgagcctgcctgtgtctctgggcgatcaggccagcatcagctgtagaagcagccagagcctggtgcacagaaacggcaacacctacctgcactggtatctccagaagcctggacagagccccaagctgctgatccacaaggtgtccaacagattcagcggcgtgcccgacagattttctggcagcggcagcggaaccgacttcaccctgaagatcagcagagtggaagccgaggacctgggcgtgtacttctgtagccagagcacacacgtgccacctctgacatttggagccggcaccaagctggaactgaagagactcgaggacctgaagaacgtgttcccacctgaggtggccgtgttcgagcctagcgaggccgagatcagccacacccagaaagccaccctcgtgtgcctggctaccggcttctaccccgaccatgtggaactgtcttggtgggtcaacggcaaagaggtgcacagcggcgtgtctaccgacccccagccactgaaagaacagcccgccctgaacgacagccggtactgcctgagcagcagactgagagtgtccgccaccttctggcagaacccccggaaccacttcagatgccaggtgcagttctacggcctgagcgagaacgacgagtggacccaggacagagccaagcccgtgacccagatcgtgtctgccgaagcctggggcagagccgattgcggatcccagagcttcggcctgctggaccccaagctgtgctacctgctggatggcatcctgttcatctacggcgtgatcctgaccgccctgttcctgagagtgaagttcagcagaagcgccgacgcccctgcctaccagcagggacagaaccaactgtacaacgagctgaacctgggcagacgggaagagtacgacgtgctggacaagcggagaggcagggaccctgagatgggcggaaagccccggagaaagaacccccaggaaggactgtataacgaactccagaaagacaagatggccgaagcctacagcgagatcggcatgaagggcgagcggagaagaggcaagggccacgatggcctgtaccagggcctgagcaccgccaccaaggacacctatgacgccctgcacatgcaggccctgcctccaagaagggccaagcgatctggatctggagcaacaaacttctcactactcaaacaagcaggtgacgtggaggagaatcccgggcctactagtatggactggatttggcgcatccttttccttgtcggcgctgctaccggcgcgcattccttcgaagttcagctgctgcaaagcggccctgagctggaaaaacctggcgcttccgtgatgatctcctgcaaggccagcggctctagcttcaccggctacaacatgaactgggtccgacagaacatcggcaagagcctggaatggatcggcgctatcgacccttactacggcggcaccagctacaaccagaagttcaagggcagagccacactgaccgtggacaagagcagcagcacagcctacatgcacctgaagtccctgaccagcgaggacagcgccgtgtactattgtgtgtccggcatggaatactggggccagggcacaagcgtgaccgtttcttctacgcgtgcctctacaaagggaccctccgtgtttcctctggctcccagcagcaagtctacaagcggaggaacagccgctctgggctgcctggtcaaggattactttcccgagcctgtgaccgtgtcctggaatagcggagcactgacaagcggcgtgcacacctttccagccgtgctgcaaagcagcggcctgtactctctgagcagcgtggtcacagtgcctagctctagcctgggcacccagacctacatctgcaatgtgaaccacaagcctagcaacaccaaggtggacaagagagtggaacccaagagctgtggtaccatcactcaaggtttggcagtgtcaaccatctcatcattctttccacctggctaccaagtgtccttctgcctggtcatggtgctgctgttcgccgtggataccggcctgtacttcagcgtcaagaccaacatccggtccagcaccagagactggaaggaccacaagttcaagtggcggaaggaccctcaggacaagagggccaagcgatctggatctggagcaacaaacttctcactactcaaacaagcaggtgacgtggaggagaatcccgggccttctagaggccatatgaccgagtacaagcccacggtgcgcctcgccacccgcgacgacgtccccagggccgtacgcaccctcgccgccgcgttcgccgactaccccgccacgcgccacaccgtcgatccggaccgccacatcgagcgggtcaccgagctgcaagaactcttcctcacgcgcgtcgggctcgacatcggcaaggtgtgggtcgcggacgacggcgccgcggtggcggtctggaccacgccggagagcgtcgaagcgggggcggtgttcgccgagatcggcccgcgcatggccgagttgagcggttcccggctggccgcgcagcaacagatggaaggcctcctggcgccgcaccggcccaaggagcccgcgtggttcctggccaccgtcggcgtctcgcccgaccaccagggcaagggtctgggcagcgccgtcgtgctccccggagtggaggcggccgagcgcgccggggtgcccgccttcctggagacctccgcgccccgcaacctccccttctacgagcggctcggcttcaccgtcaccgccgacgtcgaggtgcccgaaggaccgcgcacctggtgcatgacccgcaagcccggtgcctga

SEQ ID NO: 32692 - DNA, 2445 bp, synthetic construct
  source 1..2445: mol_type = other DNA
atggccttaccagtgaccgccttgctcctgccgctggccttgctgctccacgccgccaggccggacgtcgtgatgacccagacaccactgagcctgcctgtgtctctgggcgatcaggccagcatcagctgtagaagcagccagagcctggtgcacagaaacggcaacacctacctgcactggtatctccagaagcctggacagagccccaagctgctgatccacaaggtgtccaacagattcagcggcgtgcccgacagattttctggcagcggcagcggaaccgacttcaccctgaagatcagcagagtggaagccgaggacctgggcgtgtacttctgtagccagagcacacacgtgccacctctgacatttggagccggcaccaagctggaactgaagagactcgaggacctgaagaacgtgttcccacctgaggtggccgtgttcgagcctagcgaggccgagatcagccacacccagaaagccaccctcgtgtgcctggctaccggcttctaccccgaccatgtggaactgtcttggtgggtcaacggcaaagaggtgcacagcggcgtgtctaccgacccccagccactgaaagaacagcccgccctgaacgacagccggtactgcctgagcagcagactgagagtgtccgccaccttctggcagaacccccggaaccacttcagatgccaggtgcagttctacggcctgagcgagaacgacgagtggacccaggacagagccaagcccgtgacccagatcgtgtctgccgaagcctggggcagagccgattgcggatcccagagcttcggcctgctggaccccaagctgtgctacctgctggatggcatcctgttcatctacggcgtgatcctgaccgccctgttcctgagagtgaagttcagcagaagcgccgacgcccctgcctaccagcagggacagaaccaactgtacaacgagctgaacctgggcagacgggaagagtacgacgtgctggacaagcggagaggcagggaccctgagatgggcggaaagccccggagaaagaacccccaggaaggactgtataacgaactccagaaagacaagatggccgaagcctacagcgagatcggcatgaagggcgagcggagaagaggcaagggccacgatggcctgtaccagggcctgagcaccgccaccaaggacacctatgacgccctgcacatgcaggccctgcctccaagaagggccaagcgatctggatctggagcaacaaacttctcactactcaaacaagcaggtgacgtggaggagaatcccgggcctactagtatggactggatttggcgcatccttttccttgtcggcgctgctaccggcgcgcattccttcgaagttcagctgctgcaaagcggccctgagctggaaaaacctggcgcttccgtgatgatctcctgcaaggccagcggctctagcttcaccggctacaacatgaactgggtccgacagaacatcggcaagagcctggaatggatcggcgctatcgacccttactacggcggcaccagctacaaccagaagttcaagggcagagccacactgaccgtggacaagagcagcagcacagcctacatgcacctgaagtccctgaccagcgaggacagcgccgtgtactattgtgtgtccggcatggaatactggggccagggcacaagcgtgaccgtttcttctacgcgtatccagaaccctgatcctgccgtgtaccagctgcgggatagcaagagcagcgacaagagcgtgtgtctgttcaccgacttcgacagccagaccaacgtgtcccagagcaaggactccgacgtgtacatcaccgataagaccgtgctggacatgcggagcatggacttcaagagcaactccgccgtggcctggtccaacaagtccgatttcgcctgcgccaacgccttcaacaacagcattatccccgaggacacattcttcccaagccccgagagcagctgcggtacccagagttttgggttgttggaccctaaattgtgctatctgttggacggaatcctgttcatttacggagtgatcctgaccgcattgttcctgcgggttaagttttccagatccgcagacgcacccgcttaccaacaagggcagaaccaactctacaatgaacttaatttggggcggagggaagagtacgacgttctggacaaaaggaggggacgagatcccgagatgggcggaaagcctcagcgaaggaagaatccgcaagaggggctttataacgaactccagaaagataaaatggcagaagcctatagtgagattgggatgaagggagaaaggaggaggggtaaaggtcacgatgggttgtaccaaggattgagcacagccactaaagatacctatgatgcgctccacatgcaggccctgccgccaagataa

SEQ ID NO: 32693 - DNA, 1869 bp, synthetic construct
  source 1..1869: mol_type = other DNA
atggccttaccagtgaccgccttgctcctgccgctggccttgctgctccacgccgccaggccggagaacgtgctgacacagagccctgccatcatgagtgcctctccaggcgagaaagtgaccatgacctgtagagccagcagcagcgtgtccagcagctacctgcactggtatcagcagaagtccggcgcaagccccaaagtgtggatctacagcaccagcaatctggcctctggcgtgccaggcagattttctggctctggcagcggcacaagctacagcctgacaatcagctccgtggaagccgaagatgccgccacctactactgccagcagtacagcggctaccccatcacatttggagccggcaccaaggtggaagtgaagagactcgaggacctgaagaacgtgttcccacctgaggtggccgtgttcgagcctagcgaggccgagatcagccacacccagaaagccaccctcgtgtgcctggctaccggcttctaccccgaccatgtggaactgtcttggtgggtcaacggcaaagaggtgcacagcggcgtgtgtaccgacccccagccactgaaagaacagcccgccctgaacgacagccggtactgcctgagcagcagactgagagtgtccgccaccttctggcagaacccccggaaccacttcagatgccaggtgcagttctacggcctgagcgagaacgacgagtggacccaggacagagccaagcccgtgacccagatcgtgtctgccgaagcctggggcagagccgattgcggctttaccagcgagagctaccagcagggcgtgctgagcgcctactacatgtacttgttgctgctgctgaagtccgtggtgtacttcgccatcatcacatgctgcctgctgcggagaaccgccttctgctgcaacggcgagaagtctagggccaagcgatctggatctggagcaacaaacttctcactactcaaacaagcaggtgacgtggaggagaatcccgggcctactagtatggactggatttggcgcatccttttccttgtcggcgctgctaccggcgcgcattccttcgaacaggttcagctcaaagaatctggccccgtgctggtggccccaagccagacactgtctatcacctgtaccgtgtccggcttcagcctggcctcctacaacatccactgggtccgacagcctccaggcaaaggactggaatggctgggagtgatttgggctggcggcagcaccaactacaacagcgcactgatgagccggctgagcatcagcaaggacaacagcaagagccaggtgttcctccagatgaactccctccagaccgacgacaccgccatgtactactgcgccaagagaagcgacgactacagttggttcgcctactggggccagggcacactggttactgtgtctgcttctacgcgtatccagaaccctgatcctgccgtgtaccagctgcgggatagcaagagcagcgacaagagcgtgtgtctgttcaccgacttcgacagccagaccaacgtgtcccagagcaaggactccgacgtgtacatcaccgataagtgcgtgctggacatgcggagcatggacttcaagagcaactccgccgtggcctggtccaacaagtccgatttcgcctgcgccaacgccttcaacaacagcattatccccgaggacacattcttcccaagccccgagagcagctgcgacgtgaagctggtggaaaagagcttcgagacagacaccaacctgaacttccagaacctgagcgtgatcggcttcagaatcctgctgctgaaagtggccggctttaacctgctgatgaccctgcggctgtggtccagctaa

SEQ ID NO: 32694 - DNA, 2907 bp, synthetic construct
  source 1..2907: mol_type = other DNA
atggccttaccagtgaccgccttgctcctgccgctggccttgctgctccacgccgccaggccggaggttcagctgcttgagacaggcggaggactggttcaacctggcggaagcagaggactgagctgtgaaggcagcggctttaccttcagcggcttctggatgagctgggtccgacagacacctggcaagaccctggaatggatcggcgacatcaatagcgacggcagcagcatcaactacgcccctagcatcaaggacaggttcaccatcttccgggacaacgacaagagcatcctgtacctccagatgaccaacgtgcggagcgaggacaccggcacctacttttgtgtgaccacctacggcgactactggggccagggaacaaccctgacagtgtctagtgcttctctcgaggacctgaagaacgtgttcccacctgaggtggccgtgttcgagcctagcgaggccgagatcagccacacccagaaagccaccctcgtgtgcctggctaccggcttctaccccgaccatgtggaactgtcttggtgggtcaacggcaaagaggtgcacagcggcgtgtctaccgacccccagccactgaaagaacagcccgccctgaacgacagccggtactgcctgagcagcagactgagagtgtccgccaccttctggcagaacccccggaaccacttcagatgccaggtgcagttctacggcctgagcgagaacgacgagtggacccaggacagagccaagcccgtgacccagatcgtgtctgccgaagcctggggcagagccgattgcggatcccagagcttcggcctgctggaccccaagctgtgctacctgctggatggcatcctgttcatctacggcgtgatcctgaccgccctgttcctgagagtgaagttcagcagaagcgccgacgcccctgcctaccagcagggacagaaccaactgtacaacgagctgaacctgggcagacgggaagagtacgacgtgctggacaagcggagaggcagggaccctgagatgggcggaaagccccggagaaagaacccccaggaaggactgtataacgaactccagaaagacaagatggccgaagcctacagcgagatcggcatgaagggcgagcggagaagaggcaagggccacgatggcctgtaccagggcctgagcaccgccaccaaggacacctatgacgccctgcacatgcaggccctgcctccaagaagggccaagcgatctggatctggagcaacaaacttctcactactcaaacaagcaggtgacgtggaggagaatcccgggcctactagtatggactggatttggcgcatccttttccttgtcggcgctgctaccggcgcgcattccttcgaagatattgtgatgacccagagccagaaattcatgagcaccagcgtgggcgacagagtgtccgtgacatgtaaagccagccagaacgtgggctctcacgtcggctggtatcagcagaagtctggacagagccccaaggcactgatctacagcgccagcaatcggtacatcggcgtgcccgatagattcaccggctctggcagcggcaccgatttcaccctgaccatcagcaacgtgcagtccgaggacctggccgagtatttctgccagcagtaccacatctacccctacacctttggaggcggcacccggctggaaatcaagagaacagtggctgccacgcgtatccagaaccctgatcctgccgtgtaccagctgcgggatagcaagagcagcgacaagagcgtgtgtctgttcaccgacttcgacagccagaccaacgtgtcccagagcaaggactccgacgtgtacatcaccgataagaccgtgctggacatgcggagcatggacttcaagagcaactccgccgtggcctggtccaacaagtccgatttcgcctgcgccaacgccttcaacaacagcattatccccgaggacacattcttcccaagccccgagagcagctgcggtaccatcactcaaggtttggcagtgtcaaccatctcatcattctttccacctggctaccaagtgtccttctgcctggtcatggtgctgctgttcgccgtggataccggcctgtacttcagcgtcaagaccaacatccggtccagcaccagagactggaaggaccacaagttcaagtggcggaaggaccctcaggacaagagggccaagcgatctggatctggagcaacaaacttctcactactcaaacaagcaggtgacgtggaggagaatcccgggccttctagaggccatatgaccgagtacaagcccacggtgcgcctcgccacccgcgacgacgtccccagggccgtacgcaccctcgccgccgcgttcgccgactaccccgccacgcgccacaccgtcgatccggaccgccacatcgagcgggtcaccgagctgcaagaactcttcctcacgcgcgtcgggctcgacatcggcaaggtgtgggtcgcggacgacggcgccgcggtggcggtctggaccacgccggagagcgtcgaagcgggggcggtgttcgccgagatcggcccgcgcatggccgagttgagcggttcccggctggccgcgcagcaacagatggaaggcctcctggcgccgcaccggcccaaggagcccgcgtggttcctggccaccgtcggcgtctcgcccgaccaccagggcaagggtctgggcagcgccgtcgtgctccccggagtggaggcggccgagcgcgccggggtgcccgccttcctggagacctccgcgccccgcaacctccccttctacgagcggctcggcttcaccgtcaccgccgacgtcgaggtgcccgaaggaccgcgcacctggtgcatgacccgcaagcccggtgcctga

SEQ ID NO: 32695 - DNA, 2142 bp, synthetic construct
  source 1..2142: mol_type = other DNA
atggccttaccagtgaccgccttgctcctgccgctggccttgctgctccacgccgccaggccggaggttcagctgcttgagacaggcggaggactggttcaacctggcggaagcagaggactgagctgtgaaggcagcggctttaccttcagcggcttctggatgagctgggtccgacagacacctggcaagaccctggaatggatcggcgacatcaatagcgacggcagcagcatcaactacgcccctagcatcaaggacaggttcaccatcttccgggacaacgacaagagcatcctgtacctccagatgaccaacgtgcggagcgaggacaccggcacctacttttgtgtgaccacctacggcgactactggggccagggaacaaccctgacagtgtctagtgcttctctcgaggacctgaagaacgtgttcccacctgaggtggccgtgttcgagcctagcgaggccgagatcagccacacccagaaagccaccctcgtgtgcctggctaccggcttctaccccgaccatgtggaactgtcttggtgggtcaacggcaaagaggtgcacagcggcgtgtctaccgacccccagccactgaaagaacagcccgccctgaacgacagccggtactgcctgagcagcagactgagagtgtccgccaccttctggcagaacccccggaaccacttcagatgccaggtgcagttctacggcctgagcgagaacgacgagtggacccaggacagagccaagcccgtgacccagatcgtgtctgccgaagcctggggcagagccgattgcggatcccagagcttcggcctgctggaccccaagctgtgctacctgctggatggcatcctgttcatctacggcgtgatcctgaccgccctgttcctgagagtgaagttcagcagaagcgccgacgcccctgcctaccagcagggacagaaccaactgtacaacgagctgaacctgggcagacgggaagagtacgacgtgctggacaagcggagaggcagggaccctgagatgggcggaaagccccggagaaagaacccccaggaaggactgtataacgaactccagaaagacaagatggccgaagcctacagcgagatcggcatgaagggcgagcggagaagaggcaagggccacgatggcctgtaccagggcctgagcaccgccaccaaggacacctatgacgccctgcacatgcaggccctgcctccaagaagggccaagcgatctggatctggagcaacaaacttctcactactcaaacaagcaggtgacgtggaggagaatcccgggcctactagtatggactggatttggcgcatccttttccttgtcggcgctgctaccggcgcgcattccttcgaagatattgtgatgacccagagccagaaattcatgagcaccagcgtgggcgacagagtgtccgtgacatgtaaagccagccagaacgtgggctctcacgtcggctggtatcagcagaagtctggacagagccccaaggcactgatctacagcgccagcaatcggtacatcggcgtgcccgatagattcaccggctctggcagcggcaccgatttcaccctgaccatcagcaacgtgcagtccgaggacctggccgagtatttctgccagcagtaccacatctacccctacacctttggaggcggcacccggctggaaatcaagagaacagtggctgccacgcgtatccagaaccctgatcctgccgtgtaccagctgtgggatagcaagagcagcgacaagagcgtgtgtctgttcaccgacttcgacagccagaccaacgtgtcccagagcaaggactccgacgtgtacatcaccgataagaccgtgctggacatgcggagcatggacttcaagagcaactccgccgtggcctggtccaacaagtccgatttcgcctgcgccaacgccttcaacaacagcattatccccgaggacacattcttcccaagccccgagagcagctgcggtaccattacccaaggactggctgtgcctacaatctctagcttctttccgcctggataccaagtctccttctgtcttgtgatggtcctcctgtttgctgtggacacaggactgtacttttccgtgtaa

SEQ ID NO: 32696 - DNA, 3072 bp, synthetic construct
  source 1..3072: mol_type = other DNA
atggccttaccagtgaccgccttgctcctgccgctggccttgctgctccacgccgccaggccggaggttcagctgcttgagacaggcggaggactggttcaacctggcggaagcagaggactgagctgtgaaggcagcggctttaccttcagcggcttctggatgagctgggtccgacagacacctggcaagaccctggaatggatcggcgacatcaatagcgacggcagcagcatcaactacgcccctagcatcaaggacaggttcaccatcttccgggacaacgacaagagcatcctgtacctccagatgaccaacgtgcggagcgaggacaccggcacctacttttgtgtgaccacctacggcgactactggggccagggaacaaccctgacagtgtctagtgcttctctcgaggacctgaagaacgtgttcccacctgaggtggccgtgttcgagcctagcgaggccgagatcagccacacccagaaagccaccctcgtgtgcctggctaccggcttctaccccgaccatgtggaactgtcttggtgggtcaacggcaaagaggtgcacagcggcgtgtctaccgacccccagccactgaaagaacagcccgccctgaacgacagccggtactgcctgagcagcagactgagagtgtccgccaccttctggcagaacccccggaaccacttcagatgccaggtgcagttctacggcctgagcgagaacgacgagtggacccaggacagagccaagcccgtgacccagatcgtgtctgccgaagcctggggcagagccgattgcggatcccagagcttcggcctgctggaccccaagctgtgctacctgctggatggcatcctgttcatctacggcgtgatcctgaccgccctgttcctgagagtgaagttcagcagaagcgccgacgcccctgcctaccagcagggacagaaccaactgtacaacgagctgaacctgggcagacgggaagagtacgacgtgctggacaagcggagaggcagggaccctgagatgggcggaaagccccggagaaagaacccccaggaaggactgtataacgaactccagaaagacaagatggccgaagcctacagcgagatcggcatgaagggcgagcggagaagaggcaagggccacgatggcctgtaccagggcctgagcaccgccaccaaggacacctatgacgccctgcacatgcaggccctgcctccaagaagggccaagcgatctggatctggagcaacaaacttctcactactcaaacaagcaggtgacgtggaggagaatcccgggcctactagtatggactggatttggcgcatccttttccttgtcggcgctgctaccggcgcgcattccttcgaagatattgtgatgacccagagccagaaattcatgagcaccagcgtgggcgacagagtgtccgtgacatgtaaagccagccagaacgtgggctctcacgtcggctggtatcagcagaagtctggacagagccccaaggcactgatctacagcgccagcaatcggtacatcggcgtgcccgatagattcaccggctctggcagcggcaccgatttcaccctgaccatcagcaacgtgcagtccgaggacctggccgagtatttctgccagcagtaccacatctacccctacacctttggaggcggcacccggctggaaatcaagagaacagtggctgccacgcgtatccagaaccctgatcctgccgtgtaccagctgcgggatagcaagagcagcgacaagagcgtgtgtctgttcaccgacttcgacagccagaccaacgtgtcccagagcaaggactccgacgtgtacatcaccgataagaccgtgctggacatgcggagcatggacttcaagagcaactccgccgtggcctggtccaacaagtccgatttcgcctgcgccaacgccttcaacaacagcattatccccgaggacacattcttcccaagccccgagagcagctgcggtaccatcactcaaggtttggcagtgtcaaccatctcatcattctttccacctggctaccaagtgtccttctgcctggtcatggtgctgctgttcgccgtggataccggcctgtacttcagcgtcaagaccaacatccggtccagcaccagagactggaaggaccacaagttcaagtggcggaaggaccctcaggacaagagggccaagcgatctggatctggagcaacaaacttctcactactcaaacaagcaggtgacgtggaggagaatcccgggccttctagaatggaatacgcctctgacgcttcactggaccccgaagccccgtggcctcccgcgccccgcgctcgcgcctgccgcgtactgccttgggccctggtcgcggggctgctgctgctgctgctgctcgctgccgcctgcgccgtcttcctcgcctgcccctgggccgtgtccggggctcgcgcctcgcccggctccgcggccagcccgagactccgcgagggtcccgagctttcgcccgacgatcccgccggcctcttggacctgcggcagggcatgtttgcgcagctggtggcccaaaatgttctgctgatcgatgggcccctgagctggtacagtgacccaggcctggcaggcgtgtccctgacggggggcctgagctacaaagaggacacgaaggagctggtggtggccaaggctggagtctactatgtcttctttcaactagagctgcggcgcgtggtggccggcgagggctcaggctccgtttcacttgcgctgcacctgcagccactgcgctctgctgctggggccgccgccctggctttgaccgtggacctgccacccgcctcctccgaggctcggaactcggccttcggtttccagggccgcttgctgcacctgagtgccggccagcgcctgggcgtccatcttcacactgaggccagggcacgccatgcctggcagcttacccagggcgccacagtcttgggactcttccgggtgacccccgaaatcccagccggactcccttcaccgaggtcggaacatatgtga

SEQ ID NO: 32697 - DNA, 3072 bp, synthetic construct; identical to SEQ ID NO: 32696
  source 1..3072: mol_type = other DNA

SEQ ID NO: 32698 - DNA, 2217 bp, synthetic construct
  source 1..2217: mol_type = other DNA
atggccttaccagtgaccgccttgctcctgccgctggccttgctgctccacgccgccaggccggaggttcagctgcttgagacaggcggaggactggttcaacctggcggaagcagaggactgagctgtgaaggcagcggctttaccttcagcggcttctggatgagctgggtccgacagacacctggcaagaccctggaatggatcggcgacatcaatagcgacggcagcagcatcaactacgcccctagcatcaaggacaggttcaccatcttccgggacaacgacaagagcatcctgtacctccagatgaccaacgtgcggagcgaggacaccggcacctacttttgtgtgaccacctacggcgactactggggccagggaacaaccctgacagtgtctagtgcttctctcgaggacctgaagaacgtgttcccacctgaggtggccgtgttcgagcctagcgaggccgagatcagccacacccagaaagccaccctcgtgtgcctggctaccggcttctaccccgaccatgtggaactgtcttggtgggtcaacggcaaagaggtgcacagcggcgtgtctaccgacccccagccactgaaagaacagcccgccctgaacgacagccggtactgcctgagcagcagactgagagtgtccgccaccttctggcagaacccccggaaccacttcagatgccaggtgcagttctacggcctgagcgagaacgacgagtggacccaggacagagccaagcccgtgacccagatcgtgtctgccgaagcctggggcagagccgattgcggatcccagagcttcggcctgctggaccccaagctgtgctacctgctggatggcatcctgttcatctacggcgtgatcctgaccgccctgttcctgagagtgaagttcagcagaagcgccgacgcccctgcctaccagcagggacagaaccaactgtacaacgagctgaacctgggcagacgggaagagtacgacgtgctggacaagcggagaggcagggaccctgagatgggcggaaagccccggagaaagaacccccaggaaggactgtataacgaactccagaaagacaagatggccgaagcctacagcgagatcggcatgaagggcgagcggagaagaggcaagggccacgatggcctgtaccagggcctgagcaccgccaccaaggacacctatgacgccctgcacatgcaggccctgcctccaagaagggccaagcgatctggatctggagcaacaaacttctcactactcaaacaagcaggtgacgtggaggagaatcccgggcctactagtatggactggatttggcgcatccttttccttgtcggcgctgctaccggcgcgcattccttcgaagatattgtgatgacccagagccagaaattcatgagcaccagcgtgggcgacagagtgtccgtgacatgtaaagccagccagaacgtgggctctcacgtcggctggtatcagcagaagtctggacagagccccaaggcactgatctacagcgccagcaatcggtacatcggcgtgcccgatagattcaccggctctggcagcggcaccgatttcaccctgaccatcagcaacgtgcagtccgaggacctggccgagtatttctgccagcagtaccacatctacccctacacctttggaggcggcacccggctggaaatcaagagaacagtggctgccacgcgtatccagaaccctgatcctgccgtgtaccagctgcgggatagcaagagcagcgacaagagcgtgtgtctgttcaccgacttcgacagccagaccaacgtgtcccagagcaaggactccgacgtgtacatcaccgataagaccgtgctggacatgcggagcatggacttcaagagcaactccgccgtggcctggtccaacaagtccgatttcgcctgcgccaacgccttcaacaacagcattatccccgaggacacattcttcccaagccccgagagcagctgcggtaccatcactcaaggtttggcagtgtcaaccatctcatcattctttccacctggctaccaagtgtccttctgcctggtcatggtgctgctgttcgccgtggataccggcctgtacttcagcgtcaagaccaacatccggtccagcaccagagactggaaggaccacaagttcaagtggcggaaggacccccaggacaagtaa

SEQ ID NO: 32699 - DNA, 2217 bp, synthetic construct; identical to SEQ ID NO: 32698
  source 1..2217: mol_type = other DNA

SEQ ID NO: 32700 - DNA, 2562 bp, synthetic construct
  source 1..2562: mol_type = other DNA
atggccttaccagtgaccgccttgctcctgccgctggccttgctgctccacgccgccaggccggagatcgtgctgacacagagccctggcacactgtcactgtctccaggcgaaagagccacactgagctgcaaagccagccagagcgtgtccatcagcggcatcaacctgatgaactggtatcagcagaagcccggccagcagccaagactgctgatctaccacgccagcatcctggcctctggcatccccgatagattttctggcagcggctccggcaccgacttcaccctgacaatcagcagactggaacccgaggacttcgccgtgtactactgccagcagaccagagagagccctctgacattcggccagggcacaagactggaaatcaaactcgaggacctgaagaacgtgttcccacctgaggtggccgtgttcgagcctagcgaggccgagatcagccacacccagaaagccaccctcgtgtgcctggctaccggcttctaccccgaccatgtggaactgtcttggtgggtcaacggcaaagaggtgcacagcggcgtgtgtaccgacccccagccactgaaagaacagcccgccctgaacgacagccggtactgcctgagcagcagactgagagtgtccgccaccttctggcagaacccccggaaccacttcagatgccaggtgcagttctacggcctgagcgagaacgacgagtggacccaggacagagccaagcccgtgacccagatcgtgtctgccgaagcctggggcagagccgattgcgacgtgaagctggtggaaaagagcttcgagacagacaccaacctgaacttccagaacctgagcgtgatcggcttcagaatcctgctgctgaaagtggccggctttaacctgctgatgaccctgcggctgtggtccagcagggccaagcgatctggatctggagcaacaaacttctcactactcaaacaagcaggtgacgtggaggagaatcccgggcctactagtatggactggatttggcgcatccttttccttgtcggcgctgctaccggcgcgcattccttcgaactgcaactgcttgaatcaggtggcggcctggttcagcctggcggatctctgagactgagctgtgccgccagcggcttcaccttctctaagtacgctatggcctgggtccgacaggcccctggaaaaggacttgagtgggtcgcctctatcagcacaggcggcgtgaacacctactacgccgacagcgtgaaggacagattcaccatcagccgggacaacgccaagaacaccctgtacctccagatgaacagcctgagagccgaggacacagccgtgtattattgcgccacacacaccggcgactacttcgactattggggccagggaacaatggtcaccgtgtcctctacgcgtatccagaaccctgatcctgccgtgtaccagctgcgggatagcaagagcagcgacaagagcgtgtgtctgttcaccgacttcgacagccagaccaacgtgtcccagagcaaggactccgacgtgtacatcaccgataagtgcgtgctggacatgcggagcatggacttcaagagcaactccgccgtggcctggtccaacaagtccgatttcgcctgcgccaacgccttcaacaacagcattatccccgaggacacattcttcccaagccccgagagcagctgcggctttaccagcgagagctaccagcagggcgtgctgagcgccaccatcctgtacgagatcctgctgggcaaggccaccctgtacgccgtgctggtgtctgccctggtgctgatggctatggtcaagcggaaggacagccggggacgcgccaagagaagcggatctggcgtgaagcagaccctgaatttcgacctgctgaagctggctggcgacgtggaatccaacccaggcccttctagaggccatatgaccgagtacaagcccacggtgcgcctcgccacccgcgacgacgtccccagggccgtacgcaccctcgccgccgcgttcgccgactaccccgccacgcgccacaccgtcgatccggaccgccacatcgagcgggtcaccgagctgcaagaactcttcctcacgcgcgtcgggctcgacatcggcaaggtgtgggtcgcggacgacggcgccgcggtggcggtctggaccacgccggagagcgtcgaagcgggggcggtgttcgccgagatcggcccgcgcatggccgagttgagcggttcccggctggccgcgcagcaacagatggaaggcctcctggcgccgcaccggcccaaggagcccgcgtggttcctggccaccgtcggcgtctcgcccgaccaccagggcaagggtctgggcagcgccgtcgtgctccccggagtggaggcggccgagcgcgccggggtgcccgccttcctggagacctccgcgccccgcaacctccccttctacgagcggctcggcttcaccgtcaccgccgacgtcgaggtgcccgaaggaccgcgcacctggtgcatgacccgcaagcccggtgcctga

SEQ ID NO: 32701 - DNA, 1917 bp, synthetic construct
  source 1..1917: mol_type = other DNA
atggactggatttggcgcatccttttccttgtcggcgctgctaccggcgcgcattccttcgaaggactcgaggacctgaagaacgtgttcccacctgaggtggccgtgttcgagcctagcgaggccgagatcagccacacccagaaagccaccctcgtgtgcctggctaccggcttctaccccgaccatgtggaactgtcttggtgggtcaacggcaaagaggtgcacagcggcgtgtgtaccgacccccagccactgaaagaacagcccgccctgaacgacagccggtactgcctgagcagcagactgagagtgtccgccaccttctggcagaacccccggaaccacttcagatgccaggtgcagttctacggcctgagcgagaacgacgagtggacccaggacagagccaagcccgtgacccagatcgtgtctgccgaagcctggggcagagccgattgcggctttaccagcgagagctaccagcagggcgtgctgagcgccaccatcctgtacgagatcctgctgggcaaggccaccctgtacgccgtgctggtgtctgccctggtgctgatggctatggtcaagcggaaggacagccggggaagggccaagcgatctggatctggagcaacaaacttctcactactcaaacaagcaggtgacgtggaggagaatcccgggcctactagcaccatggccttaccagtgaccgccttgctcctgccgctggccttgctgctccacgccgccaggccggagatcgtgctgacacagagccctggcacactgtcactgtctccaggcgaaagagccacactgagctgcaaagccagccagagcgtgtccatcagcggcatcaacctgatgaactggtatcagcagaagcccggccagcagccaagactgctgatctaccacgccagcatcctggcctctggcatccccgatagattttctggcagcggctccggcaccgacttcaccctgacaatcagcagactggaacccgaggacttcgccgtgtactactgccagcagaccagagagagccctctgacattcggccagggcacaagactggaaatcaaaggcggaggcggaagtggaggcggaggatctggcggcggaggctctgaactgcaactgcttgaatcaggtggcggcctggttcagcctggcggatctctgagactgagctgtgccgccagcggcttcaccttctctaagtacgctatggcctgggtccgacaggcccctggaaaaggacttgagtgggtcgcctctatcagcacaggcggcgtgaacacctactacgccgacagcgtgaaggacagattcaccatcagccgggacaacgccaagaacaccctgtacctccagatgaacagcctgagagccgaggacacagccgtgtattattgcgccacacacaccggcgactacttcgactattggggccagggaacaatggtcaccgtgtcctctacgcgtatccagaaccctgatcctgccgtgtaccagctgcgggatagcaagagcagcgacaagagcgtgtgtctgttcaccgacttcgacagccagaccaacgtgtcccagagcaaggactccgacgtgtacatcaccgataagtgcgtgctggacatgcggagcatggacttcaagagcaactccgccgtggcctggtccaacaagtccgatttcgcctgcgccaacgccttcaacaacagcattatccccgaggacacattcttcccaagccccgagagcagctgcgacgtgaagctggtggaaaagagcttcgagacagacaccaacctgaacttccagaacctgagcgtgatcggcttcagaatcctgctgctgaaagtggccggctttaacctgctgatgaccctgcggctgtggtccagctaa

SEQ ID NO: 32702 - DNA, 2883 bp, synthetic construct
  source 1..2883: mol_type = other DNA
atggccttaccagtgaccgccttgctcctgccgctggccttgctgctccacgccgccaggccggagatcgtgctgacacagtctcccgccacactgtcactgtctccaggcgaaagagccacactgagctgtagagccagccagagcgtgtcctcttacctggcctggtatcagcagaagcctggacaggctccccggctgctgatctacgatgccagcaatagagccacaggcatccccgccagattttctggctctggcagcggcaccgatttcaccctgaccataagcagcctggaacctgaggacttcgccgtgtactactgccagcagagaagcaactggcctcctacattcggccagggcaccaaggtggaaatcaaactcgaggacctgaagaacgtgttcccacctgaggtggccgtgttcgagcctagcgaggccgagatcagccacacccagaaagccaccctcgtgtgcctggctaccggcttctaccccgaccatgtggaactgtcttggtgggtcaacggcaaagaggtgcacagcggcgtgtctaccgacccccagccactgaaagaacagcccgccctgaacgacagccggtactgcctgagcagcagactgagagtgtccgccaccttctggcagaacccccggaaccacttcagatgccaggtgcagttctacggcctgagcgagaacgacgagtggacccaggacagagccaagcccgtgacccagatcgtgtctgccgaagcctggggcagagccgattgcggatcccagagcttcggcctgctggaccccaagctgtgctacctgctggatggcatcctgttcatctacggcgtgatcctgaccgccctgttcctgagagtgaagttcagcagaagcgccgacgcccctgcctaccagcagggacagaaccaactgtacaacgagctgaacctgggcagacgggaagagtacgacgtgctggacaagcggagaggcagggaccctgagatgggcggaaagccccagcggagaaagaacccccaggaaggactgtataacgaactccagaaagacaagatggccgaagcctacagcgagatcggcatgaagggcgagcggagaagaggcaagggccacgatggcctgtaccagggcctgagcaccgccaccaaggacacctatgacgccctgcacatgcaggccctgcctccaagaagggccaagcgatctggatctggagcaacaaacttctcactactcaaacaagcaggtgacgtggaggagaatcccgggcctactagtgccaccatggactggatttggcgcatccttttccttgtcggcgctgctaccggcgcccattccgggcccgaagtgcaactggttgaatccggtggcggcctggtgcaagcaggcggatctctcagacttagctgtgccgcctccggcagaaccttcacaatgggatggtttaggcaggctccagggaaagagagagagttcgtcgccgccatctctctgtctcccacactggcctactacgccgactctgtgaaaggccggttcaccatctccagagataatgccaagaacaccgtggtgctgcaaatgaactctctgaaacccgaggatacagccctgtactattgtgccgctgaccggaagtccgtgatgagcatcagacccgattactggggacagggcacacaagtcacagtgtcctctggatccggcggcggaggatctggcggaggcggatctgggggcggaggctctttcgaacaactccagctgcaagagtctggccccggactggtcaagcctagcgaaacactgagcctgacctgtaccgtgtctggcggcagcatcagcagcagctcttattggtggggctggaccagacagcctcctggcagaggactggaatggatcggcaccatgtactacagcggcaacatctactacaaccccagcctccagagccgggccaccatctctgtggacaccagcaagaaccagttcagcctgaagctgagcagcgtgacagccgccgataccgccgtgtattattgcgccagacatgtgggctacagctacggcagacggttctggtacttcgacctgtggggcagaggcaccctggtcacagtttcttctacgcgtatccagaaccctgatcctgccgtgtaccagctgcgggatagcaagagcagcgacaagagcgtgtgtctgttcaccgacttcgacagccagaccaacgtgtcccagagcaaggactccgacgtgtacatcaccgataagaccgtgctggacatgcggagcatggacttcaagagcaactccgccgtggcctggtccaacaagtccgatttcgcctgcgccaacgccttcaacaacagcattatccccgaggacacattcttcccaagccccgagagcagctgcggtacccagagttttgggttgttggaccctaaattgtgctatctgttggacggaatcctgttcatttacggagtgatcctgaccgcattgttcctgcgggttaagttttccagatccgcagacgcacccgcttaccaacaagggcagaaccaactctacaatgaacttaatttggggcggagggaagagtacgacgttctggacaaaaggaggggacgagatcccgagatgggcggaaagcctcagcgaaggaagaatccgcaagaggggctttataacgaactccagaaagataaaatggcagaagcctatagtgagattgggatgaagggagaaaggaggaggggtaaaggtcacgatgggttgtaccaaggattgagcacagccactaaagatacctatgatgcgctccacatgcaggccctgccgccaagataa

SEQ ID NO: 32703 - DNA, 1932 bp, synthetic construct
  source 1..1932: mol_type = other DNA
atggccttaccagtgaccgccttgctcctgccgctggccttgctgctccacgccgccaggccgctcgagatccagaaccctgatcctgccgtgtaccagctgcgggatagcaagagcagcgacaagagcgtgtgtctgttcaccgacttcgacagccagaccaacgtgtcccagagcaaggactccgacgtgtacatcaccgataagtgcgtgctggacatgcggagcatggacttcaagagcaactccgccgtggcctggtccaacaagtccgatttcgcctgcgccaacgccttcaacaacagcattatccccgaggacacattcttcccaagccccgagagcagctgcgacgtgaagctggtggaaaagagcttcgagacagacaccaacctgaacttccagaacctgagcgtgatcggcttcagaatcctgctgctgaaagtggccggctttaacctgctgatgaccctgcggctgtggtccagctctagtcgcgccaagagaagcggatctggcgtgaagcagaccctgaatttcgacctgctgaagctggctggcgacgtggaatccaacccaggccctactagtatggactggatttggcgcatccttttccttgtcggcgctgctaccggcgcgcattccttcgaagacatccagatgacacagagccctagcagcctgtctgccagcgtgggagacagagtgaccatcacctgtagagccagccaggacgtgaacacagccgtggcttggtatcagcagaagcctggcaaggcccctaagctgctgatctacagcgccagctttctgtacagcggcgtgcccagcagattcagcggaagcagaagcggcaccgacttcaccctgacaatatccagcctccagcctgaggacttcgccacctactactgccagcagcactacaccacacctccaacattcggccagggcaccaaggtggaaatcaagagaacaggcggaggcggaagtggaggcggaggatctggcggcggaggctctgaagtgcagctggttgaatcaggtggcggcctggttcaacctggcggatctctgagactgagctgtgccgccagcggcttcaacatcaaggacacctacatccactgggtccgacaggcccctggcaaaggacttgaatgggtcgccagaatctaccccaccaacggctacaccagatacgccgactctgtgaagggcagattcaccatcagcgccgacaccagcaagaacaccgcctacctccagatgaactccctgagagccgaggacaccgccgtgtactactgtagcagatggggcggctggggcttctacgctatggattattggggccagggaaccctggtcaccgtgtcatctacgcgtgaggacctgaagaacgtgttcccacctgaggtggccgtgttcgagcctagcgaggccgagatcagccacacccagaaagccaccctcgtgtgcctggctaccggcttctaccccgaccatgtggaactgtcttggtgggtcaacggcaaagaggtgcacagcggcgtgtgtaccgacccccagccactgaaagaacagcccgccctgaacgacagccggtactgcctgagcagcagactgagagtgtccgccaccttctggcagaacccccggaaccacttcagatgccaggtgcagttctacggcctgagcgagaacgacgagtggacccaggacagagccaagcccgtgacccagatcgtgtctgccgaagcctggggcagagccgattgcggctttaccagcgagagctaccagcagggcgtgctgagcgccaccatcctgtacgagatcctgctgggcaaggccaccctgtacgccgtgctggtgtctgccctggtgctgatggctatggtcaagcggaaggacagccggggataa

SEQ ID NO: 32704 - DNA, 1914 bp, synthetic construct
  source 1..1914: mol_type = other DNA
atggccttaccagtgaccgccttgctcctgccgctggccttgctgctccacgccgccaggccgctcgaggacctgaagaacgtgttcccacctgaggtggccgtgttcgagcctagcgaggccgagatcagccacacccagaaagccaccctcgtgtgcctggctaccggcttctaccccgaccatgtggaactgtcttggtgggtcaacggcaaagaggtgcacagcggcgtgtgtaccgacccccagccactgaaagaacagcccgccctgaacgacagccggtactgcctgagcagcagactgagagtgtccgccaccttctggcagaacccccggaaccacttcagatgccaggtgcagttctacggcctgagcgagaacgacgagtggacccaggacagagccaagcccgtgacccagatcgtgtctgccgaagcctggggcagagccgattgcgacgtgaagctggtggaaaagagcttcgagacagacaccaacctgaacttccagaacctgagcgtgatcggcttcagaatcctgctgctgaaagtggccggctttaacctgctgatgaccctgcggctgtggtccagcagggccaagcgatctggatctggagcaacaaacttctcactactcaaacaagcaggtgacgtggaggagaatcccgggcctactagtatggactggatttggcgcatccttttccttgtcggcgctgctaccggcgcgcattccttcgaagacatccagatgacacagagccctagcagcctgtctgccagcgtgggagacagagtgaccatcacctgtagagccagccaggacgtgaacacagccgtggcttggtatcagcagaagcctggcaaggcccctaagctgctgatctacagcgccagctttctgtacagcggcgtgcccagcagattcagcggaagcagaagcggcaccgacttcaccctgacaatatccagcctccagcctgaggacttcgccacctactactgccagcagcactacaccacacctccaacattcggccagggcaccaaggtggaaatcaagagaacaggcggaggcggaagtggaggcggaggatctggcggcggaggctctgaagtgcagctggttgaatcaggtggcggcctggttcaacctggcggatctctgagactgagctgtgccgccagcggcttcaacatcaaggacacctacatccactgggtccgacaggcccctggcaaaggacttgaatgggtcgccagaatctaccccaccaacggctacaccagatacgccgactctgtgaagggcagattcaccatcagcgccgacaccagcaagaacaccgcctacctccagatgaactccctgagagccgaggacaccgccgtgtactactgtagcagatggggcggctggggcttctacgctatggattattggggccagggaaccctggtcaccgtgtcatctacgcgtatccagaaccctgatcctgccgtgtaccagctgcgggatagcaagagcagcgacaagagcgtgtgtctgttcaccgacttcgacagccagaccaacgtgtcccagagcaaggactccgacgtgtacatcaccgataagtgcgtgctggacatgcggagcatggacttcaagagcaactccgccgtggcctggtccaacaagtccgatttcgcctgcgccaacgccttcaacaacagcattatccccgaggacacattcttcccaagccccgagagcagctgcggctttaccagcgagagctaccagcagggcgtgctgagcgccaccatcctgtacgagatcctgctgggcaaggccaccctgtacgccgtgctggtgtctgccctggtgctgatggctatggtcaagcggaaggacagccggggataa

SEQ ID NO: 32705 - DNA, 1875 bp, synthetic construct
  source 1..1875: mol_type = other DNA
atggccttaccagtgaccgccttgctcctgccgctggccttgctgctccacgccgccaggccgcaagttcagctggttcagtctggccccgaagtgaagaaacctggggcctctgtgaaggtgtcctgcaaggcttccggctacacctttaccagctaccacatccagtgggtccgacaggctcctggacaaggactggaatggatcggctggatctatcctggcgacggcagcacccagtacaacgagaagttcaagggcagagtgaccatcaccgccgacaagagcacaagcaccgcctacatggaactgagcagcctgaccagcgaggacacagccgtgtattattgcgccagagagggcacctactacgctatggattattggggccagggcaccagcgtgaccgtttcttctctcgaggacctgaagaacgtgttcccacctgaggtggccgtgttcgagcctagcgaggccgagatcagccacacccagaaagccaccctcgtgtgcctggctaccggcttctaccccgaccatgtggaactgtcttggtgggtcaacggcaaagaggtgcacagcggcgtgtgtaccgacccccagccactgaaagaacagcccgccctgaacgacagccggtactgcctgagcagcagactgagagtgtccgccaccttctggcagaacccccggaaccacttcagatgccaggtgcagttctacggcctgagcgagaacgacgagtggacccaggacagagccaagcccgtgacccagatcgtgtctgccgaagcctggggcagagccgattgcggctttaccagcgagagctaccagcagggcgtgctgagcgccaccatcctgtacgagatcctgctgggcaaggccaccctgtacgccgtgctggtgtctgccctggtgctgatggctatggtcaagcggaaggacagccggggaagggccaagcgatctggatctggagcaacaaacttctcactactcaaacaagcaggtgacgtggaggagaatcccgggcctactagtatggactggatttggcgcatccttttccttgtcggcgctgctaccggcgcgcattccttcgaagacatcgtgatgacacagagccccgccacactgagtgtgtctccaggcgagagagccaccatcagctgtagaagcagccagagcatcgtgcacagcaacggcaacacctacctggaatggtatcagcagaagcccggacaggcccctagactgctgatctacaaggtgtccaacagattcagcggcatccccgacagattttccggctctggcagcggcaccgatttcaccctgaccatcagcagactggaacccgaggacttcgccgtgtactactgcttccaaggcagccacgtgccaagaacctttggcggaggcaccaagctggaaatcaagagaacgcgtatccagaaccctgatcctgccgtgtaccagctgcgggatagcaagagcagcgacaagagcgtgtgtctgttcaccgacttcgacagccagaccaacgtgtcccagagcaaggactccgacgtgtacatcaccgataagtgcgtgctggacatgcggagcatggacttcaagagcaactccgccgtggcctggtccaacaagtccgatttcgcctgcgccaacgccttcaacaacagcattatccccgaggacacattcttcccaagccccgagagcagctgcgacgtgaagctggtggaaaagagcttcgagacagacaccaacctgaacttccagaacctgagcgtgatcggcttcagaatcctgctgctgaaagtggccggctttaacctgctgatgaccctgcggctgtggtccagctaa

SEQ ID NO: 32706 - DNA, 1875 bp, synthetic construct; identical to SEQ ID NO: 32705
  source 1..1875: mol_type = other DNA

SEQ ID NO: 32707 - DNA, 2151 bp, synthetic construct
  source 1..2151: mol_type = other DNA
atggccttaccagtgaccgccttgctcctgccgctggccttgctgctccacgccgccaggccgcaagttcagctggttcagtctggccccgaagtgaagaaacctggggcctctgtgaaggtgtcctgcaaggcttccggctacacctttaccagctaccacatccagtgggtccgacaggctcctggacaaggactggaatggatcggctggatctatcctggcgacggcagcacccagtacaacgagaagttcaagggcagagtgaccatcaccgccgacaagagcacaagcaccgcctacatggaactgagcagcctgaccagcgaggacacagccgtgtattattgcgccagagagggcacctactacgctatggattattggggccagggcaccagcgtgaccgtttcttctggcggaggcggaggatctggtggcggaggaagcggtggcggcggttctgacatcgtgatgacacagagccccgccacactgagtgtgtctccaggcgagagagccaccatcagctgtagaagcagccagagcatcgtgcacagcaacggcaacacctacctggaatggtatcagcagaagcccggacaggcccctagactgctgatctacaaggtgtccaacagattcagcggcatccccgacagattttccggctctggcagcggcaccgatttcaccctgaccatcagcagactggaacccgaggacttcgccgtgtactactgcttccaaggcagccacgtgccaagaacctttggcggaggcaccaagctggaaatcaagagaacgcgtaccacgacgccagcgccgcgaccaccaacaccggcgcccaccatcgcgtcgcagcccctgtccctgcgcccagaggcgtgccggccagcggcggggggcgcagtgcacacgagggggctggacttcgcctgtgacatctacatctgggcgcccttggccgggacttgtggggtccttctcctgtcactggttatcaccctttactgcaaacggggcagaaagaaactcctgtatatattcaaacaaccatttatgagaccagtacaaactactcaagaggaagatggctgtagctgccgatttccagaagaagaagaaggaggatgtgaactgagagtgaagttcagcaggagcgcagacgcccccgcgtaccagcagggccagaaccagctctataacgagctgaatctaggacgaagagaggagtacgatgttttggacaagagacgtggccgggaccctgagatggggggaaagccgagaaggaagaaccctcaggaaggcctgtacaatgaactgcagaaagataagatggcggaggcctacagtgagattgggatgaaaggcgagcgccggaggggcaaggggcacgatggcctttaccagggtctcagtacagccaccaaggacacctacgacgcccttcacatgcaggccctgccccctcgctctagtggctccggcgagggcagaggaagtctactaacctgcggagatgtggaagaaaatcctggcccacatatgaccgagtacaagcccacggtgcgcctcgccacccgcgacgacgtccccagggccgtacgcaccctcgccgccgcgttcgccgactaccccgccacgcgccacaccgtcgatccggaccgccacatcgagcgggtcaccgagctgcaagaactcttcctcacgcgcgtcgggctcgacatcggcaaggtgtgggtcgcggacgacggcgccgcggtggcggtctggaccacgccggagagcgtcgaagcgggggcggtgttcgccgagatcggcccgcgcatggccgagttgagcggttcccggctggccgcgcagcaacagatggaaggcctcctggcgccgcaccggcccaaggagcccgcgtggttcctggccaccgtcggcgtctcgcccgaccaccagggcaagggtctgggcagcgccgtcgtgctccccggagtggaggcggccgagcgcgccggggtgcccgccttcctggagacctccgcgccccgcaacctccccttctacgagcggctcggcttcaccgtcaccgccgacgtcgaggtgcccgaaggaccgcgcacctggtgcatgacccgcaagcccggtgcctga

SEQ ID NO: 32708 - DNA, 2151 bp, synthetic construct; identical to SEQ ID NO: 32707
  source 1..2151: mol_type = other DNA

SEQ ID NO: 32709 - DNA, 1905 bp, synthetic construct
  source 1..1905: mol_type = other DNA
atggccttaccagtgaccgccttgctcctgccgctggccttgctgctccacgccgccaggccgctcgaggacctgaagaacgtgttcccacctgaggtggccgtgttcgagcctagcgaggccgagatcagccacacccagaaagccaccctcgtgtgcctggctaccggcttctaccccgaccatgtggaactgtcttggtgggtcaacggcaaagaggtgcacagcggcgtgtgtaccgacccccagccactgaaagaacagcccgccctgaacgacagccggtactgcctgagcagcagactgagagtgtccgccaccttctggcagaacccccggaaccacttcagatgccaggtgcagttctacggcctgagcgagaacgacgagtggacccaggacagagccaagcccgtgacccagatcgtgtctgccgaagcctggggcagagccgattgcgacgtgaagctggtggaaaagagcttcgagacagacaccaacctgaacttccagaacctgagcgtgatcggcttcagaatcctgctgctgaaagtggccggctttaacctgctgatgaccctgcggctgtggtccagcagggccaagcgatctggatctggagcaacaaacttctcactactcaaacaagcaggtgacgtggaggagaatcccgggcctactagcaccatggccttaccagtgaccgccttgctcctgccgctggccttgctgctccacgccgccaggccggacatccagatgacccagagccccagcagcctgtctgccagcgtgggcgacagagtgaccatcacctgtaccgccagcctgagcgtgtccagcacctacctgcactggtatcagcagaagcccggcagcagccccaagctgtggatctacagcaccagcaacctggcctccggcgtgcccagcagattttctggcagcggctctggcaccagctacaccctgaccatcagctccctccagcccgaggacttcgccacctactactgccaccagtaccacagaagccccctgacctttggcggaggcaccaaggtggaaatcaagagaggcggaggcggaagtggaggcggaggatctggcggcggaggctctgaagtgcaactggtggaatctggcggcggactggtgcagcctggcggatctctgagactgagctgtgccgccagcggcttcagcctgaccaaatacggcgtgcactgggtgcgccaggcccctggaaaaggactggaatgggtgggagtgaagtgggctggcggctccaccgactacaacagcgccctgatgagccggttcaccatcagcaaggacaacgccaagaacagcctgtacctccagatgaactccctgcgggccgaggacaccgccgtgtactactgtgccagagatcaccgggacgctatggactactggggccagggaacactcgtgaccgtgtcctctacgcgtatccagaaccctgatcctgccgtgtaccagctgcgggatagcaagagcagcgacaagagcgtgtgtctgttcaccgacttcgacagccagaccaacgtgtcccagagcaaggactccgacgtgtacatcaccgataagtgcgtgctggacatgcggagcatggacttcaagagcaactccgccgtggcctggtccaacaagtccgatttcgcctgcgccaacgccttcaacaacagcattatccccgaggacacattcttcccaagccccgagagcagctgcggctttaccagcgagagctaccagcagggcgtgctgagcgccaccatcctgtacgagatcctgctgggcaaggccaccctgtacgccgtgctggtgtctgccctggtgctgatggctatggtcaagcggaaggacagccggggataa

SEQ ID NO: 32710 - DNA, 1917 bp, synthetic construct
  source 1..1917: mol_type = other DNA
atggccttaccagtgaccgccttgctcctgccgctggccttgctgctccacgccgccaggccgctcgaggacctgaagaacgtgttcccacctgaggtggccgtgttcgagcctagcgaggccgagatcagccacacccagaaagccaccctcgtgtgcctggctaccggcttctaccccgaccatgtggaactgtcttggtgggtcaacggcaaagaggtgcacagcggcgtgtgtaccgacccccagccactgaaagaacagcccgccctgaacgacagccggtactgcctgagcagcagactgagagtgtccgccaccttctggcagaacccccggaaccacttcagatgccaggtgcagttctacggcctgagcgagaacgacgagtggacccaggacagagccaagcccgtgacccagatcgtgtctgccgaagcctggggcagagccgattgcgacgtgaagctggtggaaaagagcttcgagacagacaccaacctgaacttccagaacctgagcgtgatcggcttcagaatcctgctgctgaaagtggccggctttaacctgctgatgaccctgcggctgtggtccagcagggccaagcgatctggatctggagcaacaaacttctcactactcaaacaagcaggtgacgtggaggagaatcccgggcctactagcaccatggccttaccagtgaccgccttgctcctgccgctggccttgctgctccacgccgccaggccggacatccagatgacccagagccccagcagcctgtctgccagcgtgggcgacagagtgaccatcacatgcaaggccagccaggacgtgggaacagccgtggcctggtatcagcagaagcctggcaaggcccccaagctgctgatctacagcgccagctacagatccaccggcgtgcccagcagattttccggctctggcagcggcaccgacttcaccctgaccatctctagcctccagcccgaggacttcgccacctactactgccagcaccactactccgccccctggacatttggcggaggcaccaaggtggaaatcaagggcggaggcggaagtggaggcggaggatctggcggcggaggctctgaagtgcaactggtggaatcaggcggcggactggtgcagcctggcggatctctgagactgagctgtgccgccagcggcttcaccttcagcagaaacggcatgagctgggtgcgccaggcccctggaaaaggactggaatgggtggcaaccgtgtccagcggcggcagctacatctactacgccgacagcgtgaagggccggttcaccatctccagagacaacgccaagaacagcctgtacctccagatgaactccctgcgggccgaggacaccgccgtgtactattgtgccagacagggcaccaccgccctggctaccagattcttcgatgtgtggggccagggcaccctcgtgaccgtgtcatctacgcgtatccagaaccctgatcctgccgtgtaccagctgcgggatagcaagagcagcgacaagagcgtgtgtctgttcaccgacttcgacagccagaccaacgtgtcccagagcaaggactccgacgtgtacatcaccgataagtgcgtgctggacatgcggagcatggacttcaagagcaactccgccgtggcctggtccaacaagtccgatttcgcctgcgccaacgccttcaacaacagcattatccccgaggacacattcttcccaagccccgagagcagctgcggctttaccagcgagagctaccagcagggcgtgctgagcgccaccatcctgtacgagatcctgctgggcaaggccaccctgtacgccgtgctggtgtctgccctggtgctgatggctatggtcaagcggaaggacagccggggataa

SEQ ID NO: 32711 - DNA, 1920 bp, synthetic construct
  source 1..1920: mol_type = other DNA
atggactggatttggcgcatccttttccttgtcggcgctgctaccggcgcgcattccttcgaaggactcgaggacctgaagaacgtgttcccacctgaggtggccgtgttcgagcctagcgaggccgagatcagccacacccagaaagccaccctcgtgtgcctggctaccggcttctaccccgaccatgtggaactgtcttggtgggtcaacggcaaagaggtgcacagcggcgtgtgtaccgacccccagccactgaaagaacagcccgccctgaacgacagccggtactgcctgagcagcagactgagagtgtccgccaccttctggcagaacccccggaaccacttcagatgccaggtgcagttctacggcctgagcgagaacgacgagtggacccaggacagagccaagcccgtgacccagatcgtgtctgccgaagcctggggcagagccgattgcggctttaccagcgagagctaccagcagggcgtgctgagcgccaccatcctgtacgagatcctgctgggcaaggccaccctgtacgccgtgctggtgtctgccctggtgctgatggctatggtcaagcggaaggacagccggggaagggccaagcgatctggatctggagcaacaaacttctcactactcaaacaagcaggtgacgtggaggagaatcccgggcctactagcaccatggccttaccagtgaccgccttgctcctgccgctggccttgctgctccacgccgccaggccggacatccagatgacacagagccctagcagcctgtctgccagcgtgggagacagagtgaccatcacctgtagagccagccaggatgtgggaacagccgtggcttggtatcagcagatccctggcaaggcccctaagctgctgatctacagcgccagctatagaagcaccggcgtgcccgatagattttccggctctggcagcggcaccgacttcagctttattatcagcagcctccagcctgaggacttcgccacctactactgccagcaccactactctgccccttggacatttggcggaggcaccaaggtggaaatcaaaggcggaggcggaagtggaggcggaggatctggcggcggaggctctgaagtgcagctggttgagtctggtggcggactggttcaacctggcggaagcctgagactgtcttgtgccgccagcggcttcaccttcagcagaaatggcatgagctgggtccgacagacccctgacaagagactggaatgggtcgccacagtgtctagcggcggcagctacatctactacgccgacagcgtgaaggacagattcaccatctccagagacaacgccaagaacagcctgtacctccagatgagcagcctgagagccgaggataccgccgtgtactactgtgccagacagggcacaacagccctggctaccagattcttcgatgtgtggggccagggcaccctggttacagtctcttctacgcgtatccagaaccctgatcctgccgtgtaccagctgcgggatagcaagagcagcgacaagagcgtgtgtctgttcaccgacttcgacagccagaccaacgtgtcccagagcaaggactccgacgtgtacatcaccgataagtgcgtgctggacatgcggagcatggacttcaagagcaactccgccgtggcctggtccaacaagtccgatttcgcctgcgccaacgccttcaacaacagcattatccccgaggacacattcttcccaagccccgagagcagctgcgacgtgaagctggtggaaaagagcttcgagacagacaccaacctgaacttccagaacctgagcgtgatcggcttcagaatcctgctgctgaaagtggccggctttaacctgctgatgaccctgcggctgtggtccagctaa

SEQ ID NO: 32712 - DNA, 2157 bp, synthetic construct
  source 1..2157: mol_type = other DNA
atggccctgcctgtgacagctctgctgctgcctctggcactgctgctgcacgccgccagacctgacatccagatgacacagagccctagcagcctgtctgccagcgtgggagacagagtgaccattacctgtcaggccagcgagaatatctacagcttcctggcctggtatcagcagaagcctggcaaggcccctaagctgctgatctacagcgcctctaaactggccgctggcgtgccaagcagattttctggctctggcagcggcaccgacttcaccctgacaatatctagcctccagcctgaggacttcgccacctactactgccagcagaccaacagatacagcaaccccgacatctacaacgtgttcggccagggcaccaagctgacagttcttggcggaggcggaggatctggtggcggaggaagcggtggcggcggttctgaagttcagctggttgaatctggcggcggactggttcaacctggcggatctctgagactgagctgtgccgcctctggcatcgacttcaacagcaactactacatgtgctgggtccgacaggccccaggcaaaggactggaatggatcggctgtatctacgtgggcagccacgtgaacacctattacgccaactgggccaagggcagattcaccatcagccgggacaacagcaagaacaccgtgtacctccagatgaactccctgagagccgaggacaccgccgtgtactactgtgccacatctggcagcagcgtgctgtacttcaagttctggggccagggaaccctggtcaccgtttcttctacgcgtaccacgacgccagcgccgcgaccaccaacaccggcgcccaccatcgcgtcgcagcccctgtccctgcgcccagaggcgtgccggccagcggcggggggcgcagtgcacacgagggggctggacttcgcctgtgacatctacatctgggcgcccttggccgggacttgtggggtccttctcctgtcactggttatcaccctttactgcaaacggggcagaaagaaactcctgtatatattcaaacaaccatttatgagaccagtacaaactactcaagaggaagatggctgtagctgccgatttccagaagaagaagaaggaggatgtgaactgagagtgaagttcagcaggagcgcagacgcccccgcgtaccagcagggccagaaccagctctataacgagctgaatctaggacgaagagaggagtacgatgttttggacaagagacgtggccgggaccctgagatggggggaaagccgagaaggaagaaccctcaggaaggcctgtacaatgaactgcagaaagataagatggcggaggcctacagtgagattgggatgaaaggcgagcgccggaggggcaaggggcacgatggcctttaccagggtctcagtacagccaccaaggacacctacgacgcccttcacatgcaggccctgccccctcgctctagtggctccggcgagggcagaggaagtctactaacctgcggagatgtggaagaaaatcctggcccacatatgaccgagtacaagcccacggtgcgcctcgccacccgcgacgacgtccccagggccgtacgcaccctcgccgccgcgttcgccgactaccccgccacgcgccacaccgtcgatccggaccgccacatcgagcgggtcaccgagctgcaagaactcttcctcacgcgcgtcgggctcgacatcggcaaggtgtgggtcgcggacgacggcgccgcggtggcggtctggaccacgccggagagcgtcgaagcgggggcggtgttcgccgagatcggcccgcgcatggccgagttgagcggttcccggctggccgcgcagcaacagatggaaggcctcctggcgccgcaccggcccaaggagcccgcgtggttcctggccaccgtcggcgtctcgcccgaccaccagggcaagggtctgggcagcgccgtcgtgctccccggagtggaggcggccgagcgcgccggggtgcccgccttcctggagacctccgcgccccgcaacctccccttctacgagcggctcggcttcaccgtcaccgccgacgtcgaggtgcccgaaggaccgcgcacctggtgcatgacccgcaagcccggtgcctga

SEQ ID NO: 32713 - DNA, 3159 bp, synthetic construct
  source 1..3159: mol_type = other DNA
atggccttaccagtgaccgccttgctcctgccgctggccttgctgctccacgccgccaggccgaatgctggcgtgacccagacacctaagttccgggtgctgaaaaccggccagagcatgacactgctgtgcgcccaggacatgaaccatgagtacatgtattggtacagacaggaccccggcatgggcctgagactgatccactattctggctggggcaaagacaccgccaagggcgaagttcccgatggctacaacgtgtcccggctgaagaagcagaacttcctgctgggcctcgaaagcgccgctccatctcagaccagcgtgtacttctgcgccagcaaagttggcccaggccagcacaatagccctctgcactttggcaacggcaccagactgacagtgacactcgaggacctgaagaacgtgttcccacctgaggtggccgtgttcgagcctagcgaggccgagatcagccacacccagaaagccaccctcgtgtgcctggctaccggcttctaccccgaccatgtggaactgtcttggtgggtcaacggcaaagaggtgcacagcggcgtgtctaccgacccccagccactgaaagaacagcccgccctgaacgacagccggtactgcctgagcagcagactgagagtgtccgccaccttctggcagaacccccggaaccacttcagatgccaggtgcagttctacggcctgagcgagaacgacgagtggacccaggacagagccaagcccgtgacccagatcgtgtctgccgaagcctggggcagagccgattgcggatcccagagcttcggcctgctggaccccaagctgtgctacctgctggatggcatcctgttcatctacggcgtgatcctgaccgccctgttcctgagagtgaagttcagcagaagcgccgacgcccctgcctaccagcagggacagaaccaactgtacaacgagctgaacctgggcagacgggaagagtacgacgtgctggacaagcggagaggcagggaccctgagatgggcggaaagccccggagaaagaacccccaggaaggactgtataacgaactccagaaagacaagatggccgaagcctacagcgagatcggcatgaagggcgagcggagaagaggcaagggccacgatggcctgtaccagggcctgagcaccgccaccaaggacacctatgacgccctgcacatgcaggccctgcctccaagaagggccaagcgatctggatctggagcaacaaacttctcactactcaaacaagcaggtgacgtggaggagaatcccgggcctactagtatggactggatttggcgcatccttttccttgtcggcgctgctaccggcgcgcattccttcgaagctcagaaagtgacacaggcccagaccgagatcagcgtggtggaaaaagaagatgtgaccctggactgcgtgtacgagacaagggacaccgcctactacctgttctggtacaagcagcctcctagcggcgagctggtgttcctgattagacagccttggtggggcagcagcagaggcatcagcggcagatacagctggaacttccagaagtccaccagcagcttcaacttcaccatcaccgccagccaggtggtggatagcgccgtgtacttttgtgccatgagcgtgcccgatagcagaggccactaccagttcaccttcggcaagggcacaaagctgagcgtgatccctacgcgtatccagaaccctgatcctgccgtgtaccagctgcgggatagcaagagcagcgacaagagcgtgtgtctgttcaccgacttcgacagccagaccaacgtgtcccagagcaaggactccgacgtgtacatcaccgataagaccgtgctggacatgcggagcatggacttcaagagcaactccgccgtggcctggtccaacaagtccgatttcgcctgcgccaacgccttcaacaacagcattatccccgaggacacattcttcccaagccccgagagcagctgcggtacccagagttttgggttgttggaccctaaattgtgctatctgttggacggaatcctgttcatttacggagtgatcctgaccgcattgttcctgcgggttaagttttccagatccgcagacgcacccgcttaccaacaagggcagaaccaactctacaatgaacttaatttggggcggagggaagagtacgacgttctggacaaaaggaggggacgagatcccgagatgggcggaaagcctcgaaggaagaatccgcaagaggggctttataacgaactccagaaagataaaatggcagaagcctatagtgagattgggatgaagggagaaaggaggaggggtaaaggtcacgatgggttgtaccaaggattgagcacagccactaaagatacctatgatgcgctccacatgcaggccctgccgccaagacgcgccaagagaagcggatctggcgtgaagcagaccctgaatttcgacctgctgaagctggctggcgacgtggaatccaacccaggcccttctagaggccatatgaccgagtacaagcccacggtgcgcctcgccacccgcgacgacgtccccagggccgtacgcaccctcgccgccgcgttcgccgactaccccgccacgcgccacaccgtcgatccggaccgccacatcgagcgggtcaccgagctgcaagaactcttcctcacgcgcgtcgggctcgacatcggcaaggtgtgggtcgcggacgacggcgccgcggtggcggtctggaccacgccggagagcgtcgaagcgggggcggtgttcgccgagatcggcccgcgcatggccgagttgagcggttcccggctggccgcgcagcaacagatggaaggcctcctggcgccgcaccggcccaaggagcccgcgtggttcctggccaccgtcggcgtctcgcccgaccaccagggcaagggtctgggcagcgccgtcgtgctccccggagtggaggcggccgagcgcgccggggtgcccgccttcctggagacctccgcgccccgcaacctccccttctacgagcggctcggcttcaccgtcaccgccgacgtcgaggtgcccgaaggaccgcgcacctggtgcatgacccgcaagcccggtgcctga

SEQ ID NO: 32714 - DNA, 1851 bp, synthetic construct
  source 1..1851: mol_type = other DNA
atggccttaccagtgaccgccttgctcctgccgctggccttgctgctccacgccgccaggccggacatccagatgacacagagccctagcagcctgtctgccagcgtgggagacagagtgaccatcacatgcaaggccagcgacctgatccacaactggctggcctggtatcagcagaagcctggcaaggcccctaagctgctgatctacggcgctacctctctggaaacaggcgtgcccagcagattttctggcagcggctctggcaccgacttcaccctgacaatatccagcctccagcctgaggacttcgccacctactactgccagcagtactggaccacacctttcaccttcggccagggcaccaaggtggaaatcaaaagactcgaggacctgaagaacgtgttcccacctgaggtggccgtgttcgagcctagcgaggccgagatcagccacacccagaaagccaccctcgtgtgcctggctaccggcttctaccccgaccatgtggaactgtcttggtgggtcaacggcaaagaggtgcacagcggcgtgtgtaccgacccccagccactgaaagaacagcccgccctgaacgacagccggtactgcctgagcagcagactgagagtgtccgccaccttctggcagaacccccggaaccacttcagatgccaggtgcagttctacggcctgagcgagaacgacgagtggacccaggacagagccaagcccgtgacccagatcgtgtctgccgaagcctggggcagagccgattgcggctttaccagcgagagctaccagcagggcgtgctgagcgccaccatcctgtacgagatcctgctgggcaaggccaccctgtacgccgtgctggtgtctgccctggtgctgatggctatggtcaagcggaaggacagccggggaagggccaagcgatctggatctggagcaacaaacttctcactactcaaacaagcaggtgacgtggaggagaatcccgggcctactagtatggactggatttggcgcatccttttccttgtcggcgctgctaccggcgcgcattccttcgaagtgcagctggttgaatcaggtggcggcctggttcaacctggcggatctctgagactgagctgtgccgccagcggctacagcatcaccaatgactacgcctggaactgggtccgacaggcccctggaaaaggactggaatgggtcggatatatcagctactccggctacaccacctacaatcccagcatcaagagccggttcaccatcagcagagacaccagcaagaacaccctgtacctccagatgaactccctgagagccgaggacaccgccgtgtactattgtgccagatggaccagcggcctggactattggggacagggaacactggtcaccgtgtcctctacgcgtatccagaaccctgatcctgccgtgtaccagctgcgggatagcaagagcagcgacaagagcgtgtgtctgttcaccgacttcgacagccagaccaacgtgtcccagagcaaggactccgacgtgtacatcaccgataagtgcgtgctggacatgcggagcatggacttcaagagcaactccgccgtggcctggtccaacaagtccgatttcgcctgcgccaacgccttcaacaacagcattatccccgaggacacattcttcccaagccccgagagcagctgcgacgtgaagctggtggaaaagagcttcgagacagacaccaacctgaacttccagaacctgagcgtgatcggcttcagaatcctgctgctgaaagtggccggctttaacctgctgatgaccctgcggctgtggtccagctaa

SEQ ID NO: 32715 - DNA, 1851 bp, synthetic construct; identical to SEQ ID NO: 32714
  source 1..1851: mol_type = other DNA

SEQ ID NO: 32716 - DNA, 1995 bp, synthetic construct
  source 1..1995: mol_type = other DNA
atggccttaccagtgaccgccttgctcctgccgctggccttgctgctccacgccgccaggccggacatccagatgacacagagccctagcagcctgtctgccagcgtgggagacagagtgaccatcacctgtagagccagccaggacatcagcagctacctgaactggtatcagcagaagcccggcaaggcccctaagctgctgatctactacaccagcagactgcacagcggcgtgcccagcagattttctggctctggcagcggcaccgacttcaccctgacaatatctagcctccagcctgaggacttcgccacctactattgccagcagggcaacaccctgccttacacatttggacagggcaccaaggtggaaatcaagagactcgagggacagcctaaggccaatcctaccgtgacactgttccctccaagcagcgaagaactccaggccaacaaggccacacttgtgtgcctgatctccgacttctaccctggggctgtgacagtggcttggaaggccgatggatctcctgtgaaagccggcgtggaaaccaccaagccatccaagcagagcaacaacaaatacgccgccagctcctacctgagcctgacacctgagcagtggaagtcccacagatcctacagctgccaagtgacccacgaaggcagcaccgtggaaaagacagtggcccctacagagtgcagcggatcctccaaggacgccaacgataccctgctgctccagctgaccaacaccagcgcctactacatgtacttgttgctgctgctgaagtccgtggtgtacttcgccatcatcacatgctgcctgctgcggagaaccgccttctgctgcaacggcgagaagtctagggccaagcgatctggatctggagcaacaaacttctcactactcaaacaagcaggtgacgtggaggagaatcccgggcctactagtatggactggatttggcgcatccttttccttgtcggcgctgctaccggcgcgcattccttcgaagtgcagctggttgaatcaggtggcggcctggttcaacctggcggatctctgagactgagctgtgccgccagcggctacaccttcagcgactactttatgagctgggtccgacaggcccctggcaaaggacttgaatgggtcgccaccatcagcaatggcggcacctacacttactaccccgacagcgtgaagggcagattcaccatctccagagacaacagcaagaacaccctgtacctccagatgaactccctgagagccgaggacaccgccgtgtactactgcgccagattcgacggctacatcttcgactattggggccagggcaccctggtcacagtctcttctacgcgtgcgtccactaagggtccgtcagtcttcccgctggcgccctgttcccgcagcacgagtgaatctaccgccgcccttgggtgcttggtaaaagactattttcctgagcccgttacagtatcatggaacagcggggctctgactagcggggtgcatacgttccctgcggttctgcaatctagcggactgtattctctctccagtgttgtgaccgtgccaagctccagcctcggtactaaaacttatacatgtaatgtggatcataaaccttcaaataccaaggttgacaaaagggtagagagtaagtacggtggtaccgaagtgaaaaccgactccaccgaccacgtgaagcccaaagagacagagaacaccaagcagcccagcaagagctgccacaagcccaaggccatcgtgcacaccgagaaagtgaacatgatgagcctgaccgtgctgggcctgcggatgctgttcgccaaaaccgtggccgtgaacttcctgctgaccgccaagctgttcttcctccgcgccaagagaagcggatctggcgtgaagcagaccctgaatttcgacctgctgaagctggctggcgacgtggaatccaacccaggcccttctagataa

SEQ ID NO: 32717 - DNA, 3057 bp, synthetic construct
  source 1..3057: mol_type = other DNA
atggccttaccagtgaccgccttgctcctgccgctggccttgctgctccacgccgccaggccggacatccagatgacacagagccctagcagcctgtctgccagcgtgggagacagagtgaccatcacctgtagagccagccaggacatcagcagctacctgaactggtatcagcagaagcccggcaaggcccctaagctgctgatctactacaccagcagactgcacagcggcgtgcccagcagattttctggctctggcagcggcaccgacttcaccctgacaatatctagcctccagcctgaggacttcgccacctactattgccagcagggcaacaccctgccttacacatttggacagggcaccaaggtggaaatcaagagactcgaggccgacgtgtcccccaagcctaccatcttcctgccctctatcgccgagacaaagctccagaaggccggcacctacctgtgcctgctggaaaagttcttcccagatgtgattaagatccactggcaggaaaagaagtccaacaccatcctgggcagccaggaaggcaacaccatgaagaccaacgacacctacatgaagttcagctggctgaccgtgcccgagaagtccctggacaaagaacacagatgcatcgtgcggcacgaaaacaacaagaacggcgtggaccaggaaatcatcttcccacccatcaagaccgatgtgattacaatggaccccaaggacggatcccagagcttcggcctgctggaccccaagctgtgctacctgctggatggcatcctgttcatctacggcgtgatcctgaccgccctgttcctgagagtgaagttcagcagaagcgccgacgcccctgcctaccagcagggacagaaccaactgtacaacgagctgaacctgggcagacgggaagagtacgacgtgctggacaagcggagaggcagggaccctgagatgggcggaaagccccggagaaagaacccccaggaaggactgtataacgaactccagaaagacaagatggccgaagcctacagcgagatcggcatgaagggcgagcggagaagaggcaagggccacgatggcctgtaccagggcctgagcaccgccaccaaggacacctatgacgccctgcacatgcaggccctgcctccaagaagggccaagcgatctggatctggagcaacaaacttctcactactcaaacaagcaggtgacgtggaggagaatcccgggcctactagtatggactggatttggcgcatccttttccttgtcggcgctgctaccggcgcgcattccttcgaagtgcagctggttgaatcaggtggcggcctggttcaacctggcggatctctgagactgagctgtgccgccagcggctacaccttcagcgactactttatgagctgggtccgacaggcccctggcaaaggacttgaatgggtcgccaccatcagcaatggcggcacctacacttactaccccgacagcgtgaagggcagattcaccatctccagagacaacagcaagaacaccctgtacctccagatgaactccctgagagccgaggacaccgccgtgtactactgcgccagattcgacggctacatcttcgactattggggccagggcaccctggtcacagtctcttctacgcgtcctcacaccaagcccagcgtgttcgtgatgaagaacggcaccaacgtggcctgcctcgtgaaagagttctaccccaaggacatcaggatcaacctggtgtccagcaagaagatcaccgagttcgaccccgccatcgtgatctcccccagcggcaagtacaacgccgtgaagctggggaagtacgaggacagcaacagcgtgacctgctccgtgcagcacgacaacaagaccgtgcacagcaccgactttggtacccagagttttgggttgttggaccctaaattgtgctatctgttggacggaatcctgttcatttacggagtgatcctgaccgcattgttcctgcgggttaagttttccagatccgcagacgcacccgcttaccaacaagggcagaaccaactctacaatgaacttaatttggggcggagggaagagtacgacgttctggacaaaaggaggggacgagatcccgagatgggcggaaagcctcagcgaaggaagaatccgcaagaggggctttataacgaactccagaaagataaaatggcagaagcctatagtgagattgggatgaagggagaaaggaggaggggtaaaggtcacgatgggttgtaccaaggattgagcacagccactaaagatacctatgatgcgctccacatgcaggccctgccgccaagacgcgccaagagaagcggatctggcgtgaagcagaccctgaatttcgacctgctgaagctggctggcgacgtggaatccaacccaggcccttctagaggccatatgaccgagtacaagcccacggtgcgcctcgccacccgcgacgacgtccccagggccgtacgcaccctcgccgccgcgttcgccgactaccccgccacgcgccacaccgtcgatccggaccgccacatcgagcgggtcaccgagctgcaagaactcttcctcacgcgcgtcgggctcgacatcggcaaggtgtgggtcgcggacgacggcgccgcggtggcggtctggaccacgccggagagcgtcgaagcgggggcggtgttcgccgagatcggcccgcgcatggccgagttgagcggttcccggctggccgcgcagcaacagatggaaggcctcctggcgccgcaccggcccaaggagcccgcgtggttcctggccaccgtcggcgtctcgcccgaccaccagggcaagggtctgggcagcgccgtcgtgctccccggagtggaggcggccgagcgcgccggggtgcccgccttcctggagacctccgcgccccgcaacctccccttctacgagcggctcggcttcaccgtcaccgccgacgtcgaggtgcccgaaggaccgcgcacctggtgcatgacccgcaagcccggtgcctga

SEQ ID NO: 32718 - DNA, 2562 bp, synthetic construct
  source 1..2562: mol_type = other DNA
atggccttaccagtgaccgccttgctcctgccgctggccttgctgctccacgccgccaggccggacatccagatgacacagagccctagcagcctgtctgccagcgtgggagacagagtgaccatcacctgtagagccagccaggacatcagcagctacctgaactggtatcagcagaagcccggcaaggcccctaagctgctgatctactacaccagcagactgcacagcggcgtgcccagcagattttctggctctggcagcggcaccgacttcaccctgacaatatctagcctccagcctgaggacttcgccacctactattgccagcagggcaacaccctgccttacacatttggacagggcaccaaggtggaaatcaagagactcgaggccgacgtgtcccccaagcctaccatcttcctgccctctatcgccgagacaaagctccagaaggccggcacctacctgtgcctgctggaaaagttcttcccagatgtgattaagatccactggcaggaaaagaagtccaacaccatcctgggcagccaggaaggcaacaccatgaagaccaacgacacctacatgaagttcagctggctgaccgtgcccgagaagtccctggacaaagaacacagatgcatcgtgcggcacgaaaacaacaagaacggcgtggaccaggaaatcatcttcccacccatcaagaccgatgtgattacaatggaccccaaggacaactgctccaaggacgccaacgataccctgctgctccagctgaccaacaccagcgcctactacatgtacttgttgctgctgctgaagtccgtggtgtacttcgccatcatcacatgctgcctgctgcggagaaccgccttctgctgcaacggcgagaagtctagggccaagcgatctggatctggagcaacaaacttctcactactcaaacaagcaggtgacgtggaggagaatcccgggcctactagtatggactggatttggcgcatccttttccttgtcggcgctgctaccggcgcgcattccttcgaagtgcagctggttgaatcaggtggcggcctggttcaacctggcggatctctgagactgagctgtgccgccagcggctacaccttcagcgactactttatgagctgggtccgacaggcccctggcaaaggacttgaatgggtcgccaccatcagcaatggcggcacctacacttactaccccgacagcgtgaagggcagattcaccatctccagagacaacagcaagaacaccctgtacctccagatgaactccctgagagccgaggacaccgccgtgtactactgcgccagattcgacggctacatcttcgactattggggccagggcaccctggtcacagtctcttctacgcgtagccagcctcacaccaagcccagcgtgttcgtgatgaagaacggcaccaacgtggcctgcctcgtgaaagagttctaccccaaggacatcaggatcaacctggtgtccagcaagaagatcaccgagttcgaccccgccatcgtgatctcccccagcggcaagtacaacgccgtgaagctggggaagtacgaggacagcaacagcgtgacctgctccgtgcagcacgacaacaagaccgtgcacagcaccgactttgaagtgaaaaccgactccaccgaccacgtgaagcccaaagagacagagaacaccaagcagcccagcaagagctgccacaagcccaaggccatcgtgcacaccgagaaagtgaacatgatgagcctgaccgtgctgggcttcagaatcctgctgctgaaagtggccggctttaacctgctgatgaccctgcggctgtggtccagccgcgccaagagaagcggatctggcgtgaagcagaccctgaatttcgacctgctgaagctggctggcgacgtggaatccaacccaggcccttctagaggccatatgaccgagtacaagcccacggtgcgcctcgccacccgcgacgacgtccccagggccgtacgcaccctcgccgccgcgttcgccgactaccccgccacgcgccacaccgtcgatccggaccgccacatcgagcgggtcaccgagctgcaagaactcttcctcacgcgcgtcgggctcgacatcggcaaggtgtgggtcgcggacgacggcgccgcggtggcggtctggaccacgccggagagcgtcgaagcgggggcggtgttcgccgagatcggcccgcgcatggccgagttgagcggttcccggctggccgcgcagcaacagatggaaggcctcctggcgccgcaccggcccaaggagcccgcgtggttcctggccaccgtcggcgtctcgcccgaccaccagggcaagggtctgggcagcgccgtcgtgctccccggagtggaggcggccgagcgcgccggggtgcccgccttcctggagacctccgcgccccgcaacctccccttctacgagcggctcggcttcaccgtcaccgccgacgtcgaggtgcccgaaggaccgcgcacctggtgcatgacccgcaagcccggtgcctga

SEQ ID NO: 32719 - DNA, 1857 bp, synthetic construct
  source 1..1857: mol_type = other DNA
atggccttaccagtgaccgccttgctcctgccgctggccttgctgctccacgccgccaggccggacatccagatgacacagagccctagcagcctgtctgccagcgtgggagacagagtgaccatcacctgtagagccagccaggacatcagcagctacctgaactggtatcagcagaagcccggcaaggcccctaagctgctgatctactacaccagcagactgcacagcggcgtgcccagcagattttctggctctggcagcggcaccgacttcaccctgacaatatctagcctccagcctgaggacttcgccacctactattgccagcagggcaacaccctgccttacacatttggacagggcaccaaggtggaaatcaagagactcgaggacctgaagaacgtgttcccacctgaggtggccgtgttcgagcctagcgaggccgagatcagccacacccagaaagccaccctcgtgtgcctggctaccggcttctaccccgaccgtgtggaactgtcttggtgggtcaacggcaaagaggtgcacagcggcgtgtgtaccgacccccagccactgaaagaacagcccgccctgaacgacagccggtactgcctgagcagcagactgagagtgtccgccaccttctggcagaacccccggaaccacttcagatgccaggtgcagttctacggcctgagcgagaacgacgagtggacccaggacagagccaagcccgtgacccagatcgtgtctgccgaagcctggggcagagccgattgcggctttaccagcgagagctaccagcagggcgtgctgagcgcctactacatgtacttgttgctgctgctgaagtccgtggtgtacttcgccatcatcacatgctgcctgctgcggagaaccgccttctgctgcaacggcgagaagtctagggccaagcgatctggatctggagcaacaaacttctcactactcaaacaagcaggtgacgtggaggagaatcccgggcctactagtatggactggatttggcgcatccttttccttgtcggcgctgctaccggcgcgcattccttcgaagtgcagctggttgaatcaggtggcggcctggttcaacctggcggatctctgagactgagctgtgccgccagcggctacaccttcagcgactactttatgagctgggtccgacaggcccctggcaaaggacttgaatgggtcgccaccatcagcaatggcggcacctacacttactaccccgacagcgtgaagggcagattcaccatctccagagacaacagcaagaacaccctgtacctccagatgaactccctgagagccgaggacaccgccgtgtactactgcgccagattcgacggctacatcttcgactattggggccagggcaccctggtcacagtctcttctacgcgtatccagaaccctgatcctgccgtgtaccagctgcgggatagcaagagcagcgacaagagcgtgtgtctgttcaccgacttcgacagccagaccaacgtgtcccagagcaaggactccgacgtgtacatcaccgataagtgcgtgctggacatgcggagcatggacttcaagagcaactccgccgtggcctggtccaacaagtccgatttcgcctgcgccaacgccttcaacaacagcattatccccgaggacacattcttcccaagccccgagagcagctgcgacgtgaagctggtggaaaagagcttcgagacagacaccaacctgaacttccagaacctgagcgtgatcggcttcagaatcctgctgctgaaagtggccggctttaacctgctgatgaccctgcggctgtggtccagctaa

SEQ ID NO: 32720 - DNA, 2562 bp, synthetic construct
  source 1..2562: mol_type = other DNA
atggccttaccagtgaccgccttgctcctgccgctggccttgctgctccacgccgccaggccggacatccagatgacacagagccctagcagcctgtctgccagcgtgggagacagagtgaccatcacctgtagagccagccaggacatcagcagctacctgaactggtatcagcagaagcccggcaaggcccctaagctgctgatctactacaccagcagactgcacagcggcgtgcccagcagattttctggctctggcagcggcaccgacttcaccctgacaatatctagcctccagcctgaggacttcgccacctactattgccagcagggcaacaccctgccttacacatttggacagggcaccaaggtggaaatcaagagactcgaggccgacgtgtcccccaagcctaccatcttcctgccctctatcgccgagacaaagctccagaaggccggcacctacctgtgcctgctggaaaagttcttcccagatgtgattaagatccactggcaggaaaagaagtccaacaccatcctgggcagccaggaaggcaacaccatgaagaccaacgacacctacatgaagttcagctggctgaccgtgcccgagaagtccctggacaaagaacacagatgcatcgtgcggcacgaaaacaacaagaacggcgtggaccaggaaatcatcttcccacccatcaagaccgatgtgattacaatggaccccaaggacaactgctccaaggacgccaacgataccctgctgctccagctgaccaacaccagcgcctactacatgtacttgttgctgctgctgaagtccgtggtgtacttcgccatcatcacatgctgcctgctgcggagaaccgccttctgctgcaacggcgagaagtctagggccaagcgatctggatctggagcaacaaacttctcactactcaaacaagcaggtgacgtggaggagaatcccgggcctactagtatggactggatttggcgcatccttttccttgtcggcgctgctaccggcgcgcattccttcgaagtgcagctggttgaatcaggtggcggcctggttcaacctggcggatctctgagactgagctgtgccgccagcggctacaccttcagcgactactttatgagctgggtccgacaggcccctggcaaaggacttgaatgggtcgccaccatcagcaatggcggcacctacacttactaccccgacagcgtgaagggcagattcaccatctccagagacaacagcaagaacaccctgtacctccagatgaactccctgagagccgaggacaccgccgtgtactactgcgccagattcgacggctacatcttcgactattggggccagggcaccctggtcacagtctcttctacgcgtagccagcctcacaccaagcccagcgtgttcgtgatgaagaacggcaccaacgtggcctgcctcgtgaaagagttctaccccaaggacatcaggatcaacctggtgtccagcaagaagatcaccgagttcgaccccgccatcgtgatctcccccagcggcaagtacaacgccgtgaagctggggaagtacgaggacagcaacagcgtgacctgctccgtgcagcacgacaacaagaccgtgcacagcaccgactttgaagtgaaaaccgactccaccgaccacgtgaagcccaaagagacagagaacaccaagcagcccagcaagagctgccacaagcccaaggccatcgtgcacaccgagaaagtgaacatgatgagcctgaccgtgatcggcttcagaatcctgctgctgaaagtggccggctttaacctgctgatgaccctgcggctgtggtccagccgcgccaagagaagcggatctggcgtgaagcagaccctgaatttcgacctgctgaagctggctggcgacgtggaatccaacccaggcccttctagaggccatatgaccgagtacaagcccacggtgcgcctcgccacccgcgacgacgtccccagggccgtacgcaccctcgccgccgcgttcgccgactaccccgccacgcgccacaccgtcgatccggaccgccacatcgagcgggtcaccgagctgcaagaactcttcctcacgcgcgtcgggctcgacatcggcaaggtgtgggtcgcggacgacggcgccgcggtggcggtctggaccacgccggagagcgtcgaagcgggggcggtgttcgccgagatcggcccgcgcatggccgagttgagcggttcccggctggccgcgcagcaacagatggaaggcctcctggcgccgcaccggcccaaggagcccgcgtggttcctggccaccgtcggcgtctcgcccgaccaccagggcaagggtctgggcagcgccgtcgtgctccccggagtggaggcggccgagcgcgccggggtgcccgccttcctggagacctccgcgccccgcaacctccccttctacgagcggctcggcttcaccgtcaccgccgacgtcgaggtgcccgaaggaccgcgcacctggtgcatgacccgcaagcccggtgcctga

SEQ ID NO: 32721 - DNA, 3252 bp, synthetic construct
  source 1..3252: mol_type = other DNA
atggccttaccagtgaccgccttgctcctgccgctggccttgctgctccacgccgccaggccggaattcaatgctggcgtgacccagacacctaagttccaggtgctgaaaaccggccagagcatgaccctgcaatgcgcccaggacatgaaccatgagtacatgagctggtacagacaggaccccggcatgggcctgagactgatccactactctgtggctatccagaccaccgaccagggcgaagtgcccaatggctacaacgtgtccagaagcaccatcgaggacttcccactgagactgctgtctgccgctcctagccagaccagcgtgtacttttgtgccagcagctacctgggcaacaccggcgagctgttttttggcgagggcagcagactgaccgtgctcgaggccgacgtgtcccccaagcctaccatcttcctgccctctatcgccgagacaaagctccagaaggccggcacctacctgtgcctgctggaaaagttcttcccagatgtgattaagatccactggcaggaaaagaagtccaacaccatcctgggcagccaggaaggcaacaccatgaagaccaacgacacctacatgaagttcagctggctgaccgtgcccgagaagtccctggacaaagaacacagatgcatcgtgcggcacgaaaacaacaagaacggcgtggaccaggaaatcatcttcccacccatcaagaccgatgtgattacaatggaccccaaggacaactgctccaaggacgccaacgataccctgctgctccagctgaccaacaccagcgcctactacatgtacttgttgctgctgctgaagtccgtggtgtacttcgccatcatcacatgctgcctgctgcggagaaccgccttctgctgcaacggcgagaagtctggatccagagtgaagttcagcagaagcgccgacgcccctgcctaccagcagggacagaaccaactgtacaacgagctgaacctgggcagacgggaagagtacgacgtgctggacaagcggagaggcagggaccctgagatgggcggaaagccccggagaaagaacccccaggaaggactgtataacgaactccagaaagacaagatggccgaagcctacagcgagatcggcatgaagggcgagcggagaagaggcaagggccacgatggcctgtaccagggcctgagcaccgccaccaaggacacctatgacgccctgcacatgcaggccctgcctccaagaagggccaagcgatctggatctggagcaacaaacttctcactactcaaacaagcaggtgacgtggaggagaatcccgggcctactagtatggactggatttggcgcatccttttccttgtcggcgctgctaccggcgcgcattccttcgaacaagaagtgacacagatccctgccgctctgtctgtgcctgagggcgaaaacctggtgctgaactgctccttcaccgacagcgccatctacaacctccagtggttcaggcaggaccctggaaagggactgacaagcctgctgctgatccagagcagccagagagagcagacctccggcagactgaatgccagcctggataagagcagcggcaggtctaccctgtatatcgccgcttctcagcctggcgatagcgccacatatctgtgtgctgtgcggcctacaagcggcggcagctacatccctacatttggcagaggcaccagcctgatcgtgcacccttatacgcgtcctcacaccaagcccagcgtgttcgtgatgaagaacggcaccaacgtggcctgcctcgtgaaagagttctaccccaaggacatcaggatcaacctggtgtccagcaagaagatcaccgagttcgaccccgccatcgtgatctcccccagcggcaagtacaacgccgtgaagctggggaagtacgaggacagcaacagcgtgacctgctccgtgcagcacgacaacaagaccgtgcacagcaccgactttgaagtgaaaaccgactccaccgaccacgtgaagcccaaagagacagagaacaccaagcagcccagcaagagctgccacaagcccaaggccatcgtgcacaccgagaaagtgaacatgatgagcctgaccgtgctgggcctgcggatgctgttcgccaaaaccgtggccgtgaacttcctgctgaccgccaagctgttcttcctcggtaccagggttaagttttccagatccgcagacgcacccgcttaccaacaagggcagaaccaactctacaatgaacttaatttggggcggagggaagagtacgacgttctggacaaaaggaggggacgagatcccgagatgggcggaaagcctcgaaggaagaatccgcaagaggggctttataacgaactccagaaagataaaatggcagaagcctatagtgagattgggatgaagggagaaaggaggaggggtaaaggtcacgatgggttgtaccaaggattgagcacagccactaaagatacctatgatgcgctccacatgcaggccctgccgccaagacgcgccaagagaagcggatctggcgtgaagcagaccctgaatttcgacctgctgaagctggctggcgacgtggaatccaacccaggcccttctagaggccatatgaccgagtacaagcccacggtgcgcctcgccacccgcgacgacgtccccagggccgtacgcaccctcgccgccgcgttcgccgactaccccgccacgcgccacaccgtcgatccggaccgccacatcgagcgggtcaccgagctgcaagaactcttcctcacgcgcgtcgggctcgacatcggcaaggtgtgggtcgcggacgacggcgccgcggtggcggtctggaccacgccggagagcgtcgaagcgggggcggtgttcgccgagatcggcccgcgcatggccgagttgagcggttcccggctggccgcgcagcaacagatggaaggcctcctggcgccgcaccggcccaaggagcccgcgtggttcctggccaccgtcggcgtctcgcccgaccaccagggcaagggtctgggcagcgccgtcgtgctccccggagtggaggcggccgagcgcgccggggtgcccgccttcctggagacctccgcgccccgcaacctccccttctacgagcggctcggcttcaccgtcaccgccgacgtcgaggtgcccgaaggaccgcgcacctggtgcatgacccgcaagcccggtgcctga

SEQ ID NO: 32722 - DNA, 3153 bp, synthetic construct
  source 1..3153: mol_type = other DNA
atggccttaccagtgaccgccttgctcctgccgctggccttgctgctccacgccgccaggccggacatccagatgacacagagccctagcagcctgtctgccagcgtgggagacagagtgaccatcacctgtagagccagccaggacgtgaacacagccgtggcttggtatcagcagaagcctggcaaggcccctaagctgctgatctacagcgcctacttcctgtacagcggcgtgcccagcagattcagcggaagcagaagcggcaccgacttcaccctgacaatatccagcctccagcctgaggacttcgccacctactactgccagcagtacagcagatacagccccgtgacctttggacagggcaccaaggtggaaatcaagagactcgaggacctgaagaacgtgttcccacctgaggtggccgtgttcgagcctagcgaggccgagatcagccacacccagaaagccaccctcgtgtgcctggctaccggcttctaccccgaccatgtggaactgtcttggtgggtcaacggcaaagaggtgcacagcggcgtgtctaccgacccccagccactgaaagaacagcccgccctgaacgacagccggtactgcctgagcagcagactgagagtgtccgccaccttctggcagaacccccggaaccacttcagatgccaggtgcagttctacggcctgagcgagaacgacgagtggacccaggacagagccaagcccgtgacccagatcgtgtctgccgaagcctggggcagagccgattgcggatcccagagcttcggcctgctggaccccaagctgtgctacctgctggatggcatcctgttcatctacggcgtgatcctgaccgccctgttcctgagagtgaagttcagcagaagcgccgacgcccctgcctaccagcagggacagaaccaactgtacaacgagctgaacctgggcagacgggaagagtacgacgtgctggacaagcggagaggcagggaccctgagatgggcggaaagccccagcggagaaagaacccccaggaaggactgtataacgaactccagaaagacaagatggccgaagcctacagcgagatcggcatgaagggcgagcggagaagaggcaagggccacgatggcctgtaccagggcctgagcaccgccaccaaggacacctatgacgccctgcacatgcaggccctgcctccaagaagggccaagcgatctggatctggagcaacaaacttctcactactcaaacaagcaggtgacgtggaggagaatcccgggcctactagtatggactggatttggcgcatccttttccttgtcggcgctgctaccggcgcgcattccttcgaagttcagctggttgaaagtggtggcggcctggttcaacctggcggatctctgagactgagctgtgccgccagcggcttcaatgtgtacgcctctggaatgcactgggtccgacaggcccctggcaaaggacttgagtgggtcgccaaaatctaccccgacagcgactacacctattacgccgacagcgtgaagggcagattcaccatcagcgccgacaccagcaagaacaccgcctacctccagatgaactccctgagagccgaggacaccgccgtgtactactgtagcagagacagcagcttctactacgtgtacgctatggactactggggccagggcacactggtcacagtctcttctacgcgtatccagaaccctgatcctgccgtgtaccagctgcgggatagcaagagcagcgacaagagcgtgtgtctgttcaccgacttcgacagccagaccaacgtgtcccagagcaaggactccgacgtgtacatcaccgataagaccgtgctggacatgcggagcatggacttcaagagcaactccgccgtggcctggtccaacaagtccgatttcgcctgcgccaacgccttcaacaacagcattatccccgaggacacattcttcccaagccccgagagcagctgcggtacccagagttttgggttgttggaccctaaattgtgctatctgttggacggaatcctgttcatttacggagtgatcctgaccgcattgttcctgcgggttaagttttccagatccgcagacgcacccgcttaccaacaagggcagaaccaactctacaatgaacttaatttggggcggagggaagagtacgacgttctggacaaaaggaggggacgagatcccgagatgggcggaaagcctcgaaggaagaatccgcaagaggggctttataacgaactccagaaagataaaatggcagaagcctatagtgagattgggatgaagggagaaaggaggaggggtaaaggtcacgatgggttgtaccaaggattgagcacagccactaaagatacctatgatgcgctccacatgcaggccctgccgccaagacgcgccaagagaagcggatctggcgtgaagcagaccctgaatttcgacctgctgaagctggctggcgacgtggaatccaacccaggcccttctagaggccatatgaccgagtacaagcccacggtgcgcctcgccacccgcgacgacgtccccagggccgtacgcaccctcgccgccgcgttcgccgactaccccgccacgcgccacaccgtcgatccggaccgccacatcgagcgggtcaccgagctgcaagaactcttcctcacgcgcgtcgggctcgacatcggcaaggtgtgggtcgcggacgacggcgccgcggtggcggtctggaccacgccggagagcgtcgaagcgggggcggtgttcgccgagatcggcccgcgcatggccgagttgagcggttcccggctggccgcgcagcaacagatggaaggcctcctggcgccgcaccggcccaaggagcccgcgtggttcctggccaccgtcggcgtctcgcccgaccaccagggcaagggtctgggcagcgccgtcgtgctccccggagtggaggcggccgagcgcgccggggtgcccgccttcctggagacctccgcgccccgcaacctccccttctacgagcggctcggcttcaccgtcaccgccgacgtcgaggtgcccgaaggaccgcgcacctggtgcatgacccgcaagcccggtgcctga

SEQ ID NO: 32723 - DNA, 3150 bp, synthetic construct
  source 1..3150: mol_type = other DNA
atggccttaccagtgaccgccttgctcctgccgctggccttgctgctccacgccgccaggccggacatccagatgacacagagccctagcagcctgtctgccagcgtgggagacagagtgaccatcacctgtagagccagccaggacgtgaacacagccgtggcttggtatcagcagaagcctggcaaggcccctaagctgctgatctacagcgcctacttcctgtacagcggcgtgcccagcagattcagcggaagcagaagcggcaccgacttcaccctgacaatatccagcctccagcctgaggacttcgccacctactactgccagcagtacagcagatacagccccgtgacctttggacagggcaccaaggtggaaatcaagagactcgaggacctgaagaacgtgttcccacctgaggtggccgtgttcgagcctagcgaggccgagatcagccacacccagaaagccaccctcgtgtgcctggctaccggcttctaccccgaccatgtggaactgtcttggtgggtcaacggcaaagaggtgcacagcggcgtgtctaccgacccccagccactgaaagaacagcccgccctgaacgacagccggtactgcctgagcagcagactgagagtgtccgccaccttctggcagaacccccggaaccacttcagatgccaggtgcagttctacggcctgagcgagaacgacgagtggacccaggacagagccaagcccgtgacccagatcgtgtctgccgaagcctggggcagagccgattgcggatcccagagcttcggcctgctggaccccaagctgtgctacctgctggatggcatcctgttcatctacggcgtgatcctgaccgccctgttcctgagagtgaagttcagcagaagcgccgacgcccctgcctaccagcagggacagaaccaactgtacaacgagctgaacctgggcagacgggaagagtacgacgtgctggacaagcggagaggcagggaccctgagatgggcggaaagccccggagaaagaacccccaggaaggactgtataacgaactccagaaagacaagatggccgaagcctacagcgagatcggcatgaagggcgagcggagaagaggcaagggccacgatggcctgtaccagggcctgagcaccgccaccaaggacacctatgacgccctgcacatgcaggccctgcctccaagaagggccaagcgatctggatctggagcaacaaacttctcactactcaaacaagcaggtgacgtggaggagaatcccgggcctactagtatggactggatttggcgcatccttttccttgtcggcgctgctaccggcgcgcattccttcgaagttcagctggttgaaagtggtggcggcctggttcaacctggcggatctctgagactgagctgtgccgccagcggcttcaatgtgtacgcctctggaatgcactgggtccgacaggcccctggcaaaggacttgagtgggtcgccaaaatctaccccgacagcgactacacctattacgccgacagcgtgaagggcagattcaccatcagcgccgacaccagcaagaacaccgcctacctccagatgaactccctgagagccgaggacaccgccgtgtactactgtagcagagacagcagcttctactacgtgtacgctatggactactggggccagggcacactggtcacagtctcttctacgcgtatccagaaccctgatcctgccgtgtaccagctgcgggatagcaagagcagcgacaagagcgtgtgtctgttcaccgacttcgacagccagaccaacgtgtcccagagcaaggactccgacgtgtacatcaccgataagaccgtgctggacatgcggagcatggacttcaagagcaactccgccgtggcctggtccaacaagtccgatttcgcctgcgccaacgccttcaacaacagcattatccccgaggacacattcttcccaagccccgagagcagctgcggtacccagagttttgggttgttggaccctaaattgtgctatctgttggacggaatcctgttcatttacggagtgatcctgaccgcattgttcctgcgggttaagttttccagatccgcagacgcacccgcttaccaacaagggcagaaccaactctacaatgaacttaatttggggcggagggaagagtacgacgttctggacaaaaggaggggacgagatcccgagatgggcggaaagcctcgaaggaagaatccgcaagaggggctttataacgaactccagaaagataaaatggcagaagcctatagtgagattgggatgaagggagaaaggaggaggggtaaaggtcacgatgggttgtaccaaggattgagcacagccactaaagatacctatgatgcgctccacatgcaggccctgccgccaagacgcgccaagagaagcggatctggcgtgaagcagaccctgaatttcgacctgctgaagctggctggcgacgtggaatccaacccaggcccttctagaggccatatgaccgagtacaagcccacggtgcgcctcgccacccgcgacgacgtccccagggccgtacgcaccctcgccgccgcgttcgccgactaccccgccacgcgccacaccgtcgatccggaccgccacatcgagcgggtcaccgagctgcaagaactcttcctcacgcgcgtcgggctcgacatcggcaaggtgtgggtcgcggacgacggcgccgcggtggcggtctggaccacgccggagagcgtcgaagcgggggcggtgttcgccgagatcggcccgcgcatggccgagttgagcggttcccggctggccgcgcagcaacagatggaaggcctcctggcgccgcaccggcccaaggagcccgcgtggttcctggccaccgtcggcgtctcgcccgaccaccagggcaagggtctgggcagcgccgtcgtgctccccggagtggaggcggccgagcgcgccggggtgcccgccttcctggagacctccgcgccccgcaacctccccttctacgagcggctcggcttcaccgtcaccgccgacgtcgaggtgcccgaaggaccgcgcacctggtgcatgacccgcaagcccggtgcctga

SEQ ID NO: 32724 - DNA, 3279 bp, synthetic construct
  source 1..3279: mol_type = other DNA
atggccttaccagtgaccgccttgctcctgccgctggccttgctgctccacgccgccaggccggacatccagatgacacagagccctagcagcctgtctgccagcgtgggagacagagtgaccatcacctgtagagccagccaggacgtgaacacagccgtggcttggtatcagcagaagcctggcaaggcccctaagctgctgatctacagcgcctacttcctgtacagcggcgtgcccagcagattcagcggaagcagaagcggcaccgacttcaccctgacaatatccagcctccagcctgaggacttcgccacctactactgccagcagtacagcagatacagccccgtgacctttggacagggcaccaaggtggaaatcaagagactcgaggacctgaagaacgtgttcccacctgaggtggccgtgttcgagcctagcgaggccgagatcagccacacccagaaagccaccctcgtgtgcctggctaccggcttctaccccgaccatgtggaactgtcttggtgggtcaacggcaaagaggtgcacagcggcgtgtctaccgacccccagccactgaaagaacagcccgccctgaacgacagccggtactgcctgagcagcagactgagagtgtccgccaccttctggcagaacccccggaaccacttcagatgccaggtgcagttctacggcctgagcgagaacgacgagtggacccaggacagagccaagcccgtgacccagatcgtgtctgccgaagcctggggcagagccgattgcggatcccagagcttcggcctgctggaccccaagctgtgctacctgctggatggcatcctgttcatctacggcgtgatcctgaccgccctgttcctgagagtgaagttcagcagaagcgccgacgcccctgcctaccagcagggacagaaccaactgtacaacgagctgaacctgggcagacgggaagagtacgacgtgctggacaagcggagaggcagggaccctgagatgggcggaaagccccggagaaagaacccccaggaaggactgtataacgaactccagaaagacaagatggccgaagcctacagcgagatcggcatgaagggcgagcggagaagaggcaagggccacgatggcctgtaccagggcctgagcaccgccaccaaggacacctatgacgccctgcacatgcaggccctgcctccaagaagggccaagcgatctggatctggagcaacaaacttctcactactcaaacaagcaggtgacgtggaggagaatcccgggcctactagtatggactggatttggcgcatccttttccttgtcggcgctgctaccggcgcgcattccttcgaagttcagctggttgaaagtggtggcggcctggttcaacctggcggatctctgagactgagctgtgccgccagcggcttcaatgtgtacgcctctggaatgcactgggtccgacaggcccctggcaaaggacttgagtgggtcgccaaaatctaccccgacagcgactacacctattacgccgacagcgtgaagggcagattcaccatcagcgccgacaccagcaagaacaccgcctacctccagatgaactccctgagagccgaggacaccgccgtgtactactgtagcagagacagcagcttctactacgtgtacgctatggactactggggccagggcacactggtcacagtctcttctacgcgtatccagaaccctgatcctgccgtgtaccagctgcgggatagcaagagcagcgacaagagcgtgtgtctgttcaccgacttcgacagccagaccaacgtgtcccagagcaaggactccgacgtgtacatcaccgataagaccgtgctggacatgcggagcatggacttcaagagcaactccgccgtggcctggtccaacaagtccgatttcgcctgcgccaacgccttcaacaacagcattatccccgaggacacattcttcccaagccccgagagcagctgcggtaccatcactcaaggtttggcagtgtcaaccatctcatcattctttccacctggctaccaagtgtccttctgcctggtcatggtgctgctgttcgccgtggataccggcctgtacttcagcgtcaagaccaacatccggtccagcaccagagactggaaggaccacaagttcaagtggcggaaggaccctcaggacaagtggcgacgcaagcgcaaagaaaagcaaagcgagacaagcccaaaagaatttctcactatatacgaggacgtgaaagatttgaagacgaggcggaatcatgagcaagagcagacatttcctggcgggggctctactatctactcaatgattcaatcccaaagctccgctccgacttcccaagagcccgcttacactctctactcactgatacagccttcaagaaaatcaggctctcggaaacggaatcattccccatccttcaatagtaccatctatgaagtaatcggtaagagtcaacctaaagctcaaaaccccgctcgcttgagccgcaaggagctggaaaacttcgatgtatatagccgcgccaagagaagcggatctggcgtgaagcagaccctgaatttcgacctgctgaagctggctggcgacgtggaatccaacccaggcccttctagaggccatatgaccgagtacaagcccacggtgcgcctcgccacccgcgacgacgtccccagggccgtacgcaccctcgccgccgcgttcgccgactaccccgccacgcgccacaccgtcgatccggaccgccacatcgagcgggtcaccgagctgcaagaactcttcctcacgcgcgtcgggctcgacatcggcaaggtgtgggtcgcggacgacggcgccgcggtggcggtctggaccacgccggagagcgtcgaagcgggggcggtgttcgccgagatcggcccgcgcatggccgagttgagcggttcccggctggccgcgcagcaacagatggaaggcctcctggcgccgcaccggcccaaggagcccgcgtggttcctggccaccgtcggcgtctcgcccgaccaccagggcaagggtctgggcagcgccgtcgtgctccccggagtggaggcggccgagcgcgccggggtgcccgccttcctggagacctccgcgccccgcaacctccccttctacgagcggctcggcttcaccgtcaccgccgacgtcgaggtgcccgaaggaccgcgcacctggtgcatgacccgcaagcccggtgcctga

SEQ ID NO: 32725 - DNA, 3264 bp, synthetic construct
  source 1..3264: mol_type = other DNA
atggccttaccagtgaccgccttgctcctgccgctggccttgctgctccacgccgccaggccggacatccagatgacacagagccctagcagcctgtctgccagcgtgggagacagagtgaccatcacctgtagagccagccaggatgtgtctacagccgtggcctggtatcagcagaagcctggaaaggcccctaagctgctgatctacagcgccagctttctgtactccggcgtgcccagcagattcagcggaagcagaagcggcaccgacttcaccctgacaatatccagcctccagcctgaggacttcgccacctactactgccagcagtacctgtaccagccttggacattcggccagggcaccaaggtggaaatcaagagactcgaggacctgaagaacgtgttcccacctgaggtggccgtgttcgagcctagcgaggccgagatcagccacacccagaaagccaccctcgtgtgcctggctaccggcttctaccccgaccatgtggaactgtcttggtgggtcaacggcaaagaggtgcacagcggcgtgtctaccgacccccagccactgaaagaacagcccgccctgaacgacagccggtactgcctgagcagcagactgagagtgtccgccaccttctggcagaacccccggaaccacttcagatgccaggtgcagttctacggcctgagcgagaacgacgagtggacccaggacagagccaagcccgtgacccagatcgtgtctgccgaagcctggggcagagccgattgcggatcccagagcttcggcctgctggaccccaagctgtgctacctgctggatggcatcctgttcatctacggcgtgatcctgaccgccctgttcctgagagtgaagttcagcagaagcgccgacgcccctgcctaccagcagggacagaaccaactgtacaacgagctgaacctgggcagacgggaagagtacgacgtgctggacaagcggagaggcagggaccctgagatgggcggaaagccccggagaaagaacccccaggaaggactgtataacgaactccagaaagacaagatggccgaagcctacagcgagatcggcatgaagggcgagcggagaagaggcaagggccacgatggcctgtaccagggcctgagcaccgccaccaaggacacctatgacgccctgcacatgcaggccctgcctccaagaagggccaagcgatctggatctggagcaacaaacttctcactactcaaacaagcaggtgacgtggaggagaatcccgggcctactagtatggactggatttggcgcatccttttccttgtcggcgctgctaccggcgcgcattccttcgaagttcagctggttgagtctggcggaggactggttcaacctggcggaagcctgagactgtcttgtgccgccagcggcttcaacatcgactactacggaatgcactgggtccgacaggcccctggcaaaggacttgaatgggtcgcctctctgtacggcggcagcgatagcacagattacgccgactctgtgaagggcagattcaccatcagcgccgacaccagcaagaacaccgcctacctccagatgaactccctgagagccgaagataccgccgtgtactactgctccagacagtacagcgcctacttcgactattggggccagggaaccctggtcaccgttagctctacgcgtatccagaaccctgatcctgccgtgtaccagctgcgggatagcaagagcagcgacaagagcgtgtgtctgttcaccgacttcgacagccagaccaacgtgtcccagagcaaggactccgacgtgtacatcaccgataagaccgtgctggacatgcggagcatggacttcaagagcaactccgccgtggcctggtccaacaagtccgatttcgcctgcgccaacgccttcaacaacagcattatccccgaggacacattcttcccaagccccgagagcagctgcggtaccatcactcaaggtttggcagtgtcaaccatctcatcattctttccacctggctaccaagtgtccttctgcctggtcatggtgctgctgttcgccgtggataccggcctgtacttcagcgtcaagaccaacatccggtccagcaccagagactggaaggaccacaagttcaagtggcggaaggaccctcaggacaagtggcgacgcaagcgcaaagaaaagcaaagcgagacaagcccaaaagaatttctcactatatacgaggacgtgaaagatttgaagacgaggcggaatcatgagcaagagcagacatttcctggcgggggctctactatctactcaatgattcaatcccaaagctccgctccgacttcccaagagcccgcttacactctctactcactgatacagccttcaagaaaatcaggctctcggaaacggaatcattccccatccttcaatagtaccatctatgaagtaatcggtaagagtcaacctaaagctcaaaaccccgctcgcttgagccgcaaggagctggaaaacttcgatgtatatagccgcgccaagagaagcggatctggcgtgaagcagaccctgaatttcgacctgctgaagctggctggcgacgtggaatccaacccaggcccttctagaggccatatgaccgagtacaagcccacggtgcgcctcgccacccgcgacgacgtccccagggccgtacgcaccctcgccgccgcgttcgccgactaccccgccacgcgccacaccgtcgatccggaccgccacatcgagcgggtcaccgagctgcaagaactcttcctcacgcgcgtcgggctcgacatcggcaaggtgtgggtcgcggacgacggcgccgcggtggcggtctggaccacgccggagagcgtcgaagcgggggcggtgttcgccgagatcggcccgcgcatggccgagttgagcggttcccggctggccgcgcagcaacagatggaaggcctcctggcgccgcaccggcccaaggagcccgcgtggttcctggccaccgtcggcgtctcgcccgaccaccagggcaagggtctgggcagcgccgtcgtgctccccggagtggaggcggccgagcgcgccggggtgcccgccttcctggagacctccgcgccccgcaacctccccttctacgagcggctcggcttcaccgtcaccgccgacgtcgaggtgcccgaaggaccgcgcacctggtgcatgacccgcaagcccggtgcctga

SEQ ID NO: 32726 - DNA, 3045 bp, synthetic construct
  source 1..3045: mol_type = other DNA
atggccttaccagtgaccgccttgctcctgccgctggccttgctgctccacgccgccaggccggacatccagatgacacagagccctagcagcctgtctgccagcgtgggagacagagtgaccatcacctgtagagccagccaggacgtgaacacagccgtggcttggtatcagcagaagcctggcaaggcccctaagctgctgatctacagcgcctacttcctgtacagcggcgtgcccagcagattcagcggaagcagaagcggcaccgacttcaccctgacaatatccagcctccagcctgaggacttcgccacctactactgccagcagtacagcagatacagccccgtgacctttggacagggcaccaaggtggaaatcaagagactcgaggacctgaagaacgtgttcccacctgaggtggccgtgttcgagcctagcgaggccgagatcagccacacccagaaagccaccctcgtgtgcctggctaccggcttctaccccgaccatgtggaactgtcttggtgggtcaacggcaaagaggtgcacagcggcgtgtctaccgacccccagccactgaaagaacagcccgccctgaacgacagccggtactgcctgagcagcagactgagagtgtccgccaccttctggcagaacccccggaaccacttcagatgccaggtgcagttctacggcctgagcgagaacgacgagtggacccaggacagagccaagcccgtgacccagatcgtgtctgccgaagcctggggcagagccgattgcggatcccagagcttcggcctgctggaccccaagctgtgctacctgctggatggcatcctgttcatctacggcgtgatcctgaccgccctgttcctgagagtgaagttcagcagaagcgccgacgcccctgcctaccagcagggacagaaccaactgtacaacgagctgaacctgggcagacgggaagagtacgacgtgctggacaagcggagaggcagggaccctgagatgggcggaaagccccggagaaagaacccccaggaaggactgtataacgaactccagaaagacaagatggccgaagcctacagcgagatcggcatgaagggcgagcggagaagaggcaagggccacgatggcctgtaccagggcctgagcaccgccaccaaggacacctatgacgccctgcacatgcaggccctgcctccaagaagggccaagcgatctggatctggagcaacaaacttctcactactcaaacaagcaggtgacgtggaggagaatcccgggcctactagtatggactggatttggcgcatccttttccttgtcggcgctgctaccggcgcgcattccttcgaagttcagctggttgaaagtggtggcggcctggttcaacctggcggatctctgagactgagctgtgccgccagcggcttcaatgtgtacgcctctggaatgcactgggtccgacaggcccctggcaaaggacttgagtgggtcgccaaaatctaccccgacagcgactacacctattacgccgacagcgtgaagggcagattcaccatcagcgccgacaccagcaagaacaccgcctacctccagatgaactccctgagagccgaggacaccgccgtgtactactgtagcagagacagcagcttctactacgtgtacgctatggactactggggccagggcacactggtcacagtctcttctacgcgtatccagaaccctgatcctgccgtgtaccagctgcgggatagcaagagcagcgacaagagcgtgtgtctgttcaccgacttcgacagccagaccaacgtgtcccagagcaaggactccgacgtgtacatcaccgataagaccgtgctggacatgcggagcatggacttcaagagcaactccgccgtggcctggtccaacaagtccgatttcgcctgcgccaacgccttcaacaacagcattatccccgaggacacattcttcccaagccccgagagcagctgcggtaccatcactcaaggtttggcagtgtcaaccatctcatcattctttccacctggctaccaagtgtccttctgcctggtcatggtgctgctgttcgccgtggataccggcctgtacttcagcgtcaagaccaacatccggtccagcaccagagactggaaggaccacaagttcaagtggcggaaggaccctcaggacaagaagagaggccggaagaagctgctgtacatcttcaagcagcctttcatgcggcccgtgcagaccacccaggaagaggacggctgctcctgccggttccccgaggaagaagaaggcggctgcgagctgcgcgccaagagaagcggatctggcgtgaagcagaccctgaatttcgacctgctgaagctggctggcgacgtggaatccaacccaggcccttctagaggccatatgaccgagtacaagcccacggtgcgcctcgccacccgcgacgacgtccccagggccgtacgcaccctcgccgccgcgttcgccgactaccccgccacgcgccacaccgtcgatccggaccgccacatcgagcgggtcaccgagctgcaagaactcttcctcacgcgcgtcgggctcgacatcggcaaggtgtgggtcgcggacgacggcgccgcggtggcggtctggaccacgccggagagcgtcgaagcgggggcggtgttcgccgagatcggcccgcgcatggccgagttgagcggttcccggctggccgcgcagcaacagatggaaggcctcctggcgccgcaccggcccaaggagcccgcgtggttcctggccaccgtcggcgtctcgcccgaccaccagggcaagggtctgggcagcgccgtcgtgctccccggagtggaggcggccgagcgcgccggggtgcccgccttcctggagacctccgcgccccgcaacctccccttctacgagcggctcggcttcaccgtcaccgccgacgtcgaggtgcccgaaggaccgcgcacctggtgcatgacccgcaagcccggtgcctga

SEQ ID NO: 32727 - DNA, 3030 bp, synthetic construct
  source 1..3030: mol_type = other DNA
atggccttaccagtgaccgccttgctcctgccgctggccttgctgctccacgccgccaggccggacatccagatgacacagagccctagcagcctgtctgccagcgtgggagacagagtgaccatcacctgtagagccagccaggatgtgtctacagccgtggcctggtatcagcagaagcctggaaaggcccctaagctgctgatctacagcgccagctttctgtactccggcgtgcccagcagattcagcggaagcagaagcggcaccgacttcaccctgacaatatccagcctccagcctgaggacttcgccacctactactgccagcagtacctgtaccagccttggacattcggccagggcaccaaggtggaaatcaagagactcgaggacctgaagaacgtgttcccacctgaggtggccgtgttcgagcctagcgaggccgagatcagccacacccagaaagccaccctcgtgtgcctggctaccggcttctaccccgaccatgtggaactgtcttggtgggtcaacggcaaagaggtgcacagcggcgtgtctaccgacccccagccactgaaagaacagcccgccctgaacgacagccggtactgcctgagcagcagactgagagtgtccgccaccttctggcagaacccccggaaccacttcagatgccaggtgcagttctacggcctgagcgagaacgacgagtggacccaggacagagccaagcccgtgacccagatcgtgtctgccgaagcctggggcagagccgattgcggatcccagagcttcggcctgctggaccccaagctgtgctacctgctggatggcatcctgttcatctacggcgtgatcctgaccgccctgttcctgagagtgaagttcagcagaagcgccgacgcccctgcctaccagcagggacagaaccaactgtacaacgagctgaacctgggcagacgggaagagtacgacgtgctggacaagcggagaggcagggaccctgagatgggcggaaagccccggagaaagaacccccaggaaggactgtataacgaactccagaaagacaagatggccgaagcctacagcgagatcggcatgaagggcgagcggagaagaggcaagggccacgatggcctgtaccagggcctgagcaccgccaccaaggacacctatgacgccctgcacatgcaggccctgcctccaagaagggccaagcgatctggatctggagcaacaaacttctcactactcaaacaagcaggtgacgtggaggagaatcccgggcctactagtatggactggatttggcgcatccttttccttgtcggcgctgctaccggcgcgcattccttcgaagttcagctggttgagtctggcggaggactggttcaacctggcggaagcctgagactgtcttgtgccgccagcggcttcaacatcgactactacggaatgcactgggtccgacaggcccctggcaaaggacttgaatgggtcgcctctctgtacggcggcagcgatagcacagattacgccgactctgtgaagggcagattcaccatcagcgccgacaccagcaagaacaccgcctacctccagatgaactccctgagagccgaagataccgccgtgtactactgctccagacagtacagcgcctacttcgactattggggccagggaaccctggtcaccgttagctctacgcgtatccagaaccctgatcctgccgtgtaccagctgcgggatagcaagagcagcgacaagagcgtgtgtctgttcaccgacttcgacagccagaccaacgtgtcccagagcaaggactccgacgtgtacatcaccgataagaccgtgctggacatgcggagcatggacttcaagagcaactccgccgtggcctggtccaacaagtccgatttcgcctgcgccaacgccttcaacaacagcattatccccgaggacacattcttcccaagccccgagagcagctgcggtaccatcactcaaggtttggcagtgtcaaccatctcatcattctttccacctggctaccaagtgtccttctgcctggtcatggtgctgctgttcgccgtggataccggcctgtacttcagcgtcaagaccaacatccggtccagcaccagagactggaaggaccacaagttcaagtggcggaaggaccctcaggacaagaagagaggccggaagaagctgctgtacatcttcaagcagcctttcatgcggcccgtgcagaccacccaggaagaggacggctgctcctgccggttccccgaggaagaagaaggcggctgcgagctgcgcgccaagagaagcggatctggcgtgaagcagaccctgaatttcgacctgctgaagctggctggcgacgtggaatccaacccaggcccttctagaggccatatgaccgagtacaagcccacggtgcgcctcgccacccgcgacgacgtccccagggccgtacgcaccctcgccgccgcgttcgccgactaccccgccacgcgccacaccgtcgatccggaccgccacatcgagcgggtcaccgagctgcaagaactcttcctcacgcgcgtcgggctcgacatcggcaaggtgtgggtcgcggacgacggcgccgcggtggcggtctggaccacgccggagagcgtcgaagcgggggcggtgttcgccgagatcggcccgcgcatggccgagttgagcggttcccggctggccgcgcagcaacagatggaaggcctcctggcgccgcaccggcccaaggagcccgcgtggttcctggccaccgtcggcgtctcgcccgaccaccagggcaagggtctgggcagcgccgtcgtgctccccggagtggaggcggccgagcgcgccggggtgcccgccttcctggagacctccgcgccccgcaacctccccttctacgagcggctcggcttcaccgtcaccgccgacgtcgaggtgcccgaaggaccgcgcacctggtgcatgacccgcaagcccggtgcctga

SEQ ID NO: 32728 - DNA, 2970 bp, synthetic construct
  source 1..2970: mol_type = other DNA
atggccttaccagtgaccgccttgctcctgccgctggccttgctgctccacgccgccaggccggacatccagatgacacagagccctagcagcctgtctgccagcgtgggagacagagtgaccatcacctgtagagccagccaggacgtgaacacagccgtggcttggtatcagcagaagcctggcaaggcccctaagctgctgatctacagcgcctacttcctgtacagcggcgtgcccagcagattcagcggaagcagaagcggcaccgacttcaccctgacaatatccagcctccagcctgaggacttcgccacctactactgccagcagtacagcagatacagccccgtgacctttggacagggcaccaaggtggaaatcaagagactcgaggacctgaagaacgtgttcccacctgaggtggccgtgttcgagcctagcgaggccgagatcagccacacccagaaagccaccctcgtgtgcctggctaccggcttctaccccgaccatgtggaactgtcttggtgggtcaacggcaaagaggtgcacagcggcgtgtctaccgacccccagccactgaaagaacagcccgccctgaacgacagccggtactgcctgagcagcagactgagagtgtccgccaccttctggcagaacccccggaaccacttcagatgccaggtgcagttctacggcctgagcgagaacgacgagtggacccaggacagagccaagcccgtgacccagatcgtgtctgccgaagcctggggcagagccgattgcggatcccagagcttcggcctgctggaccccaagctgtgctacctgctggatggcatcctgttcatctacggcgtgatcctgaccgccctgttcctgagagtgaagttcagcagaagcgccgacgcccctgcctaccagcagggacagaaccaactgtacaacgagctgaacctgggcagacgggaagagtacgacgtgctggacaagcggagaggcagggaccctgagatgggcggaaagccccggagaaagaacccccaggaaggactgtataacgaactccagaaagacaagatggccgaagcctacagcgagatcggcatgaagggcgagcggagaagaggcaagggccacgatggcctgtaccagggcctgagcaccgccaccaaggacacctatgacgccctgcacatgcaggccctgcctccaagaagggccaagcgatctggatctggagcaacaaacttctcactactcaaacaagcaggtgacgtggaggagaatcccgggcctactagtatggactggatttggcgcatccttttccttgtcggcgctgctaccggcgcgcattccttcgaagttcagctggttgaaagtggtggcggcctggttcaacctggcggatctctgagactgagctgtgccgccagcggcttcaatgtgtacgcctctggaatgcactgggtccgacaggcccctggcaaaggacttgagtgggtcgccaaaatctaccccgacagcgactacacctattacgccgacagcgtgaagggcagattcaccatcagcgccgacaccagcaagaacaccgcctacctccagatgaactccctgagagccgaggacaccgccgtgtactactgtagcagagacagcagcttctactacgtgtacgctatggactactggggccagggcacactggtcacagtctcttctacgcgtatccagaaccctgatcctgccgtgtaccagctgcgggatagcaagagcagcgacaagagcgtgtgtctgttcaccgacttcgacagccagaccaacgtgtcccagagcaaggactccgacgtgtacatcaccgataagaccgtgctggacatgcggagcatggacttcaagagcaactccgccgtggcctggtccaacaagtccgatttcgcctgcgccaacgccttcaacaacagcattatccccgaggacacattcttcccaagccccgagagcagctgcggtaccatcactcaaggtttggcagtgtcaaccatctcatcattctttccacctggctaccaagtgtccttctgcctggtcatggtgctgctgttcgccgtggataccggcctgtacttcagcgtcaagagaggccggaagaagctgctgtacatcttcaagcagcctttcatgcggcccgtgcagaccacccaggaagaggacggctgctcctgccggttccccgaggaagaagaaggcggctgcgagctgcgcgccaagagaagcggatctggcgtgaagcagaccctgaatttcgacctgctgaagctggctggcgacgtggaatccaacccaggcccttctagaggccatatgaccgagtacaagcccacggtgcgcctcgccacccgcgacgacgtccccagggccgtacgcaccctcgccgccgcgttcgccgactaccccgccacgcgccacaccgtcgatccggaccgccacatcgagcgggtcaccgagctgcaagaactcttcctcacgcgcgtcgggctcgacatcggcaaggtgtgggtcgcggacgacggcgccgcggtggcggtctggaccacgccggagagcgtcgaagcgggggcggtgttcgccgagatcggcccgcgcatggccgagttgagcggttcccggctggccgcgcagcaacagatggaaggcctcctggcgccgcaccggcccaaggagcccgcgtggttcctggccaccgtcggcgtctcgcccgaccaccagggcaagggtctgggcagcgccgtcgtgctccccggagtggaggcggccgagcgcgccggggtgcccgccttcctggagacctccgcgccccgcaacctccccttctacgagcggctcggcttcaccgtcaccgccgacgtcgaggtgcccgaaggaccgcgcacctggtgcatgacccgcaagcccggtgcctga

SEQ ID NO: 32729 - DNA, 2955 bp, synthetic construct
  source 1..2955: mol_type = other DNA
atggccttaccagtgaccgccttgctcctgccgctggccttgctgctccacgccgccaggccggacatccagatgacacagagccctagcagcctgtctgccagcgtgggagacagagtgaccatcacctgtagagccagccaggatgtgtctacagccgtggcctggtatcagcagaagcctggaaaggcccctaagctgctgatctacagcgccagctttctgtactccggcgtgcccagcagattcagcggaagcagaagcggcaccgacttcaccctgacaatatccagcctccagcctgaggacttcgccacctactactgccagcagtacctgtaccagccttggacattcggccagggcaccaaggtggaaatcaagagactcgaggacctgaagaacgtgttcccacctgaggtggccgtgttcgagcctagcgaggccgagatcagccacacccagaaagccaccctcgtgtgcctggctaccggcttctaccccgaccatgtggaactgtcttggtgggtcaacggcaaagaggtgcacagcggcgtgtctaccgacccccagccactgaaagaacagcccgccctgaacgacagccggtactgcctgagcagcagactgagagtgtccgccaccttctggcagaacccccggaaccacttcagatgccaggtgcagttctacggcctgagcgagaacgacgagtggacccaggacagagccaagcccgtgacccagatcgtgtctgccgaagcctggggcagagccgattgcggatcccagagcttcggcctgctggaccccaagctgtgctacctgctggatggcatcctgttcatctacggcgtgatcctgaccgccctgttcctgagagtgaagttcagcagaagcgccgacgcccctgcctaccagcagggacagaaccaactgtacaacgagctgaacctgggcagacgggaagagtacgacgtgctggacaagcggagaggcagggaccctgagatgggcggaaagccccggagaaagaacccccaggaaggactgtataacgaactccagaaagacaagatggccgaagcctacagcgagatcggcatgaagggcgagcggagaagaggcaagggccacgatggcctgtaccagggcctgagcaccgccaccaaggacacctatgacgccctgcacatgcaggccctgcctccaagaagggccaagcgatctggatctggagcaacaaacttctcactactcaaacaagcaggtgacgtggaggagaatcccgggcctactagtatggactggatttggcgcatccttttccttgtcggcgctgctaccggcgcgcattccttcgaagttcagctggttgagtctggcggaggactggttcaacctggcggaagcctgagactgtcttgtgccgccagcggcttcaacatcgactactacggaatgcactgggtccgacaggcccctggcaaaggacttgaatgggtcgcctctctgtacggcggcagcgatagcacagattacgccgactctgtgaagggcagattcaccatcagcgccgacaccagcaagaacaccgcctacctccagatgaactccctgagagccgaagataccgccgtgtactactgctccagacagtacagcgcctacttcgactattggggccagggaaccctggtcaccgttagctctacgcgtatccagaaccctgatcctgccgtgtaccagctgcgggatagcaagagcagcgacaagagcgtgtgtctgttcaccgacttcgacagccagaccaacgtgtcccagagcaaggactccgacgtgtacatcaccgataagaccgtgctggacatgcggagcatggacttcaagagcaactccgccgtggcctggtccaacaagtccgatttcgcctgcgccaacgccttcaacaacagcattatccccgaggacacattcttcccaagccccgagagcagctgcggtaccatcactcaaggtttggcagtgtcaaccatctcatcattctttccacctggctaccaagtgtccttctgcctggtcatggtgctgctgttcgccgtggataccggcctgtacttcagcgtcaagagaggccggaagaagctgctgtacatcttcaagcagcctttcatgcggcccgtgcagaccacccaggaagaggacggctgctcctgccggttccccgaggaagaagaaggcggctgcgagctgcgcgccaagagaagcggatctggcgtgaagcagaccctgaatttcgacctgctgaagctggctggcgacgtggaatccaacccaggcccttctagaggccatatgaccgagtacaagcccacggtgcgcctcgccacccgcgacgacgtccccagggccgtacgcaccctcgccgccgcgttcgccgactaccccgccacgcgccacaccgtcgatccggaccgccacatcgagcgggtcaccgagctgcaagaactcttcctcacgcgcgtcgggctcgacatcggcaaggtgtgggtcgcggacgacggcgccgcggtggcggtctggaccacgccggagagcgtcgaagcgggggcggtgttcgccgagatcggcccgcgcatggccgagttgagcggttcccggctggccgcgcagcaacagatggaaggcctcctggcgccgcaccggcccaaggagcccgcgtggttcctggccaccgtcggcgtctcgcccgaccaccagggcaagggtctgggcagcgccgtcgtgctccccggagtggaggcggccgagcgcgccggggtgcccgccttcctggagacctccgcgccccgcaacctccccttctacgagcggctcggcttcaccgtcaccgccgacgtcgaggtgcccgaaggaccgcgcacctggtgcatgacccgcaagcccggtgcctga

SEQ ID NO: 32730 - DNA, 1887 bp, synthetic construct
  source 1..1887: mol_type = other DNA
atggactggatttggcgcatccttttccttgtcggcgctgctaccggcgcgcattccttcgaaggactcgaggacctgaagaacgtgttcccacctgaggtggccgtgttcgagcctagcgaggccgagatcagccacacccagaaagccaccctcgtgtgcctggctaccggcttctaccccgaccatgtggaactgtcttggtgggtcaacggcaaagaggtgcacagcggcgtgtgtaccgacccccagccactgaaagaacagcccgccctgaacgacagccggtactgcctgagcagcagactgagagtgtccgccaccttctggcagaacccccggaaccacttcagatgccaggtgcagttctacggcctgagcgagaacgacgagtggacccaggacagagccaagcccgtgacccagatcgtgtctgccgaagcctggggcagagccgattgcggctttaccagcgagagctaccagcagggcgtgctgagcgccaccatcctgtacgagatcctgctgggcaaggccaccctgtacgccgtgctggtgtctgccctggtgctgatggctatggtcaagcggaaggacagccggggaagggccaagcgatctggatctggagcaacaaacttctcactactcaaacaagcaggtgacgtggaggagaatcccgggcctactagcaccatggccttaccagtgaccgccttgctcctgccgctggccttgctgctccacgccgccaggccggacatccagctgacacagagccctagcacactgagcgccagcatgggcgacagagtgaccatcacatgtagcgcctctagcagcgtgcggttcatccactggtatcagcagaagcctggcaaggcccctaagcggctgatctacgataccagcaaactggcctctggcgtgcccagcagattttctggctctggcagcggcaccgacttcaccctgacaatatctagcctccagcctgaggacttcgccacctactactgtcagcagtggggcagcagccctttcacctttggacagggcaccaaggtggaaatcaagggcggaggcggaagtggaggcggaggatctggcggcggaggctctgaagtgcagctggttgagtacggtggcggactggttcaacctggcggtagcctgagactgtcttgtgccgccagcggcttcaacatcaaggactactatatccactgggtccgacaggccccaggcaaaggacttgaatgggttgcctggatcgaccccgagaacggcgataccgagttcgtgcccaagtttcagggcagagccaccatgagcgccgacacctctaagaacacagcctacctccagatgaacagcctgagagccgaggacaccgccgtgtactactgtaaaaccggcggcttttggggccagggcacactggtcacagtcagctctacgcgtatccagaaccctgatcctgccgtgtaccagctgcgggatagcaagagcagcgacaagagcgtgtgtctgttcaccgacttcgacagccagaccaacgtgtcccagagcaaggactccgacgtgtacatcaccgataagtgcgtgctggacatgcggagcatggacttcaagagcaactccgccgtggcctggtccaacaagtccgatttcgcctgcgccaacgccttcaacaacagcattatccccgaggacacattcttcccaagccccgagagcagctgcgacgtgaagctggtggaaaagagcttcgagacagacaccaacctgaacttccagaacctgagcgtgatcggcttcagaatcctgctgctgaaagtggccggctttaacctgctgatgaccctgcggctgtggtccagctaa

SEQ ID NO: 32731 - DNA, 2532 bp, synthetic construct
  source 1..2532: mol_type = other DNA
atggccttaccagtgaccgccttgctcctgccgctggccttgctgctccacgccgccaggccggacatccagctgacacagagccctagcacactgagcgccagcatgggcgacagagtgaccatcacatgtagcgcctctagcagcgtgcggttcatccactggtatcagcagaagcctggcaaggcccctaagcggctgatctacgataccagcaaactggcctctggcgtgcccagcagattttctggctctggcagcggcaccgacttcaccctgacaatatctagcctccagcctgaggacttcgccacctactactgtcagcagtggggcagcagccctttcacctttggacagggcaccaaggtggaaatcaagctcgaggacctgaagaacgtgttcccacctgaggtggccgtgttcgagcctagcgaggccgagatcagccacacccagaaagccaccctcgtgtgcctggctaccggcttctaccccgaccatgtggaactgtcttggtgggtcaacggcaaagaggtgcacagcggcgtgtgtaccgacccccagccactgaaagaacagcccgccctgaacgacagccggtactgcctgagcagcagactgagagtgtccgccaccttctggcagaacccccggaaccacttcagatgccaggtgcagttctacggcctgagcgagaacgacgagtggacccaggacagagccaagcccgtgacccagatcgtgtctgccgaagcctggggcagagccgattgcggctttaccagcgagagctaccagcagggcgtgctgagcgccaccatcctgtacgagatcctgctgggcaaggccaccctgtacgccgtgctggtgtctgccctggtgctgatggctatggtcaagcggaaggacagccggggaagggccaagcgatctggatctggagcaacaaacttctcactactcaaacaagcaggtgacgtggaggagaatcccgggcctactagtatggactggatttggcgcatccttttccttgtcggcgctgctaccggcgcgcattccttcgaagtgcagctggttgagtacggtggcggactggttcaacctggcggtagcctgagactgtcttgtgccgccagcggcttcaacatcaaggactactatatccactgggtccgacaggccccaggcaaaggacttgaatgggttgcctggatcgaccccgagaacggcgataccgagttcgtgcccaagtttcagggcagagccaccatgagcgccgacacctctaagaacacagcctacctccagatgaacagcctgagagccgaggacaccgccgtgtactactgtaaaaccggcggcttttggggccagggcacactggtcacagtcagctctacgcgtatccagaaccctgatcctgccgtgtaccagctgcgggatagcaagagcagcgacaagagcgtgtgtctgttcaccgacttcgacagccagaccaacgtgtcccagagcaaggactccgacgtgtacatcaccgataagtgcgtgctggacatgcggagcatggacttcaagagcaactccgccgtggcctggtccaacaagtccgatttcgcctgcgccaacgccttcaacaacagcattatccccgaggacacattcttcccaagccccgagagcagctgcgacgtgaagctggtggaaaagagcttcgagacagacaccaacctgaacttccagaacctgagcgtgatcggcttcagaatcctgctgctgaaagtggccggctttaacctgctgatgaccctgcggctgtggtccagccgcgccaagagaagcggatctggcgtgaagcagaccctgaatttcgacctgctgaagctggctggcgacgtggaatccaacccaggcccttctagaggccatatgaccgagtacaagcccacggtgcgcctcgccacccgcgacgacgtccccagggccgtacgcaccctcgccgccgcgttcgccgactaccccgccacgcgccacaccgtcgatccggaccgccacatcgagcgggtcaccgagctgcaagaactcttcctcacgcgcgtcgggctcgacatcggcaaggtgtgggtcgcggacgacggcgccgcggtggcggtctggaccacgccggagagcgtcgaagcgggggcggtgttcgccgagatcggcccgcgcatggccgagttgagcggttcccggctggccgcgcagcaacagatggaaggcctcctggcgccgcaccggcccaaggagcccgcgtggttcctggccaccgtcggcgtctcgcccgaccaccagggcaagggtctgggcagcgccgtcgtgctccccggagtggaggcggccgagcgcgccggggtgcccgccttcctggagacctccgcgccccgcaacctccccttctacgagcggctcggcttcaccgtcaccgccgacgtcgaggtgcccgaaggaccgcgcacctggtgcatgacccgcaagcccggtgcctga

SEQ ID NO: 32732 - DNA, 2535 bp, synthetic construct
  misc_feature 1165: note = n is a, c, g, or t
  source 1..2535: mol_type = other DNA
atggccttaccagtgaccgccttgctcctgccgctggccttgctgctccacgccgccaggccggacatccagctgacacagagccctagcacactgagcgccagcatgggcgacagagtgaccatcacatgtagcgcctctagcagcgtgcggttcatccactggtatcagcagaagcctggcaaggcccctaagcggctgatctacgataccagcaaactggcctctggcgtgcccagcagattttctggctctggcagcggcaccgacttcaccctgacaatatctagcctccagcctgaggacttcgccacctactactgtcagcagtggggcagcagccctttcacctttggacagggcaccaaggtggaaatcaagctcgagatccagaaccctgatcctgccgtgtaccagctgcgggatagcaagagcagcgacaagagcgtgtgtctgttcaccgacttcgacagccagaccaacgtgtcccagagcaaggactccgacgtgtacatcaccgataagtgcgtgctggacatgcggagcatggacttcaagagcaactccgccgtggcctggtccaacaagtccgatttcgcctgcgccaacgccttcaacaacagcattatccccgaggacacattcttcccaagcagcgacgtgccctgcgacgtgaagctggtggaaaagagcttcgagacagacaccaacctgaacttccagaacctgagcgtgatcggcttcagaatcctgctgctgaaagtggccggctttaacctgctgatgaccctgcggctgtggtccagccgcgccaagagaagcggatctggcgtgaagcagaccctgaatttcgacctgctgaagctggctggcgacgtggaatccaacccaggccctactagtatggactggatttggcgcatccttttccttgtcggcgctgctaccggcgcgcattccttcgaagtgcagctggttgagtacggtggcggactggttcaacctggcggtagcctgagactgtcttgtgccgccagcggcttcaacatcaaggactactatatccactgggtccgacaggccccaggcaaaggacttgaatgggttgcctggatcgaccccgagaacggcgataccgagttcgtgcccaagtttcagggcaganccaccatgagcgccgacacctctaagaacacagcctacctccagatgaacagcctgagagccgaggacaccgccgtgtactactgtaaaaccggcggcttttggggccagggcacactggtcacagtcagctctacgcgtgaggacctgaagaacgtgttcccacctgaggtggccgtgttcgagcctagcaaggccgagatcgcccacacccagaaagccaccctcgtgtgcctggctaccggcttctaccccgaccatgtggaactgtcttggtgggtcaacggcaaagaggtgcacagcggcgtgtgtaccgacccccagccactgaaagaacagcccgccctgaacgacagccggtactgcctgagcagcagactgagagtgtccgccaccttctggcagaacccccggaaccacttcagatgccaggtgcagttctacggcctgagcgagaacgacgagtggacccaggacagagccaagcccgtgacccagatcgtgtctgccgaagcctggggcagagccgattgcggcatcaccagcgccagctaccaccagggcgtgctgagcgccaccatcctgtacgagatcctgctgggcaaggccaccctgtacgccgtgctggtgtctgccctggtgctgatggctatggtcaagcggaaggacagccggggaagggccaagcgatctggatctggagcaacaaacttctcactactcaaacaagcaggtgacgtggaggagaatcccgggccttctagaggccatatgaccgagtacaagcccacggtgcgcctcgccacccgcgacgacgtccccagggccgtacgcaccctcgccgccgcgttcgccgactaccccgccacgcgccacaccgtcgatccggaccgccacatcgagcgggtcaccgagctgcaagaactcttcctcacgcgcgtcgggctcgacatcggcaaggtgtgggtcgcggacgacggcgccgcggtggcggtctggaccacgccggagagcgtcgaagcgggggcggtgttcgccgagatcggcccgcgcatggccgagttgagcggttcccggctggccgcgcagcaacagatggaaggcctcctggcgccgcaccggcccaaggagcccgcgtggttcctggccaccgtcggcgtctcgcccgaccaccagggcaagggtctgggcagcgccgtcgtgctccccggagtggaggcggccgagcgcgccggggtgcccgccttcctggagacctccgcgccccgcaacctccccttctacgagcggctcggcttcaccgtcaccgccgacgtcgaggtgcccgaaggaccgcgcacctggtgcatgacccgcaagcccggtgcctga

SEQ ID NO: 32733 - DNA, 1833 bp, synthetic construct
  source 1..1833: mol_type = other DNA
atggccttaccagtgaccgccttgctcctgccgctggccttgctgctccacgccgccaggccggacatccagctgacacagagccctagcacactgagcgccagcatgggcgacagagtgaccatcacatgtagcgcctctagcagcgtgcggttcatccactggtatcagcagaagcctggcaaggcccctaagcggctgatctacgataccagcaaactggcctctggcgtgcccagcagattttctggctctggcagcggcaccgacttcaccctgacaatatctagcctccagcctgaggacttcgccacctactactgtcagcagtggggcagcagccctttcacctttggacagggcaccaaggtggaaatcaagctcgaggacctgaagaacgtgttcccacctgaggtggccgtgttcgagcctagcaaggccgagatcgcccacacccagaaagccaccctcgtgtgcctggctaccggcttctaccccgaccatgtggaactgtcttggtgggtcaacggcaaagaggtgcacagcggcgtgtgtaccgacccccagccactgaaagaacagcccgccctgaacgacagccggtactgcctgagcagcagactgagagtgtccgccaccttctggcagaacccccggaaccacttcagatgccaggtgcagttctacggcctgagcgagaacgacgagtggacccaggacagagccaagcccgtgacccagatcgtgtctgccgaagcctggggcagagccgattgcggcatcaccagcgccagctaccaccagggcgtgctgagcgccaccatcctgtacgagatcctgctgggcaaggccaccctgtacgccgtgctggtgtctgccctggtgctgatggctatggtcaagcggaaggacagccggggaagggccaagcgatctggatctggagcaacaaacttctcactactcaaacaagcaggtgacgtggaggagaatcccgggcctactagtatggactggatttggcgcatccttttccttgtcggcgctgctaccggcgcgcattccttcgaagtgcagctggttgagtacggtggcggactggttcaacctggcggtagcctgagactgtcttgtgccgccagcggcttcaacatcaaggactactatatccactgggtccgacaggccccaggcaaaggacttgaatgggttgcctggatcgaccccgagaacggcgataccgagttcgtgcccaagtttcagggcagagccaccatgagcgccgacacctctaagaacacagcctacctccagatgaacagcctgagagccgaggacaccgccgtgtactactgtaaaaccggcggcttttggggccagggcacactggtcacagtcagctctacgcgtatccagaaccctgatcctgccgtgtaccagctgcgggatagcaagagcagcgacaagagcgtgtgtctgttcaccgacttcgacagccagaccaacgtgtcccagagcaaggactccgacgtgtacatcaccgataagtgcgtgctggacatgcggagcatggacttcaagagcaactccgccgtggcctggtccaacaagtccgatttcgcctgcgccaacgccttcaacaacagcattatccccgaggacacattcttcccaagcagcgacgtgccctgcgacgtgaagctggtggaaaagagcttcgagacagacaccaacctgaacttccagaacctgagcgtgatcggcttcagaatcctgctgctgaaagtggccggctttaacctgctgatgaccctgcggctgtggtccagctaa

SEQ ID NO: 32734 - DNA, 1845 bp, synthetic construct
  source 1..1845: mol_type = other DNA
atggccttaccagtgaccgccttgctcctgccgctggccttgctgctccacgccgccaggccggacatccagctgacacagagccctagcacactgagcgccagcatgggcgacagagtgaccatcacatgtagcgcctctagcagcgtgcggttcatccactggtatcagcagaagcctggcaaggcccctaagcggctgatctacgataccagcaaactggcctctggcgtgcccagcagattttctggctctggcagcggcaccgacttcaccctgacaatatctagcctccagcctgaggacttcgccacctactactgtcagcagtggggcagcagccctttcacctttggacagggcaccaaggtggaaatcaagctcgagatccagaaccctgatcctgccgtgtaccagctgcgggatagcaagagcagcgacaagagcgtgtgtctgttcaccgacttcgacagccagaccaacgtgtcccagagcaaggactccgacgtgtacatcaccgataagtgcgtgctggacatgcggagcatggacttcaagagcaactccgccgtggcctggtccaacaagtccgatttcgcctgcgccaacgccttcaacaacagcattatccccgaggacacattcttcccaagcagcgacgtgccctgcgacgtgaagctggtggaaaagagcttcgagacagacaccaacctgaacttccagaacctgagcgtgatcggcttcagaatcctgctgctgaaagtggccggctttaacctgctgatgaccctgcggctgtggtccagccgcgccaagagaagcggatctggcgtgaagcagaccctgaatttcgacctgctgaagctggctggcgacgtggaatccaacccaggccctactagtatggactggatttggcgcatccttttccttgtcggcgctgctaccggcgcgcattccttcgaagtgcagctggttgagtacggtggcggactggttcaacctggcggtagcctgagactgtcttgtgccgccagcggcttcaacatcaaggactactatatccactgggtccgacaggccccaggcaaaggacttgaatgggttgcctggatcgaccccgagaacggcgataccgagttcgtgcccaagtttcagggcagagccaccatgagcgccgacacctctaagaacacagcctacctccagatgaacagcctgagagccgaggacaccgccgtgtactactgtaaaaccggcggcttttggggccagggcacactggtcacagtcagctctacgcgtgaggacctgaagaacgtgttcccacctgaggtggccgtgttcgagcctagcgaggccgagatcagccacacccagaaagccaccctcgtgtgcctggctaccggcttctaccccgaccatgtggaactgtcttggtgggtcaacggcaaagaggtgcacagcggcgtgtgtaccgacccccagccactgaaagaacagcccgccctgaacgacagccggtactgcctgagcagcagactgagagtgtccgccaccttctggcagaacccccggaaccacttcagatgccaggtgcagttctacggcctgagcgagaacgacgagtggacccaggacagagccaagcccgtgacccagatcgtgtctgccgaagcctggggcagagccgattgcggctttaccagcgagagctaccagcagggcgtgctgagcgccaccatcctgtacgagatcctgctgggcaaggccaccctgtacgccgtgctggtgtctgccctggtgctgatggctatggtcaagcggaaggacagccggggataa

SEQ ID NO: 32735 - DNA, 3114 bp, synthetic construct
  source 1..3114: mol_type = other DNA
atggccttaccagtgaccgccttgctcctgccgctggccttgctgctccacgccgccaggccggacatccagctgacacagagccctagcacactgagcgccagcatgggcgacagagtgaccatcacatgtagcgcctctagcagcgtgcggttcatccactggtatcagcagaagcctggcaaggcccctaagcggctgatctacgataccagcaaactggcctctggcgtgcccagcagattttctggctctggcagcggcaccgacttcaccctgacaatatctagcctccagcctgaggacttcgccacctactactgtcagcagtggggcagcagccctttcacctttggacagggcaccaaggtggaaatcaagctcgaggacctgaagaacgtgttcccacctgaggtggccgtgttcgagcctagcgaggccgagatcagccacacccagaaagccaccctcgtgtgcctggctaccggcttctaccccgaccatgtggaactgtcttggtgggtcaacggcaaagaggtgcacagcggcgtgtctaccgacccccagccactgaaagaacagcccgccctgaacgacagccggtactgcctgagcagcagactgagagtgtccgccaccttctggcagaacccccggaaccacttcagatgccaggtgcagttctacggcctgagcgagaacgacgagtggacccaggacagagccaagcccgtgacccagatcgtgtctgccgaagcctggggcagagccgattgcggatcccagagcttcggcctgctggaccccaagctgtgctacctgctggatggcatcctgttcatctacggcgtgatcctgaccgccctgttcctgagagtgaagttcagcagaagcgccgacgcccctgcctaccagcagggacagaaccaactgtacaacgagctgaacctgggcagacgggaagagtacgacgtgctggacaagcggagaggcagggaccctgagatgggcggaaagccccggagaaagaacccccaggaaggactgtataacgaactccagaaagacaagatggccgaagcctacagcgagatcggcatgaagggcgagcggagaagaggcaagggccacgatggcctgtaccagggcctgagcaccgccaccaaggacacctatgacgccctgcacatgcaggccctgcctccaagaagggccaagcgatctggatctggagcaacaaacttctcactactcaaacaagcaggtgacgtggaggagaatcccgggcctactagtatggactggatttggcgcatccttttccttgtcggcgctgctaccggcgcgcattccttcgaagtgcagctggttgagtacggtggcggactggttcaacctggcggtagcctgagactgtcttgtgccgccagcggcttcaacatcaaggactactatatccactgggtccgacaggccccaggcaaaggacttgaatgggttgcctggatcgaccccgagaacggcgataccgagttcgtgcccaagtttcagggcagagccaccatgagcgccgacacctctaagaacacagcctacctccagatgaacagcctgagagccgaggacaccgccgtgtactactgtaaaaccggcggcttttggggccagggcacactggtcacagtcagctctacgcgtatccagaaccctgatcctgccgtgtaccagctgcgggatagcaagagcagcgacaagagcgtgtgtctgttcaccgacttcgacagccagaccaacgtgtcccagagcaaggactccgacgtgtacatcaccgataagaccgtgctggacatgcggagcatggacttcaagagcaactccgccgtggcctggtccaacaagtccgatttcgcctgcgccaacgccttcaacaacagcattatccccgaggacacattcttcccaagccccgagagcagctgcggtacccagagttttgggttgttggaccctaaattgtgctatctgttggacggaatcctgttcatttacggagtgatcctgaccgcattgttcctgcgggttaagttttccagatccgcagacgcacccgcttaccaacaagggcagaaccaactctacaatgaacttaatttggggcggagggaagagtacgacgttctggacaaaaggaggggacgagatcccgagatgggcggaaagcctcgaaggaagaatccgcaagaggggctttataacgaactccagaaagataaaatggcagaagcctatagtgagattgggatgaagggagaaaggaggaggggtaaaggtcacgatgggttgtaccaaggattgagcacagccactaaagatacctatgatgcgctccacatgcaggccctgccgccaagacgcgccaagagaagcggatctggcgtgaagcagaccctgaatttcgacctgctgaagctggctggcgacgtggaatccaacccaggcccttctagaggccatatgaccgagtacaagcccacggtgcgcctcgccacccgcgacgacgtccccagggccgtacgcaccctcgccgccgcgttcgccgactaccccgccacgcgccacaccgtcgatccggaccgccacatcgagcgggtcaccgagctgcaagaactcttcctcacgcgcgtcgggctcgacatcggcaaggtgtgggtcgcggacgacggcgccgcggtggcggtctggaccacgccggagagcgtcgaagcgggggcggtgttcgccgagatcggcccgcgcatggccgagttgagcggttcccggctggccgcgcagcaacagatggaaggcctcctggcgccgcaccggcccaaggagcccgcgtggttcctggccaccgtcggcgtctcgcccgaccaccagggcaagggtctgggcagcgccgtcgtgctccccggagtggaggcggccgagcgcgccggggtgcccgccttcctggagacctccgcgccccgcaacctccccttctacgagcggctcggcttcaccgtcaccgccgacgtcgaggtgcccgaaggaccgcgcacctggtgcatgacccgcaagcccggtgcctga

SEQ ID NO: 32736 - DNA, 2874 bp, synthetic construct
  source 1..2874: mol_type = other DNA
atggccttaccagtgaccgccttgctcctgccgctggccttgctgctccacgccgccaggccggacatccagctgacacagagccctagcacactgagcgccagcatgggcgacagagtgaccatcacatgtagcgcctctagcagcgtgcggttcatccactggtatcagcagaagcctggcaaggcccctaagcggctgatctacgataccagcaaactggcctctggcgtgcccagcagattttctggctctggcagcggcaccgacttcaccctgacaatatctagcctccagcctgaggacttcgccacctactactgtcagcagtggggcagcagccctttcacctttggacagggcaccaaggtggaaatcaagctcgaggacctgaagaacgtgttcccacctgaggtggccgtgttcgagcctagcgaggccgagatcagccacacccagaaagccaccctcgtgtgcctggctaccggcttctaccccgaccatgtggaactgtcttggtgggtcaacggcaaagaggtgcacagcggcgtgtctaccgacccccagccactgaaagaacagcccgccctgaacgacagccggtactgcctgagcagcagactgagagtgtccgccaccttctggcagaacccccggaaccacttcagatgccaggtgcagttctacggcctgagcgagaacgacgagtggacccaggacagagccaagcccgtgacccagatcgtgtctgccgaagcctggggcagagccgattgcggatcccagagcttcggcctgctggaccccaagctgtgctacctgctggatggcatcctgttcatctacggcgtgatcctgaccgccctgttcctgagagtgaagttcagcagaagcgccgacgcccctgcctaccagcagggacagaaccaactgtacaacgagctgaacctgggcagacgggaagagtacgacgtgctggacaagcggagaggcagggaccctgagatgggcggaaagccccggagaaagaacccccaggaaggactgtataacgaactccagaaagacaagatggccgaagcctacagcgagatcggcatgaagggcgagcggagaagaggcaagggccacgatggcctgtaccagggcctgagcaccgccaccaaggacacctatgacgccctgcacatgcaggccctgcctccaagaagggccaagcgatctggatctggagcaacaaacttctcactactcaaacaagcaggtgacgtggaggagaatcccgggcctactagtatggactggatttggcgcatccttttccttgtcggcgctgctaccggcgcgcattccttcgaagtgcagctggttgagtacggtggcggactggttcaacctggcggtagcctgagactgtcttgtgccgccagcggcttcaacatcaaggactactatatccactgggtccgacaggccccaggcaaaggacttgaatgggttgcctggatcgaccccgagaacggcgataccgagttcgtgcccaagtttcagggcagagccaccatgagcgccgacacctctaagaacacagcctacctccagatgaacagcctgagagccgaggacaccgccgtgtactactgtaaaaccggcggcttttggggccagggcacactggtcacagtcagctctacgcgtatccagaaccctgatcctgccgtgtaccagctgcgggatagcaagagcagcgacaagagcgtgtgtctgttcaccgacttcgacagccagaccaacgtgtcccagagcaaggactccgacgtgtacatcaccgataagaccgtgctggacatgcggagcatggacttcaagagcaactccgccgtggcctggtccaacaagtccgatttcgcctgcgccaacgccttcaacaacagcattatccccgaggacacattcttcccaagccccgagagcagctgcggtaccatcactcaaggtttggcagtgtcaaccatctcatcattctttccacctggctaccaagtgtccttctgcctggtcatggtgctgctgttcgccgtggataccggcctgtacttcagcgtcaagaccaacatccggtccagcaccagagactggaaggaccacaagttcaagtggcggaaggaccctcaggacaagagggccaagcgatctggatctggagcaacaaacttctcactactcaaacaagcaggtgacgtggaggagaatcccgggccttctagaggccatatgaccgagtacaagcccacggtgcgcctcgccacccgcgacgacgtccccagggccgtacgcaccctcgccgccgcgttcgccgactaccccgccacgcgccacaccgtcgatccggaccgccacatcgagcgggtcaccgagctgcaagaactcttcctcacgcgcgtcgggctcgacatcggcaaggtgtgggtcgcggacgacggcgccgcggtggcggtctggaccacgccggagagcgtcgaagcgggggcggtgttcgccgagatcggcccgcgcatggccgagttgagcggttcccggctggccgcgcagcaacagatggaaggcctcctggcgccgcaccggcccaaggagcccgcgtggttcctggccaccgtcggcgtctcgcccgaccaccagggcaagggtctgggcagcgccgtcgtgctccccggagtggaggcggccgagcgcgccggggtgcccgccttcctggagacctccgcgccccgcaacctccccttctacgagcggctcggcttcaccgtcaccgccgacgtcgaggtgcccgaaggaccgcgcacctggtgcatgacccgcaagcccggtgcctga

SEQ ID NO: 32737 - DNA, 2901 bp, synthetic construct
  source 1..2901: mol_type = other DNA
atggccttaccagtgaccgccttgctcctgccgctggccttgctgctccacgccgccaggccggacatccagctgacacagagccctagcacactgagcgccagcatgggcgacagagtgaccatcacatgtagcgcctctagcagcgtgcggttcatccactggtatcagcagaagcctggcaaggcccctaagcggctgatctacgataccagcaaactggcctctggcgtgcccagcagattttctggctctggcagcggcaccgacttcaccctgacaatatctagcctccagcctgaggacttcgccacctactactgtcagcagtggggcagcagccctttcacctttggacagggcaccaaggtggaaatcaagctcgaggacctgaagaacgtgttcccacctgaggtggccgtgttcgagcctagcgaggccgagatcagccacacccagaaagccaccctcgtgtgcctggctaccggcttctaccccgaccatgtggaactgtcttggtgggtcaacggcaaagaggtgcacagcggcgtgtctaccgacccccagccactgaaagaacagcccgccctgaacgacagccggtactgcctgagcagcagactgagagtgtccgccaccttctggcagaacccccggaaccacttcagatgccaggtgcagttctacggcctgagcgagaacgacgagtggacccaggacagagccaagcccgtgacccagatcgtgtctgccgaagcctggggcagagccgattgcggatcccagagcttcggcctgctggaccccaagctgtgctacctgctggatggcatcctgttcatctacggcgtgatcctgaccgccctgttcctgagagtgaagttcagcagaagcgccgacgcccctgcctaccagcagggacagaaccaactgtacaacgagctgaacctgggcagacgggaagagtacgacgtgctggacaagcggagaggcagggaccctgagatgggcggaaagccccggagaaagaacccccaggaaggactgtataacgaactccagaaagacaagatggccgaagcctacagcgagatcggcatgaagggcgagcggagaagaggcaagggccacgatggcctgtaccagggcctgagcaccgccaccaaggacacctatgacgccctgcacatgcaggccctgcctccaagaagggccaagcgatctggatctggagcaacaaacttctcactactcaaacaagcaggtgacgtggaggagaatcccgggcctactagtatggactggatttggcgcatccttttccttgtcggcgctgctaccggcgcgcattccttcgaagtgcagctggttgagtacggtggcggactggttcaacctggcggtagcctgagactgtcttgtgccgccagcggcttcaacatcaaggactactatatccactgggtccgacaggccccaggcaaaggacttgaatgggttgcctggatcgaccccgagaacggcgataccgagttcgtgcccaagtttcagggcagagccaccatgagcgccgacacctctaagaacacagcctacctccagatgaacagcctgagagccgaggacaccgccgtgtactactgtaaaaccggcggcttttggggccagggcacactggtcacagtcagctctacgcgtgcctctacaaagggaccctccgtgtttcctctggctcccagcagcaagtctacaagcggaggaacagccgctctgggctgcctggtcaaggattactttcccgagcctgtgaccgtgtcctggaatagcggagcactgacaagcggcgtgcacacctttccagccgtgctgcaaagcagcggcctgtactctctgagcagcgtggtcacagtgcctagctctagcctgggcacccagacctacatctgcaatgtgaaccacaagcctagcaacaccaaggtggacaagagagtggaacccaagagctgtggtaccatcactcaaggtttggcagtgtcaaccatctcatcattctttccacctggctaccaagtgtccttctgcctggtcatggtgctgctgttcgccgtggataccggcctgtacttcagcgtcaagaccaacatccggtccagcaccagagactggaaggaccacaagttcaagtggcggaaggaccctcaggacaagagggccaagcgatctggatctggagcaacaaacttctcactactcaaacaagcaggtgacgtggaggagaatcccgggccttctagaggccatatgaccgagtacaagcccacggtgcgcctcgccacccgcgacgacgtccccagggccgtacgcaccctcgccgccgcgttcgccgactaccccgccacgcgccacaccgtcgatccggaccgccacatcgagcgggtcaccgagctgcaagaactcttcctcacgcgcgtcgggctcgacatcggcaaggtgtgggtcgcggacgacggcgccgcggtggcggtctggaccacgccggagagcgtcgaagcgggggcggtgttcgccgagatcggcccgcgcatggccgagttgagcggttcccggctggccgcgcagcaacagatggaaggcctcctggcgccgcaccggcccaaggagcccgcgtggttcctggccaccgtcggcgtctcgcccgaccaccagggcaagggtctgggcagcgccgtcgtgctccccggagtggaggcggccgagcgcgccggggtgcccgccttcctggagacctccgcgccccgcaacctccccttctacgagcggctcggcttcaccgtcaccgccgacgtcgaggtgcccgaaggaccgcgcacctggtgcatgacccgcaagcccggtgcctga

SEQ ID NO: 32738 - DNA, 2571 bp, synthetic construct
  source 1..2571: mol_type = other DNA
atggccttaccagtgaccgccttgctcctgccgctggccttgctgctccacgccgccaggccggacatccagctgacacagagccctagcacactgagcgccagcatgggcgacagagtgaccatcacatgtagcgcctctagcagcgtgcggttcatccactggtatcagcagaagcctggcaaggcccctaagcggctgatctacgataccagcaaactggcctctggcgtgcccagcagattttctggctctggcagcggcaccgacttcaccctgacaatatctagcctccagcctgaggacttcgccacctactactgtcagcagtggggcagcagccctttcacctttggacagggcaccaaggtggaaatcaagctcgaggacctgaagaacgtgttcccacctgaggtggccgtgttcgagcctagcgaggccgagatcagccacacccagaaagccaccctcgtgtgcctggctaccggcttctaccccgaccatgtggaactgtcttggtgggtcaacggcaaagaggtgcacagcggcgtgtgtaccgacccccagccactgaaagaacagcccgccctgaacgacagccggtactgcctgagcagcagactgagagtgtccgccaccttctggcagaacccccggaaccacttcagatgccaggtgcagttctacggcctgagcgagaacgacgagtggacccaggacagagccaagcccgtgacccagatcgtgtctgccgaagcctggggcagagccgattgcggctttaccagcgagagctaccagcagggcgtgctgagcgccaccatcctgtacgagatcctgctgggcaaggccaccctgtacgccgtgctggtgtctgccctggtgctgatggctatggtcaagcggaaggacagccggggaagggccaagcgatctggatctggagcaacaaacttctcactactcaaacaagcaggtgacgtggaggagaatcccgggcctactagtatggactggatttggcgcatccttttccttgtcggcgctgctaccggcgcgcattccttcgaagtgcagctggttgagtacggtggcggactggttcaacctggcggtagcctgagactgtcttgtgccgccagcggcttcaacatcaaggactactatatccactgggtccgacaggccccaggcaaaggacttgaatgggttgcctggatcgaccccgagaacggcgataccgagttcgtgcccaagtttcagggcagagccaccatgagcgccgacacctctaagaacacagcctacctccagatgaacagcctgagagccgaggacaccgccgtgtactactgtaaaaccggcggcttttggggccagggcacactggtcacagtcagctctacgcgtagccagcctcacaccaagcccagcgtgttcgtgatgaagaacggcaccaacgtggcctgcctcgtgaaagagttctaccccaaggacatcaggatcaacctggtgtccagcaagaagatcaccgagttcgaccccgccatcgtgatctcccccagcggcaagtacaacgccgtgaagctggggaagtacgaggacagcaacagcgtgacctgctccgtgcagcacgacaacaagaccgtgcacagcaccgactttgaagtgaaaaccgactccaccgaccacgtgaagcccaaagagacagagaacaccaagcagcccagcaagagctgccacaagcccaaggccatcgtgcacaccgagaaagtgaacatgatgagcctgaccgtgctgggcttcagaatcctgctgctgaaagtggccggctttaacctgctgatgaccctgcggctgtggtccagccgcgccaagagaagcggatctggcgtgaagcagaccctgaatttcgacctgctgaagctggctggcgacgtggaatccaacccaggcccttctagaggccatatgaccgagtacaagcccacggtgcgcctcgccacccgcgacgacgtccccagggccgtacgcaccctcgccgccgcgttcgccgactaccccgccacgcgccacaccgtcgatccggaccgccacatcgagcgggtcaccgagctgcaagaactcttcctcacgcgcgtcgggctcgacatcggcaaggtgtgggtcgcggacgacggcgccgcggtggcggtctggaccacgccggagagcgtcgaagcgggggcggtgttcgccgagatcggcccgcgcatggccgagttgagcggttcccggctggccgcgcagcaacagatggaaggcctcctggcgccgcaccggcccaaggagcccgcgtggttcctggccaccgtcggcgtctcgcccgaccaccagggcaagggtctgggcagcgccgtcgtgctccccggagtggaggcggccgagcgcgccggggtgcccgccttcctggagacctccgcgccccgcaacctccccttctacgagcggctcggcttcaccgtcaccgccgacgtcgaggtgcccgaaggaccgcgcacctggtgcatgacccgcaagcccggtgcctga

SEQ ID NO: 32739 - DNA, 2535 bp, synthetic construct
  source 1..2535: mol_type = other DNA
atggccttaccagtgaccgccttgctcctgccgctggccttgctgctccacgccgccaggccggacatccagctgacacagagccctagcacactgagcgccagcatgggcgacagagtgaccatcacatgtagcgcctctagcagcgtgcggttcatccactggtatcagcagaagcctggcaaggcccctaagcggctgatctacgataccagcaaactggcctctggcgtgcccagcagattttctggctctggcagcggcaccgacttcaccctgacaatatctagcctccagcctgaggacttcgccacctactactgtcagcagtggggcagcagccctttcacctttggacagggcaccaaggtggaaatcaagctcgaggacctgaagaacgtgttcccacctgaggtggccgtgttcgagcctagcgaggccgagatcagccacacccagaaagccaccctcgtgtgcctggctaccggcttctaccccgaccatgtggaactgtcttggtgggtcaacggcaaagaggtgcacagcggcgtgtgtaccgacccccagccactgaaagaacagcccgccctgaacgacagccggtactgcctgagcagcagactgagagtgtccgccaccttctggcagaacccccggaaccacttcagatgccaggtgcagttctacggcctgagcgagaacgacgagtggacccaggacagagccaagcccgtgacccagatcgtgtctgccgaagcctggggcagagccgattgcggctttaccagcgagagctaccagcagggcgtgctgagcgccaccatcctgtacttgttgctgctgctgaagtccgtggtgtacttcgccatcatcacatgctgcctgctgcggagaaccgccttctgctgcaacggcgagaagtctagggccaagcgatctggatctggagcaacaaacttctcactactcaaacaagcaggtgacgtggaggagaatcccgggcctactagtatggactggatttggcgcatccttttccttgtcggcgctgctaccggcgcgcattccttcgaagtgcagctggttgagtacggtggcggactggttcaacctggcggtagcctgagactgtcttgtgccgccagcggcttcaacatcaaggactactatatccactgggtccgacaggccccaggcaaaggacttgaatgggttgcctggatcgaccccgagaacggcgataccgagttcgtgcccaagtttcagggcagagccaccatgagcgccgacacctctaagaacacagcctacctccagatgaacagcctgagagccgaggacaccgccgtgtactactgtaaaaccggcggcttttggggccagggcacactggtcacagtcagctctacgcgtatccagaaccctgatcctgccgtgtaccagctgcgggatagcaagagcagcgacaagagcgtgtgtctgttcaccgacttcgacagccagaccaacgtgtcccagagcaaggactccgacgtgtacatcaccgataagtgcgtgctggacatgcggagcatggacttcaagagcaactccgccgtggcctggtccaacaagtccgatttcgcctgcgccaacgccttcaacaacagcattatccccgaggacacattcttcccaagccccgagagcagctgcgacgtgaagctggtggaaaagagcttcgagacagacaccaacctgaacttccagaacctgagcgtgatcggcctgcggatgctgttcgccaaaaccgtggccgtgaacttcctgctgaccgccaagctgttcttcctccgcgccaagagaagcggatctggcgtgaagcagaccctgaatttcgacctgctgaagctggctggcgacgtggaatccaacccaggcccttctagaggccatatgaccgagtacaagcccacggtgcgcctcgccacccgcgacgacgtccccagggccgtacgcaccctcgccgccgcgttcgccgactaccccgccacgcgccacaccgtcgatccggaccgccacatcgagcgggtcaccgagctgcaagaactcttcctcacgcgcgtcgggctcgacatcggcaaggtgtgggtcgcggacgacggcgccgcggtggcggtctggaccacgccggagagcgtcgaagcgggggcggtgttcgccgagatcggcccgcgcatggccgagttgagcggttcccggctggccgcgcagcaacagatggaaggcctcctggcgccgcaccggcccaaggagcccgcgtggttcctggccaccgtcggcgtctcgcccgaccaccagggcaagggtctgggcagcgccgtcgtgctccccggagtggaggcggccgagcgcgccggggtgcccgccttcctggagacctccgcgccccgcaacctccccttctacgagcggctcggcttcaccgtcaccgccgacgtcgaggtgcccgaaggaccgcgcacctggtgcatgacccgcaagcccggtgcctga

SEQ ID NO: 32740 - DNA, 2574 bp, synthetic construct
  source 1..2574: mol_type = other DNA
atggccttaccagtgaccgccttgctcctgccgctggccttgctgctccacgccgccaggccggacatccagctgacacagagccctagcacactgagcgccagcatgggcgacagagtgaccatcacatgtagcgcctctagcagcgtgcggttcatccactggtatcagcagaagcctggcaaggcccctaagcggctgatctacgataccagcaaactggcctctggcgtgcccagcagattttctggctctggcagcggcaccgacttcaccctgacaatatctagcctccagcctgaggacttcgccacctactactgtcagcagtggggcagcagccctttcacctttggacagggcaccaaggtggaaatcaagctcgaggacctgaagaacgtgttcccacctgaggtggccgtgttcgagcctagcgaggccgagatcagccacacccagaaagccaccctcgtgtgcctggctaccggcttctaccccgaccatgtggaactgtcttggtgggtcaacggcaaagaggtgcacagcggcgtgtgtaccgacccccagccactgaaagaacagcccgccctgaacgacagccggtactgcctgagcagcagactgagagtgtccgccaccttctggcagaacccccggaaccacttcagatgccaggtgcagttctacggcctgagcgagaacgacgagtggacccaggacagagccaagcccgtgacccagatcgtgtctgccgaagcctggggcagagccgattgcggctttaccagcgagagctaccagcagggcgtgctgagcgccaccatcctgtacttgttgctgctgctgaagtccgtggtgtacttcgccatcatcacatgctgcctgctgcggagaaccgccttctgctgcaacggcgagaagtctagggccaagcgatctggatctggagcaacaaacttctcactactcaaacaagcaggtgacgtggaggagaatcccgggcctactagtatggactggatttggcgcatccttttccttgtcggcgctgctaccggcgcgcattccttcgaagtgcagctggttgagtacggtggcggactggttcaacctggcggtagcctgagactgtcttgtgccgccagcggcttcaacatcaaggactactatatccactgggtccgacaggccccaggcaaaggacttgaatgggttgcctggatcgaccccgagaacggcgataccgagttcgtgcccaagtttcagggcagagccaccatgagcgccgacacctctaagaacacagcctacctccagatgaacagcctgagagccgaggacaccgccgtgtactactgtaaaaccggcggcttttggggccagggcacactggtcacagtcagctctacgcgtagccagcctcacaccaagcccagcgtgttcgtgatgaagaacggcaccaacgtggcctgcctcgtgaaagagttctaccccaaggacatcaggatcaacctggtgtccagcaagaagatcaccgagttcgaccccgccatcgtgatctcccccagcggcaagtacaacgccgtgaagctggggaagtacgaggacagcaacagcgtgacctgctccgtgcagcacgacaacaagaccgtgcacagcaccgactttgaagtgaaaaccgactccaccgaccacgtgaagcccaaagagacagagaacaccaagcagcccagcaagagctgccacaagcccaaggccatcgtgcacaccgagaaagtgaacatgatgagcctgaccgtgatcggcttcagaatcctgctgctgaaagtggccggctttaacctgctgatgaccctgcggctgtggtccagccgcgccaagagaagcggatctggcgtgaagcagaccctgaatttcgacctgctgaagctggctggcgacgtggaatccaacccaggcccttctagaggccatatgaccgagtacaagcccacggtgcgcctcgccacccgcgacgacgtccccagggccgtacgcaccctcgccgccgcgttcgccgactaccccgccacgcgccacaccgtcgatccggaccgccacatcgagcgggtcaccgagctgcaagaactcttcctcacgcgcgtcgggctcgacatcggcaaggtgtgggtcgcggacgacggcgccgcggtggcggtctggaccacgccggagagcgtcgaagcgggggcggtgttcgccgagatcggcccgcgcatggccgagttgagcggttcccggctggccgcgcagcaacagatggaaggcctcctggcgccgcaccggcccaaggagcccgcgtggttcctggccaccgtcggcgtctcgcccgaccaccagggcaagggtctgggcagcgccgtcgtgctccccggagtggaggcggccgagcgcgccggggtgcccgccttcctggagacctccgcgccccgcaacctccccttctacgagcggctcggcttcaccgtcaccgccgacgtcgaggtgcccgaaggaccgcgcacctggtgcatgacccgcaagcccggtgcctga

SEQ ID NO: 32741 - DNA, 2553 bp, synthetic construct
  source 1..2553: mol_type = other DNA
atggccttaccagtgaccgccttgctcctgccgctggccttgctgctccacgccgccaggccggacatccagctgacacagagccctagcacactgagcgccagcatgggcgacagagtgaccatcacatgtagcgcctctagcagcgtgcggttcatccactggtatcagcagaagcctggcaaggcccctaagcggctgatctacgataccagcaaactggcctctggcgtgcccagcagattttctggctctggcagcggcaccgacttcaccctgacaatatctagcctccagcctgaggacttcgccacctactactgtcagcagtggggcagcagccctttcacctttggacagggcaccaaggtggaaatcaagctcgaggacaagcagctggacgccgacgtgtcccccaagcctaccatcttcctgccctctatcgccgagacaaagctccagaaggccggcacctacctgtgcctgctggaaaagttcttcccagatgtgattaagatccactggcaggaaaagaagtccaacaccatcctgggcagccaggaaggcaacaccatgaagaccaacgacacctacatgaagttcagctggctgaccgtgcccgagaagtccctggacaaagaacacagatgcatcgtgcggcacgaaaacaacaagaacggcgtggaccaggaaatcatcttcccacccatcaagaccgatgtgattacaatggaccccaaggacaactgctccaaggacgccaacgataccctgctgctccagctgaccaacaccagcgcctactacatgtacgagatcctgctgggcaaggccaccctgtacgccgtgctggtgtctgccctggtgctgatggctatggtcaagcggaaggacagccggggaagggccaagcgatctggatctggagcaacaaacttctcactactcaaacaagcaggtgacgtggaggagaatcccgggcctactagtatggactggatttggcgcatccttttccttgtcggcgctgctaccggcgcgcattccttcgaagtgcagctggttgagtacggtggcggactggttcaacctggcggtagcctgagactgtcttgtgccgccagcggcttcaacatcaaggactactatatccactgggtccgacaggccccaggcaaaggacttgaatgggttgcctggatcgaccccgagaacggcgataccgagttcgtgcccaagtttcagggcagagccaccatgagcgccgacacctctaagaacacagcctacctccagatgaacagcctgagagccgaggacaccgccgtgtactactgtaaaaccggcggcttttggggccagggcacactggtcacagtcagctctacgcgtagccagcctcacaccaagcccagcgtgttcgtgatgaagaacggcaccaacgtggcctgcctcgtgaaagagttctaccccaaggacatcaggatcaacctggtgtccagcaagaagatcaccgagttcgaccccgccatcgtgatctcccccagcggcaagtacaacgccgtgaagctggggaagtacgaggacagcaacagcgtgacctgctccgtgcagcacgacaacaagaccgtgcacagcaccgactttgaagtgaaaaccgactccaccgaccacgtgaagcccaaagagacagagaacaccaagcagcccagcaagagctgccacaagcccaaggccatcgtgcacaccgagaaagtgaacatgatgagcctgaccgtgctgggcttcagaatcctgctgctgaaagtggccggctttaacctgctgatgaccctgcggctgtggtccagccgcgccaagagaagcggatctggcgtgaagcagaccctgaatttcgacctgctgaagctggctggcgacgtggaatccaacccaggcccttctagaggccatatgaccgagtacaagcccacggtgcgcctcgccacccgcgacgacgtccccagggccgtacgcaccctcgccgccgcgttcgccgactaccccgccacgcgccacaccgtcgatccggaccgccacatcgagcgggtcaccgagctgcaagaactcttcctcacgcgcgtcgggctcgacatcggcaaggtgtgggtcgcggacgacggcgccgcggtggcggtctggaccacgccggagagcgtcgaagcgggggcggtgttcgccgagatcggcccgcgcatggccgagttgagcggttcccggctggccgcgcagcaacagatggaaggcctcctggcgccgcaccggcccaaggagcccgcgtggttcctggccaccgtcggcgtctcgcccgaccaccagggcaagggtctgggcagcgccgtcgtgctccccggagtggaggcggccgagcgcgccggggtgcccgccttcctggagacctccgcgccccgcaacctccccttctacgagcggctcggcttcaccgtcaccgccgacgtcgaggtgcccgaaggaccgcgcacctggtgcatgacccgcaagcccggtgcctga

SEQ ID NO: 32742 - DNA, 2553 bp, synthetic construct
  source 1..2553: mol_type = other DNA
atggccttaccagtgaccgccttgctcctgccgctggccttgctgctccacgccgccaggccggacatccagctgacacagagccctagcacactgagcgccagcatgggcgacagagtgaccatcacatgtagcgcctctagcagcgtgcggttcatccactggtatcagcagaagcctggcaaggcccctaagcggctgatctacgataccagcaaactggcctctggcgtgcccagcagattttctggctctggcagcggcaccgacttcaccctgacaatatctagcctccagcctgaggacttcgccacctactactgtcagcagtggggcagcagccctttcacctttggacagggcaccaaggtggaaatcaagctcgaggacaagcagctggacgccgacgtgtcccccaagcctaccatcttcctgccctctatcgccgagacaaagctccagaaggccggcacctacctgtgcctgctggaaaagttcttcccagatgtgattaagatccactggcaggaaaagaagtccaacaccatcctgggcagccaggaaggcaacaccatgaagaccaacgacacctacatgaagttcagctggctgaccgtgcccgagaagtccctggacaaagaacacagatgcatcgtgcggcacgaaaacaacaagaacggcgtggaccaggaaatcatcttcccacccatcaagaccgatgtgattacaatggaccccaaggacaactgctccaaggacgccaacgataccctgctgctccagctgaccaacaccagcgcctactacatgtacgagatcctgctgggcaaggccaccctgtacgccgtgctggtgtctgccctggtgctgatggctatggtcaagcggaaggacagccggggaagggccaagcgatctggatctggagcaacaaacttctcactactcaaacaagcaggtgacgtggaggagaatcccgggcctactagtatggactggatttggcgcatccttttccttgtcggcgctgctaccggcgcgcattccttcgaagtgcagctggttgagtacggtggcggactggttcaacctggcggtagcctgagactgtcttgtgccgccagcggcttcaacatcaaggactactatatccactgggtccgacaggccccaggcaaaggacttgaatgggttgcctggatcgaccccgagaacggcgataccgagttcgtgcccaagtttcagggcagagccaccatgagcgccgacacctctaagaacacagcctacctccagatgaacagcctgagagccgaggacaccgccgtgtactactgtaaaaccggcggcttttggggccagggcacactggtcacagtcagctctacgcgtagccagcctcacaccaagcccagcgtgttcgtgatgaagaacggcaccaacgtggcctgcctcgtgaaagagttctaccccaaggacatcaggatcaacctggtgtccagcaagaagatcaccgagttcgaccccgccatcgtgatctcccccagcggcaagtacaacgccgtgaagctggggaagtacgaggacagcaacagcgtgacctgctccgtgcagcacgacaacaagaccgtgcacagcaccgactttgaagtgaaaaccgactccaccgaccacgtgaagcccaaagagacagagaacaccaagcagcccagcaagagctgccacaagcccaaggccatcgtgcacaccgagaaagtgaacatgatgagcctgaccgtgatcggcttcagaatcctgctgctgaaagtggccggctttaacctgctgatgaccctgcggctgtggtccagccgcgccaagagaagcggatctggcgtgaagcagaccctgaatttcgacctgctgaagctggctggcgacgtggaatccaacccaggcccttctagaggccatatgaccgagtacaagcccacggtgcgcctcgccacccgcgacgacgtccccagggccgtacgcaccctcgccgccgcgttcgccgactaccccgccacgcgccacaccgtcgatccggaccgccacatcgagcgggtcaccgagctgcaagaactcttcctcacgcgcgtcgggctcgacatcggcaaggtgtgggtcgcggacgacggcgccgcggtggcggtctggaccacgccggagagcgtcgaagcgggggcggtgttcgccgagatcggcccgcgcatggccgagttgagcggttcccggctggccgcgcagcaacagatggaaggcctcctggcgccgcaccggcccaaggagcccgcgtggttcctggccaccgtcggcgtctcgcccgaccaccagggcaagggtctgggcagcgccgtcgtgctccccggagtggaggcggccgagcgcgccggggtgcccgccttcctggagacctccgcgccccgcaacctccccttctacgagcggctcggcttcaccgtcaccgccgacgtcgaggtgcccgaaggaccgcgcacctggtgcatgacccgcaagcccggtgcctga

SEQ ID NO: 32743 - DNA, 2553 bp, synthetic construct
  source 1..2553: mol_type = other DNA
atggccttaccagtgaccgccttgctcctgccgctggccttgctgctccacgccgccaggccggacatccagctgacacagagccctagcacactgagcgccagcatgggcgacagagtgaccatcacatgtagcgcctctagcagcgtgcggttcatccactggtatcagcagaagcctggcaaggcccctaagcggctgatctacgataccagcaaactggcctctggcgtgcccagcagattttctggctctggcagcggcaccgacttcaccctgacaatatctagcctccagcctgaggacttcgccacctactactgtcagcagtggggcagcagccctttcacctttggacagggcaccaaggtggaaatcaagctcgaggacaagcagctggacgccgacgtgtcccccaagcctaccatcttcctgccctctatcgccgagacaaagctccagaaggccggcacctacctgtgcctgctggaaaagttcttcccagatgtgattaagatccactggcaggaaaagaagtccaacaccatcctgggcagccaggaaggcaacaccatgaagaccaacgacacctacatgaagttcagctggctgaccgtgcccgagaagtccctggacaaagaacacagatgcatcgtgcggcacgaaaacaacaagaacggcgtggaccaggaaatcatcttcccacccatcaagaccgatgtgattacaatggaccccaaggacaactgctccaaggacgccaacgataccctgctgctccagctgaccaacaccagcgccaccatcctgtacgagatcctgctgggcaaggccaccctgtacgccgtgctggtgtctgccctggtgctgatggctatggtcaagcggaaggacagccggggaagggccaagcgatctggatctggagcaacaaacttctcactactcaaacaagcaggtgacgtggaggagaatcccgggcctactagtatggactggatttggcgcatccttttccttgtcggcgctgctaccggcgcgcattccttcgaagtgcagctggttgagtacggtggcggactggttcaacctggcggtagcctgagactgtcttgtgccgccagcggcttcaacatcaaggactactatatccactgggtccgacaggccccaggcaaaggacttgaatgggttgcctggatcgaccccgagaacggcgataccgagttcgtgcccaagtttcagggcagagccaccatgagcgccgacacctctaagaacacagcctacctccagatgaacagcctgagagccgaggacaccgccgtgtactactgtaaaaccggcggcttttggggccagggcacactggtcacagtcagctctacgcgtagccagcctcacaccaagcccagcgtgttcgtgatgaagaacggcaccaacgtggcctgcctcgtgaaagagttctaccccaaggacatcaggatcaacctggtgtccagcaagaagatcaccgagttcgaccccgccatcgtgatctcccccagcggcaagtacaacgccgtgaagctggggaagtacgaggacagcaacagcgtgacctgctccgtgcagcacgacaacaagaccgtgcacagcaccgactttgaagtgaaaaccgactccaccgaccacgtgaagcccaaagagacagagaacaccaagcagcccagcaagagctgccacaagcccaaggccatcgtgcacaccgagaaagtgaacatgatgagcctgaccgtgatcggcttcagaatcctgctgctgaaagtggccggctttaacctgctgatgaccctgcggctgtggtccagccgcgccaagagaagcggatctggcgtgaagcagaccctgaatttcgacctgctgaagctggctggcgacgtggaatccaacccaggcccttctagaggccatatgaccgagtacaagcccacggtgcgcctcgccacccgcgacgacgtccccagggccgtacgcaccctcgccgccgcgttcgccgactaccccgccacgcgccacaccgtcgatccggaccgccacatcgagcgggtcaccgagctgcaagaactcttcctcacgcgcgtcgggctcgacatcggcaaggtgtgggtcgcggacgacggcgccgcggtggcggtctggaccacgccggagagcgtcgaagcgggggcggtgttcgccgagatcggcccgcgcatggccgagttgagcggttcccggctggccgcgcagcaacagatggaaggcctcctggcgccgcaccggcccaaggagcccgcgtggttcctggccaccgtcggcgtctcgcccgaccaccagggcaagggtctgggcagcgccgtcgtgctccccggagtggaggcggccgagcgcgccggggtgcccgccttcctggagacctccgcgccccgcaacctccccttctacgagcggctcggcttcaccgtcaccgccgacgtcgaggtgcccgaaggaccgcgcacctggtgcatgacccgcaagcccggtgcctga

SEQ ID NO: 32744 - DNA, 2535 bp, synthetic construct; identical to SEQ ID NO: 32739
  source 1..2535: mol_type = other DNA

SEQ ID NO: 32745 - DNA, 2535 bp, synthetic construct
  source 1..2535: mol_type = other DNA
atggccttaccagtgaccgccttgctcctgccgctggccttgctgctccacgccgccaggccggacatccagctgacacagagccctagcacactgagcgccagcatgggcgacagagtgaccatcacatgtagcgcctctagcagcgtgcggttcatccactggtatcagcagaagcctggcaaggcccctaagcggctgatctacgataccagcaaactggcctctggcgtgcccagcagattttctggctctggcagcggcaccgacttcaccctgacaatatctagcctccagcctgaggacttcgccacctactactgtcagcagtggggcagcagccctttcacctttggacagggcaccaaggtggaaatcaagctcgaggacctgaagaacgtgttcccacctgaggtggccgtgttcgagcctagcgaggccgagatcagccacacccagaaagccaccctcgtgtgcctggctaccggcttctaccccgaccatgtggaactgtcttggtgggtcaacggcaaagaggtgcacagcggcgtgtgtaccgacccccagccactgaaagaacagcccgccctgaacgacagccggtactgcctgagcagcagactgagagtgtccgccaccttctggcagaacccccggaaccacttcagatgccaggtgcagttctacggcctgagcgagaacgacgagtggacccaggacagagccaagcccgtgacccagatcgtgtctgccgaagcctggggcagagccgattgcggctttaccagcgagagctaccagcagggcgtgctgagcgccaccatcctgtacttgttgctgctgctgaagtccgtggtgtacttcgccatcatcacatgctgcctgctgcggagaaccgccttctgctgcaacggcgagaagtctagggccaagcgatctggatctggagcaacaaacttctcactactcaaacaagcaggtgacgtggaggagaatcccgggcctactagtatggactggatttggcgcatccttttccttgtcggcgctgctaccggcgcgcattccttcgaagtgcagctggttgagtacggtggcggactggttcaacctggcggtagcctgagactgtcttgtgccgccagcggcttcaacatcaaggactactatatccactgggtccgacaggccccaggcaaaggacttgaatgggttgcctggatcgaccccgagaacggcgataccgagttcgtgcccaagtttcagggcagagccaccatgagcgccgacacctctaagaacacagcctacctccagatgaacagcctgagagccgaggacaccgccgtgtactactgtaaaaccggcggcttttggggccagggcacactggtcacagtcagctctacgcgtatccagaaccctgatcctgccgtgtaccagctgcgggatagcaagagcagcgacaagagcgtgtgtctgttcaccgacttcgacagccagaccaacgtgtcccagagcaaggactccgacgtgtacatcaccgataagtgcgtgctggacatgcggagcatggacttcaagagcaactccgccgtggcctggtccaacaagtccgatttcgcctgcgccaacgccttcaacaacagcattatccccgaggacacattcttcccaagccccgagagcagctgcgacgtgaagctggtggaaaagagcttcgagacagacaccaacctgaacttccagaacctgagcgtgctgggcctgcggatgctgttcgccaaaaccgtggccgtgaacttcctgctgaccgccaagctgttcttcctccgcgccaagagaagcggatctggcgtgaagcagaccctgaatttcgacctgctgaagctggctggcgacgtggaatccaacccaggcccttctagaggccatatgaccgagtacaagcccacggtgcgcctcgccacccgcgacgacgtccccagggccgtacgcaccctcgccgccgcgttcgccgactaccccgccacgcgccacaccgtcgatccggaccgccacatcgagcgggtcaccgagctgcaagaactcttcctcacgcgcgtcgggctcgacatcggcaaggtgtgggtcgcggacgacggcgccgcggtggcggtctggaccacgccggagagcgtcgaagcgggggcggtgttcgccgagatcggcccgcgcatggccgagttgagcggttcccggctggccgcgcagcaacagatggaaggcctcctggcgccgcaccggcccaaggagcccgcgtggttcctggccaccgtcggcgtctcgcccgaccaccagggcaagggtctgggcagcgccgtcgtgctccccggagtggaggcggccgagcgcgccggggtgcccgccttcctggagacctccgcgccccgcaacctccccttctacgagcggctcggcttcaccgtcaccgccgacgtcgaggtgcccgaaggaccgcgcacctggtgcatgacccgcaagcccggtgcctga

SEQ ID NO: 32746 - DNA, 2553 bp, synthetic construct; identical to SEQ ID NO: 32741
  source 1..2553: mol_type = other DNA

SEQ ID NO: 32747 - DNA, 2553 bp, synthetic construct
  source 1..2553: mol_type = other DNA
atggccttaccagtgaccgccttgctcctgccgctggccttgctgctccacgccgccaggccggacatccagctgacacagagccctagcacactgagcgccagcatgggcgacagagtgaccatcacatgtagcgcctctagcagcgtgcggttcatccactggtatcagcagaagcctggcaaggcccctaagcggctgatctacgataccagcaaactggcctctggcgtgcccagcagattttctggctctggcagcggcaccgacttcaccctgacaatatctagcctccagcctgaggacttcgccacctactactgtcagcagtggggcagcagccctttcacctttggacagggcaccaaggtggaaatcaagctcgaggacaagcagctggacgccgacgtgtcccccaagcctaccatcttcctgccctctatcgccgagacaaagctccagaaggccggcacctacctgtgcctgctggaaaagttcttcccagatgtgattaagatccactggcaggaaaagaagtccaacaccatcctgggcagccaggaaggcaacaccatgaagaccaacgacacctacatgaagttcagctggctgaccgtgcccgagaagtccctggacaaagaacacagatgcatcgtgcggcacgaaaacaacaagaacggcgtggaccaggaaatcatcttcccacccatcaagaccgatgtgattacaatggaccccaaggacaactgctccaaggacgccaacgataccctgctgctccagctgaccaacaccagcgccaccatcctgtacgagatcctgctgggcaaggccaccctgtacgccgtgctggtgtctgccctggtgctgatggctatggtcaagcggaaggacagccggggaagggccaagcgatctggatctggagcaacaaacttctcactactcaaacaagcaggtgacgtggaggagaatcccgggcctactagtatggactggatttggcgcatccttttccttgtcggcgctgctaccggcgcgcattccttcgaagtgcagctggttgagtacggtggcggactggttcaacctggcggtagcctgagactgtcttgtgccgccagcggcttcaacatcaaggactactatatccactgggtccgacaggccccaggcaaaggacttgaatgggttgcctggatcgaccccgagaacggcgataccgagttcgtgcccaagtttcagggcagagccaccatgagcgccgacacctctaagaacacagcctacctccagatgaacagcctgagagccgaggacaccgccgtgtactactgtaaaaccggcggcttttggggccagggcacactggtcacagtcagctctacgcgtagccagcctcacaccaagcccagcgtgttcgtgatgaagaacggcaccaacgtggcctgcctcgtgaaagagttctaccccaaggacatcaggatcaacctggtgtccagcaagaagatcaccgagttcgaccccgccatcgtgatctcccccagcggcaagtacaacgccgtgaagctggggaagtacgaggacagcaacagcgtgacctgctccgtgcagcacgacaacaagaccgtgcacagcaccgactttgaagtgaaaaccgactccaccgaccacgtgaagcccaaagagacagagaacaccaagcagcccagcaagagctgccacaagcccaaggccatcgtgcacaccgagaaagtgaacatgatgagcctgaccgtgctgggcttcagaatcctgctgctgaaagtggccggctttaacctgctgatgaccctgcggctgtggtccagccgcgccaagagaagcggatctggcgtgaagcagaccctgaatttcgacctgctgaagctggctggcgacgtggaatccaacccaggcccttctagaggccatatgaccgagtacaagcccacggtgcgcctcgccacccgcgacgacgtccccagggccgtacgcaccctcgccgccgcgttcgccgactaccccgccacgcgccacaccgtcgatccggaccgccacatcgagcgggtcaccgagctgcaagaactcttcctcacgcgcgtcgggctcgacatcggcaaggtgtgggtcgcggacgacggcgccgcggtggcggtctggaccacgccggagagcgtcgaagcgggggcggtgttcgccgagatcggcccgcgcatggccgagttgagcggttcccggctggccgcgcagcaacagatggaaggcctcctggcgccgcaccggcccaaggagcccgcgtggttcctggccaccgtcggcgtctcgcccgaccaccagggcaagggtctgggcagcgccgtcgtgctccccggagtggaggcggccgagcgcgccggggtgcccgccttcctggagacctccgcgccccgcaacctccccttctacgagcggctcggcttcaccgtcaccgccgacgtcgaggtgcccgaaggaccgcgcacctggtgcatgacccgcaagcccggtgcctga

SEQ ID NO: 32748 - DNA, 2553 bp, synthetic construct; identical to SEQ ID NO: 32743
  source 1..2553: mol_type = other DNA

SEQ ID NO: 32749 - DNA, 2553 bp, synthetic construct; identical to SEQ ID NO: 32742
  source 1..2553: mol_type = other DNA

SEQ ID NO: 32750 - DNA, 2553 bp, synthetic construct; identical to SEQ ID NO: 32747
  source 1..2553: mol_type = other DNA

SEQ ID NO: 32751 - DNA, 1914 bp, synthetic construct
  source 1..1914: mol_type = other DNA
atggccttaccagtgaccgccttgctcctgccgctggccttgctgctccacgccgccaggccgctcgagatccagaaccctgatcctgccgtgtaccagctgcgggatagcaagagcagcgacaagagcgtgtgtctgttcaccgacttcgacagccagaccaacgtgtcccagagcaaggactccgacgtgtacatcaccgataagtgcgtgctggacatgcggagcatggacttcaagagcaactccgccgtggcctggtccaacaagtccgatttcgcctgcgccaacgccttcaacaacagcattatccccgaggacacattcttcccaagccccgagagcagctgcgacgtgaagctggtggaaaagagcttcgagacagacaccaacctgaacttccagaacctgagcgtgatcggcttcagaatcctgctgctgaaagtggccggctttaacctgctgatgaccctgcggctgtggtccagctctagtcgcgccaagagaagcggatctggcgtgaagcagaccctgaatttcgacctgctgaagctggctggcgacgtggaatccaacccaggccctactagtatggactggatttggcgcatccttttccttgtcggcgctgctaccggcgcgcattccttcgaagacatccagatgacacagagccctagcagcctgtctgccagcgtgggagacagagtgaccatcacatgcaaggccagccaggatgtgggcacagccgtggattggtatcagcagaagcctggcaaggcccctaagctgctgatctactgggccagcacaagacacacaggcgtgcccagcagattttctggcagcggctctggcaccgacttcaccctgacaatatccagcctccagcctgaggacttcgccacctactactgccagcagtacaacagctaccctctgaccttcggccagggcaccaaggtggaaatcaaaagaggcggaggcggatctggcggcggaggtagcggtggcggaggatctgaagtgcagctggttgaatcaggtggcggcctggttcaacctggcggatctctgagactgagctgtgccgccagcggctacacctttaccgagtacacaatccactgggtccgacaggcccctggcaaaggacttgagtgggtcgccaacatcaaccccaacaatggcggcaccacctacaaccagaagttcgaggacagattcaccatcagccgggacaacagcaagaacaccctgtacctccagatgaactccctgagagccgaggacaccgccgtgtactattgtgccagaggctggaacttcgactactggggccagggaacactggtcaccgttagctctacgcgtgaggacctgaagaacgtgttcccacctgaggtggccgtgttcgagcctagcgaggccgagatcagccacacccagaaagccaccctcgtgtgcctggctaccggcttctaccccgaccatgtggaactgtcttggtgggtcaacggcaaagaggtgcacagcggcgtgtgtaccgacccccagccactgaaagaacagcccgccctgaacgacagccggtactgcctgagcagcagactgagagtgtccgccaccttctggcagaacccccggaaccacttcagatgccaggtgcagttctacggcctgagcgagaacgacgagtggacccaggacagagccaagcccgtgacccagatcgtgtctgccgaagcctggggcagagccgattgcggctttaccagcgagagctaccagcagggcgtgctgagcgccaccatcctgtacgagatcctgctgggcaaggccaccctgtacgccgtgctggtgtctgccctggtgctgatggctatggtcaagcggaaggacagccggggataa

SEQ ID NO: 32752 - DNA, 3132 bp, synthetic construct
  source 1..3132: mol_type = other DNA
atggccttaccagtgaccgccttgctcctgccgctggccttgctgctccacgccgccaggccggacatccagatgacacagagccctagcagcctgtctgccagcgtgggagacagagtgaccatcacatgcaaggccagccaggatgtgggcacagccgtggattggtatcagcagaagcctggcaaggcccctaagctgctgatctactgggccagcacaagacacacaggcgtgcccagcagattttctggcagcggctctggcaccgacttcaccctgacaatatccagcctccagcctgaggacttcgccacctactactgccagcagtacaacagctaccctctgaccttcggccagggcaccaaggtggaaatcaaaagactcgaggacctgaagaacgtgttcccacctgaggtggccgtgttcgagcctagcgaggccgagatcagccacacccagaaagccaccctcgtgtgcctggctaccggcttctaccccgaccatgtggaactgtcttggtgggtcaacggcaaagaggtgcacagcggcgtgtctaccgacccccagccactgaaagaacagcccgccctgaacgacagccggtactgcctgagcagcagactgagagtgtccgccaccttctggcagaacccccggaaccacttcagatgccaggtgcagttctacggcctgagcgagaacgacgagtggacccaggacagagccaagcccgtgacccagatcgtgtctgccgaagcctggggcagagccgattgcggatcccagagcttcggcctgctggaccccaagctgtgctacctgctggatggcatcctgttcatctacggcgtgatcctgaccgccctgttcctgagagtgaagttcagcagaagcgccgacgcccctgcctaccagcagggacagaaccaactgtacaacgagctgaacctgggcagacgggaagagtacgacgtgctggacaagcggagaggcagggaccctgagatgggcggaaagccccagcggagaaagaacccccaggaaggactgtataacgaactccagaaagacaagatggccgaagcctacagcgagatcggcatgaagggcgagcggagaagaggcaagggccacgatggcctgtaccagggcctgagcaccgccaccaaggacacctatgacgccctgcacatgcaggccctgcctccaagaagggccaagcgatctggatctggagcaacaaacttctcactactcaaacaagcaggtgacgtggaggagaatcccgggcctactagtatggactggatttggcgcatccttttccttgtcggcgctgctaccggcgcgcattccttcgaagtgcagctggttgaatcaggtggcggcctggttcaacctggcggatctctgagactgagctgtgccgccagcggctacacctttaccgagtacacaatccactgggtccgacaggcccctggcaaaggacttgagtgggtcgccaacatcaaccccaacaatggcggcaccacctacaaccagaagttcgaggacagattcaccatcagccgggacaacagcaagaacaccctgtacctccagatgaactccctgagagccgaggacaccgccgtgtactattgtgccagaggctggaacttcgactactggggccagggaacactggtcaccgttagctctacgcgtatccagaaccctgatcctgccgtgtaccagctgcgggatagcaagagcagcgacaagagcgtgtgtctgttcaccgacttcgacagccagaccaacgtgtcccagagcaaggactccgacgtgtacatcaccgataagaccgtgctggacatgcggagcatggacttcaagagcaactccgccgtggcctggtccaacaagtccgatttcgcctgcgccaacgccttcaacaacagcattatccccgaggacacattcttcccaagccccgagagcagctgcggtacccagagttttgggttgttggaccctaaattgtgctatctgttggacggaatcctgttcatttacggagtgatcctgaccgcattgttcctgcgggttaagttttccagatccgcagacgcacccgcttaccaacaagggcagaaccaactctacaatgaacttaatttggggcggagggaagagtacgacgttctggacaaaaggaggggacgagatcccgagatgggcggaaagcctcgaaggaagaatccgcaagaggggctttataacgaactccagaaagataaaatggcagaagcctatagtgagattgggatgaagggagaaaggaggaggggtaaaggtcacgatgggttgtaccaaggattgagcacagccactaaagatacctatgatgcgctccacatgcaggccctgccgccaagacgcgccaagagaagcggatctggcgtgaagcagaccctgaatttcgacctgctgaagctggctggcgacgtggaatccaacccaggcccttctagaggccatatgaccgagtacaagcccacggtgcgcctcgccacccgcgacgacgtccccagggccgtacgcaccctcgccgccgcgttcgccgactaccccgccacgcgccacaccgtcgatccggaccgccacatcgagcgggtcaccgagctgcaagaactcttcctcacgcgcgtcgggctcgacatcggcaaggtgtgggtcgcggacgacggcgccgcggtggcggtctggaccacgccggagagcgtcgaagcgggggcggtgttcgccgagatcggcccgcgcatggccgagttgagcggttcccggctggccgcgcagcaacagatggaaggcctcctggcgccgcaccggcccaaggagcccgcgtggttcctggccaccgtcggcgtctcgcccgaccaccagggcaagggtctgggcagcgccgtcgtgctccccggagtggaggcggccgagcgcgccggggtgcccgccttcctggagacctccgcgccccgcaacctccccttctacgagcggctcggcttcaccgtcaccgccgacgtcgaggtgcccgaaggaccgcgcacctggtgcatgacccgcaagcccggtgcctga

SEQ ID NO: 32753 - DNA, 2208 bp, synthetic construct
  source 1..2208: mol_type = other DNA
atggccttaccagtgaccgccttgctcctgccgctggccttgctgctccacgccgccaggccggacatccagatgacacagagccctagcagcctgtctgccagcgtgggagacagagtgaccatcacatgcaaggccagccaggatgtgggcacagccgtggattggtatcagcagaagcctggcaaggcccctaagctgctgatctactgggccagcacaagacacacaggcgtgcccagcagattttctggcagcggctctggcaccgacttcaccctgacaatatccagcctccagcctgaggacttcgccacctactactgccagcagtacaacagctaccctctgaccttcggccagggcaccaaggtggaaatcaaaagactcgaggacctgaagaacgtgttcccacctgaggtggccgtgttcgagcctagcgaggccgagatcagccacacccagaaagccaccctcgtgtgcctggctaccggcttctaccccgaccatgtggaactgtcttggtgggtcaacggcaaagaggtgcacagcggcgtgtctaccgacccccagccactgaaagaacagcccgccctgaacgacagccggtactgcctgagcagcagactgagagtgtccgccaccttctggcagaacccccggaaccacttcagatgccaggtgcagttctacggcctgagcgagaacgacgagtggacccaggacagagccaagcccgtgacccagatcgtgtctgccgaagcctggggcagagccgattgcggatcccagagcttcggcctgctggaccccaagctgtgctacctgctggatggcatcctgttcatctacggcgtgatcctgaccgccctgttcctgagagtgaagttcagcagaagcgccgacgcccctgcctaccagcagggacagaaccaactgtacaacgagctgaacctgggcagacgggaagagtacgacgtgctggacaagcggagaggcagggaccctgagatgggcggaaagccccggagaaagaacccccaggaaggactgtataacgaactccagaaagacaagatggccgaagcctacagcgagatcggcatgaagggcgagcggagaagaggcaagggccacgatggcctgtaccagggcctgagcaccgccaccaaggacacctatgacgccctgcacatgcaggccctgcctccaagaagggccaagcgatctggatctggagcaacaaacttctcactactcaaacaagcaggtgacgtggaggagaatcccgggcctactagtatggactggatttggcgcatccttttccttgtcggcgctgctaccggcgcgcattccttcgaagtgcagctggttgaatcaggtggcggcctggttcaacctggcggatctctgagactgagctgtgccgccagcggctacacctttaccgagtacacaatccactgggtccgacaggcccctggcaaaggacttgagtgggtcgccaacatcaaccccaacaatggcggcaccacctacaaccagaagttcgaggacagattcaccatcagccgggacaacagcaagaacaccctgtacctccagatgaactccctgagagccgaggacaccgccgtgtactattgtgccagaggctggaacttcgactactggggccagggaacactggtcaccgttagctctacgcgtatccagaaccctgatcctgccgtgtaccagctgcgggatagcaagagcagcgacaagagcgtgtgtctgttcaccgacttcgacagccagaccaacgtgtcccagagcaaggactccgacgtgtacatcaccgataagaccgtgctggacatgcggagcatggacttcaagagcaactccgccgtggcctggtccaacaagtccgatttcgcctgcgccaacgccttcaacaacagcattatccccgaggacacattcttcccaagccccgagagcagctgcggtaccctcggagaaccacagctctgttacattctggatgctatcctgttcctctatgggatcgtcctgacactcctgtattgcaagagaggccggaagaagctgctgtacatcttcaagcagcctttcatgcggcccgtgcagaccacccaggaagaggacggctgctcctgccggttccccgaggaagaagaaggcggctgcgagctgtaa

SEQ ID NO: 32754 - DNA, 2220 bp, synthetic construct
  source 1..2220: mol_type = other DNA
atggccttaccagtgaccgccttgctcctgccgctggccttgctgctccacgccgccaggccggacatccagatgacacagagccctagcagcctgtctgccagcgtgggagacagagtgaccatcacatgcaaggccagccaggatgtgggcacagccgtggattggtatcagcagaagcctggcaaggcccctaagctgctgatctactgggccagcacaagacacacaggcgtgcccagcagattttctggcagcggctctggcaccgacttcaccctgacaatatccagcctccagcctgaggacttcgccacctactactgccagcagtacaacagctaccctctgaccttcggccagggcaccaaggtggaaatcaaaagactcgaggacctgaagaacgtgttcccacctgaggtggccgtgttcgagcctagcgaggccgagatcagccacacccagaaagccaccctcgtgtgcctggctaccggcttctaccccgaccatgtggaactgtcttggtgggtcaacggcaaagaggtgcacagcggcgtgtctaccgacccccagccactgaaagaacagcccgccctgaacgacagccggtactgcctgagcagcagactgagagtgtccgccaccttctggcagaacccccggaaccacttcagatgccaggtgcagttctacggcctgagcgagaacgacgagtggacccaggacagagccaagcccgtgacccagatcgtgtctgccgaagcctggggcagagccgattgcggatcccagagcttcggcctgctggaccccaagctgtgctacctgctggatggcatcctgttcatctacggcgtgatcctgaccgccctgttcctgagagtgaagttcagcagaagcgccgacgcccctgcctaccagcagggacagaaccaactgtacaacgagctgaacctgggcagacgggaagagtacgacgtgctggacaagcggagaggcagggaccctgagatgggcggaaagccccggagaaagaacccccaggaaggactgtataacgaactccagaaagacaagatggccgaagcctacagcgagatcggcatgaagggcgagcggagaagaggcaagggccacgatggcctgtaccagggcctgagcaccgccaccaaggacacctatgacgccctgcacatgcaggccctgcctccaagaagggccaagcgatctggatctggagcaacaaacttctcactactcaaacaagcaggtgacgtggaggagaatcccgggcctactagtatggactggatttggcgcatccttttccttgtcggcgctgctaccggcgcgcattccttcgaagtgcagctggttgaatcaggtggcggcctggttcaacctggcggatctctgagactgagctgtgccgccagcggctacacctttaccgagtacacaatccactgggtccgacaggcccctggcaaaggacttgagtgggtcgccaacatcaaccccaacaatggcggcaccacctacaaccagaagttcgaggacagattcaccatcagccgggacaacagcaagaacaccctgtacctccagatgaactccctgagagccgaggacaccgccgtgtactattgtgccagaggctggaacttcgactactggggccagggaacactggtcaccgttagctctacgcgtatccagaaccctgatcctgccgtgtaccagctgcgggatagcaagagcagcgacaagagcgtgtgtctgttcaccgacttcgacagccagaccaacgtgtcccagagcaaggactccgacgtgtacatcaccgataagaccgtgctggacatgcggagcatggacttcaagagcaactccgccgtggcctggtccaacaagtccgatttcgcctgcgccaacgccttcaacaacagcattatccccgaggacacattcttcccaagccccgagagcagctgcggtaccctcggagaaccacagctctgttacattctggatgctatcctgttcctctatgggatcgtcctgacactcctgtattgcaggagcaagcggtcacggctgctccacagcgattacatgaatatgacaccacgaagaccgggtcctactcgcaaacactaccaaccctacgcacctccccgcgactttgcagcgtaccgatctaatctagaaggagtcgac

SEQ ID NO: 32755 - DNA, 2220 bp, synthetic construct
  source 1..2220: mol_type = other DNA
atggccttaccagtgaccgccttgctcctgccgctggccttgctgctccacgccgccaggccggacatccagatgacacagagccctagcagcctgtctgccagcgtgggagacagagtgaccatcacatgcaaggccagccaggatgtgggcacagccgtggattggtatcagcagaagcctggcaaggcccctaagctgctgatctactgggccagcacaagacacacaggcgtgcccagcagattttctggcagcggctctggcaccgacttcaccctgacaatatccagcctccagcctgaggacttcgccacctactactgccagcagtacaacagctaccctctgaccttcggccagggcaccaaggtggaaatcaaaagactcgaggacctgaagaacgtgttcccacctgaggtggccgtgttcgagcctagcgaggccgagatcagccacacccagaaagccaccctcgtgtgcctggctaccggcttctaccccgaccatgtggaactgtcttggtgggtcaacggcaaagaggtgcacagcggcgtgtctaccgacccccagccactgaaagaacagcccgccctgaacgacagccggtactgcctgagcagcagactgagagtgtccgccaccttctggcagaacccccggaaccacttcagatgccaggtgcagttctacggcctgagcgagaacgacgagtggacccaggacagagccaagcccgtgacccagatcgtgtctgccgaagcctggggcagagccgattgcggatcccagagcttcggcctgctggaccccaagctgtgctacctgctggatggcatcctgttcatctacggcgtgatcctgaccgccctgttcctgagagtgaagttcagcagaagcgccgacgcccctgcctaccagcagggacagaaccaactgtacaacgagctgaacctgggcagacgggaagagtacgacgtgctggacaagcggagaggcagggaccctgagatgggcggaaagccccggagaaagaacccccaggaaggactgtataacgaactccagaaagacaagatggccgaagcctacagcgagatcggcatgaagggcgagcggagaagaggcaagggccacgatggcctgtaccagggcctgagcaccgccaccaaggacacctatgacgccctgcacatgcaggccctgcctccaagaagggccaagcgatctggatctggagcaacaaacttctcactactcaaacaagcaggtgacgtggaggagaatcccgggcctactagtatggactggatttggcgcatccttttccttgtcggcgctgctaccggcgcgcattccttcgaagtgcagctggttgaatcaggtggcggcctggttcaacctggcggatctctgagactgagctgtgccgccagcggctacacctttaccgagtacacaatccactgggtccgacaggcccctggcaaaggacttgagtgggtcgccaacatcaaccccaacaatggcggcaccacctacaaccagaagttcgaggacagattcaccatcagccgggacaacagcaagaacaccctgtacctccagatgaactccctgagagccgaggacaccgccgtgtactattgtgccagaggctggaacttcgactactggggccagggaacactggtcaccgttagctctacgcgtatccagaaccctgatcctgccgtgtaccagctgcgggatagcaagagcagcgacaagagcgtgtgtctgttcaccgacttcgacagccagaccaacgtgtcccagagcaaggactccgacgtgtacatcaccgataagaccgtgctggacatgcggagcatggacttcaagagcaactccgccgtggcctggtccaacaagtccgatttcgcctgcgccaacgccttcaacaacagcattatccccgaggacacattcttcccaagccccgagagcagctgcggtacccagagttttgggttgttggaccctaaattgtgctatctgttggacggaatcctgttcatttacggagtgatcctgaccgcattgttcctgaagagaggccggaagaagctgctgtacatcttcaagcagcctttcatgcggcccgtgcagaccacccaggaagaggacggctgctcctgccggttccccgaggaagaagaaggcggctgcgagctgtaa

SEQ ID NO: 32756 - DNA, 2232 bp, synthetic construct
  source 1..2232: mol_type = other DNA
atggccttaccagtgaccgccttgctcctgccgctggccttgctgctccacgccgccaggccggacatccagatgacacagagccctagcagcctgtctgccagcgtgggagacagagtgaccatcacatgcaaggccagccaggatgtgggcacagccgtggattggtatcagcagaagcctggcaaggcccctaagctgctgatctactgggccagcacaagacacacaggcgtgcccagcagattttctggcagcggctctggcaccgacttcaccctgacaatatccagcctccagcctgaggacttcgccacctactactgccagcagtacaacagctaccctctgaccttcggccagggcaccaaggtggaaatcaaaagactcgaggacctgaagaacgtgttcccacctgaggtggccgtgttcgagcctagcgaggccgagatcagccacacccagaaagccaccctcgtgtgcctggctaccggcttctaccccgaccatgtggaactgtcttggtgggtcaacggcaaagaggtgcacagcggcgtgtctaccgacccccagccactgaaagaacagcccgccctgaacgacagccggtactgcctgagcagcagactgagagtgtccgccaccttctggcagaacccccggaaccacttcagatgccaggtgcagttctacggcctgagcgagaacgacgagtggacccaggacagagccaagcccgtgacccagatcgtgtctgccgaagcctggggcagagccgattgcggatcccagagcttcggcctgctggaccccaagctgtgctacctgctggatggcatcctgttcatctacggcgtgatcctgaccgccctgttcctgagagtgaagttcagcagaagcgccgacgcccctgcctaccagcagggacagaaccaactgtacaacgagctgaacctgggcagacgggaagagtacgacgtgctggacaagcggagaggcagggaccctgagatgggcggaaagccccggagaaagaacccccaggaaggactgtataacgaactccagaaagacaagatggccgaagcctacagcgagatcggcatgaagggcgagcggagaagaggcaagggccacgatggcctgtaccagggcctgagcaccgccaccaaggacacctatgacgccctgcacatgcaggccctgcctccaagaagggccaagcgatctggatctggagcaacaaacttctcactactcaaacaagcaggtgacgtggaggagaatcccgggcctactagtatggactggatttggcgcatccttttccttgtcggcgctgctaccggcgcgcattccttcgaagtgcagctggttgaatcaggtggcggcctggttcaacctggcggatctctgagactgagctgtgccgccagcggctacacctttaccgagtacacaatccactgggtccgacaggcccctggcaaaggacttgagtgggtcgccaacatcaaccccaacaatggcggcaccacctacaaccagaagttcgaggacagattcaccatcagccgggacaacagcaagaacaccctgtacctccagatgaactccctgagagccgaggacaccgccgtgtactattgtgccagaggctggaacttcgactactggggccagggaacactggtcaccgttagctctacgcgtatccagaaccctgatcctgccgtgtaccagctgcgggatagcaagagcagcgacaagagcgtgtgtctgttcaccgacttcgacagccagaccaacgtgtcccagagcaaggactccgacgtgtacatcaccgataagaccgtgctggacatgcggagcatggacttcaagagcaactccgccgtggcctggtccaacaagtccgatttcgcctgcgccaacgccttcaacaacagcattatccccgaggacacattcttcccaagccccgagagcagctgcggtacccagagttttgggttgttggaccctaaattgtgctatctgttggacggaatcctgttcatttacggagtgatcctgaccgcattgttcctgaggagcaagcggtcacggctgctccacagcgattacatgaatatgacaccacgaagaccgggtcctactcgcaaacactaccaaccctacgcacctccccgcgactttgcagcgtaccgatctaatctagaaggagtcgac

SEQ ID NO: 32757 - DNA, 2436 bp, synthetic construct; identical to SEQ ID NO: 1017
  source 1..2436: mol_type = other DNA

SEQ ID NO: 32758 - DNA, 3132 bp, synthetic construct; identical to SEQ ID NO: 32752
  source 1..3132: mol_type = other DNA

SEQ ID NO: 32759 - DNA, 2211 bp, synthetic construct; identical to SEQ ID NO: 1018
  source 1..2211: mol_type = other DNA

SEQ ID NO: 32760 - DNA, 2097 bp, synthetic construct
  source 1..2097: mol_type = other DNA
atggccttaccagtgaccgccttgctcctgccgctggccttgctgctccacgccgccaggccggacatccagatgacacagagccctagcagcctgtctgccagcgtgggagacagagtgaccatcacatgcaaggccagccaggatgtgggcacagccgtggattggtatcagcagaagcctggcaaggcccctaagctgctgatctactgggccagcacaagacacacaggcgtgcccagcagattttctggcagcggctctggcaccgacttcaccctgacaatatccagcctccagcctgaggacttcgccacctactactgccagcagtacaacagctaccctctgaccttcggccagggcaccaaggtggaaatcaaaagactcgaggacctgaagaacgtgttcccacctgaggtggccgtgttcgagcctagcgaggccgagatcagccacacccagaaagccaccctcgtgtgcctggctaccggcttctaccccgaccatgtggaactgtcttggtgggtcaacggcaaagaggtgcacagcggcgtgtctaccgacccccagccactgaaagaacagcccgccctgaacgacagccggtactgcctgagcagcagactgagagtgtccgccaccttctggcagaacccccggaaccacttcagatgccaggtgcagttctacggcctgagcgagaacgacgagtggacccaggacagagccaagcccgtgacccagatcgtgtctgccgaagcctggggcagagccgattgcggatcccagagcttcggcctgctggaccccaagctgtgctacctgctggatggcatcctgttcatctacggcgtgatcctgaccgccctgttcctgagagtgaagttcagcagaagcgccgacgcccctgcctaccagcagggacagaaccaactgtacaacgagctgaacctgggcagacgggaagagtacgacgtgctggacaagcggagaggcagggaccctgagatgggcggaaagccccggagaaagaacccccaggaaggactgtataacgaactccagaaagacaagatggccgaagcctacagcgagatcggcatgaagggcgagcggagaagaggcaagggccacgatggcctgtaccagggcctgagcaccgccaccaaggacacctatgacgccctgcacatgcaggccctgcctccaagaagggccaagcgatctggatctggagcaacaaacttctcactactcaaacaagcaggtgacgtggaggagaatcccgggcctactagtatggactggatttggcgcatccttttccttgtcggcgctgctaccggcgcgcattccttcgaagtgcagctggttgaatcaggtggcggcctggttcaacctggcggatctctgagactgagctgtgccgccagcggctacacctttaccgagtacacaatccactgggtccgacaggcccctggcaaaggacttgagtgggtcgccaacatcaaccccaacaatggcggcaccacctacaaccagaagttcgaggacagattcaccatcagccgggacaacagcaagaacaccctgtacctccagatgaactccctgagagccgaggacaccgccgtgtactattgtgccagaggctggaacttcgactactggggccagggaacactggtcaccgttagctctacgcgtatccagaaccctgatcctgccgtgtaccagctgcgggatagcaagagcagcgacaagagcgtgtgtctgttcaccgacttcgacagccagaccaacgtgtcccagagcaaggactccgacgtgtacatcaccgataagaccgtgctggacatgcggagcatggacttcaagagcaactccgccgtggcctggtccaacaagtccgatttcgcctgcgccaacgccttcaacaacagcattatccccgaggacacattcttcccaagccccgagagcagctgcggtacccagagttttgggttgttggaccctaaattgtgctatctgttggacggaatcctgttcatttacggagtgatcctgaccgcattgttcctgcggtaa

SEQ ID NO: 32761 - DNA, 2127 bp, synthetic construct
  source 1..2127: mol_type = other DNA
atggccttaccagtgaccgccttgctcctgccgctggccttgctgctccacgccgccaggccggacatccagatgacacagagccctagcagcctgtctgccagcgtgggagacagagtgaccatcacatgcaaggccagccaggatgtgggcacagccgtggattggtatcagcagaagcctggcaaggcccctaagctgctgatctactgggccagcacaagacacacaggcgtgcccagcagattttctggcagcggctctggcaccgacttcaccctgacaatatccagcctccagcctgaggacttcgccacctactactgccagcagtacaacagctaccctctgaccttcggccagggcaccaaggtggaaatcaaaagactcgaggacctgaagaacgtgttcccacctgaggtggccgtgttcgagcctagcgaggccgagatcagccacacccagaaagccaccctcgtgtgcctggctaccggcttctaccccgaccatgtggaactgtcttggtgggtcaacggcaaagaggtgcacagcggcgtgtctaccgacccccagccactgaaagaacagcccgccctgaacgacagccggtactgcctgagcagcagactgagagtgtccgccaccttctggcagaacccccggaaccacttcagatgccaggtgcagttctacggcctgagcgagaacgacgagtggacccaggacagagccaagcccgtgacccagatcgtgtctgccgaagcctggggcagagccgattgcggatcccagagcttcggcctgctggaccccaagctgtgctacctgctggatggcatcctgttcatctacggcgtgatcctgaccgccctgttcctgagagtgaagttcagcagaagcgccgacgcccctgcctaccagcagggacagaaccaactgtacaacgagctgaacctgggcagacgggaagagtacgacgtgctggacaagcggagaggcagggaccctgagatgggcggaaagccccggagaaagaacccccaggaaggactgtataacgaactccagaaagacaagatggccgaagcctacagcgagatcggcatgaagggcgagcggagaagaggcaagggccacgatggcctgtaccagggcctgagcaccgccaccaaggacacctatgacgccctgcacatgcaggccctgcctccaagaagggccaagcgatctggatctggagcaacaaacttctcactactcaaacaagcaggtgacgtggaggagaatcccgggcctactagtatggactggatttggcgcatccttttccttgtcggcgctgctaccggcgcgcattccttcgaagtgcagctggttgaatcaggtggcggcctggttcaacctggcggatctctgagactgagctgtgccgccagcggctacacctttaccgagtacacaatccactgggtccgacaggcccctggcaaaggacttgagtgggtcgccaacatcaaccccaacaatggcggcaccacctacaaccagaagttcgaggacagattcaccatcagccgggacaacagcaagaacaccctgtacctccagatgaactccctgagagccgaggacaccgccgtgtactattgtgccagaggctggaacttcgactactggggccagggaacactggtcaccgttagctctacgcgtatccagaaccctgatcctgccgtgtaccagctgcgggatagcaagagcagcgacaagagcgtgtgtctgttcaccgacttcgacagccagaccaacgtgtcccagagcaaggactccgacgtgtacatcaccgataagaccgtgctggacatgcggagcatggacttcaagagcaactccgccgtggcctggtccaacaagtccgatttcgcctgcgccaacgccttcaacaacagcattatccccgaggacacattcttcccaagccccgagagcagctgcggtacccagagttttgggttgttggaccctaaattgtgctatctgttggacggaatcctgttcatttacggagtgatcctgaccgcattgttcctgcgggttaagttttccagatccgcagactctagataa

SEQ ID NO: 32762 - DNA, 3258 bp, synthetic construct; identical to SEQ ID NO: 32329
  source 1..3258: mol_type = other DNA

SEQ ID NO: 32763 - DNA, 3129 bp, synthetic construct
  source 1..3129: mol_type = other DNA
atggccttaccagtgaccgccttgctcctgccgctggccttgctgctccacgccgccaggccggacatccagatgacacagagccctagcagcctgtctgccagcgtgggagacagagtgaccatcacatgcaaggccagccaggatgtgggcacagccgtggattggtatcagcagaagcctggcaaggcccctaagctgctgatctactgggccagcacaagacacacaggcgtgcccagcagattttctggcagcggctctggcaccgacttcaccctgacaatatccagcctccagcctgaggacttcgccacctactactgccagcagtacaacagctaccctctgaccttcggccagggcaccaaggtggaaatcaaaagactcgaggacctgaagaacgtgttcccacctgaggtggccgtgttcgagcctagcgaggccgagatcagccacacccagaaagccaccctcgtgtgcctggctaccggcttctaccccgaccatgtggaactgtcttggtgggtcaacggcaaagaggtgcacagcggcgtgtctaccgacccccagccactgaaagaacagcccgccctgaacgacagccggtactgcctgagcagcagactgagagtgtccgccaccttctggcagaacccccggaaccacttcagatgccaggtgcagttctacggcctgagcgagaacgacgagtggacccaggacagagccaagcccgtgacccagatcgtgtctgccgaagcctggggcagagccgattgcggatcccagagcttcggcctgctggaccccaagctgtgctacctgctggatggcatcctgttcatctacggcgtgatcctgaccgccctgttcctgagagtgaagttcagcagaagcgccgacgcccctgcctaccagcagggacagaaccaactgtacaacgagctgaacctgggcagacgggaagagtacgacgtgctggacaagcggagaggcagggaccctgagatgggcggaaagccccggagaaagaacccccaggaaggactgtataacgaactccagaaagacaagatggccgaagcctacagcgagatcggcatgaagggcgagcggagaagaggcaagggccacgatggcctgtaccagggcctgagcaccgccaccaaggacacctatgacgccctgcacatgcaggccctgcctccaagaagggccaagcgatctggatctggagcaacaaacttctcactactcaaacaagcaggtgacgtggaggagaatcccgggcctactagtatggactggatttggcgcatccttttccttgtcggcgctgctaccggcgcgcattccttcgaagtgcagctggttgaatcaggtggcggcctggttcaacctggcggatctctgagactgagctgtgccgccagcggctacacctttaccgagtacacaatccactgggtccgacaggcccctggcaaaggacttgagtgggtcgccaacatcaaccccaacaatggcggcaccacctacaaccagaagttcgaggacagattcaccatcagccgggacaacagcaagaacaccctgtacctccagatgaactccctgagagccgaggacaccgccgtgtactattgtgccagaggctggaacttcgactactggggccagggaacactggtcaccgttagctctacgcgtatccagaaccctgatcctgccgtgtaccagctgcgggatagcaagagcagcgacaagagcgtgtgtctgttcaccgacttcgacagccagaccaacgtgtcccagagcaaggactccgacgtgtacatcaccgataagaccgtgctggacatgcggagcatggacttcaagagcaactccgccgtggcctggtccaacaagtccgatttcgcctgcgccaacgccttcaacaacagcattatccccgaggacacattcttcccaagccccgagagcagctgcggtacccagagttttgggttgttggaccctaaattgtgctatctgttggacggaatcctgttcatttacggagtgatcctgaccgcattgttcctgcgggttaagttttccagatccgcagacgcacccgcttaccaacaagggcagaaccaactctacaatgaacttaatttggggcggagggaagagtacgacgttctggacaaaaggaggggacgagatcccgagatgggcggaaagcctcgaaggaagaatccgcaagaggggctttataacgaactccagaaagataaaatggcagaagcctatagtgagattgggatgaagggagaaaggaggaggggtaaaggtcacgatgggttgtaccaaggattgagcacagccactaaagatacctatgatgcgctccacatgcaggccctgccgccaagacgcgccaagagaagcggatctggcgtgaagcagaccctgaatttcgacctgctgaagctggctggcgacgtggaatccaacccaggcccttctagaggccatatgaccgagtacaagcccacggtgcgcctcgccacccgcgacgacgtccccagggccgtacgcaccctcgccgccgcgttcgccgactaccccgccacgcgccacaccgtcgatccggaccgccacatcgagcgggtcaccgagctgcaagaactcttcctcacgcgcgtcgggctcgacatcggcaaggtgtgggtcgcggacgacggcgccgcggtggcggtctggaccacgccggagagcgtcgaagcgggggcggtgttcgccgagatcggcccgcgcatggccgagttgagcggttcccggctggccgcgcagcaacagatggaaggcctcctggcgccgcaccggcccaaggagcccgcgtggttcctggccaccgtcggcgtctcgcccgaccaccagggcaagggtctgggcagcgccgtcgtgctccccggagtggaggcggccgagcgcgccggggtgcccgccttcctggagacctccgcgccccgcaacctccccttctacgagcggctcggcttcaccgtcaccgccgacgtcgaggtgcccgaaggaccgcgcacctggtgcatgacccgcaagcccggtgcctga

SEQ ID NO: 32764 - DNA, 2892 bp, synthetic construct; identical to SEQ ID NO: 1019
  source 1..2892: mol_type = other DNA

SEQ ID NO: 32765 - DNA, 2364 bp, synthetic construct
  source 1..2364: mol_type = other DNA
atggccttaccagtgaccgccttgctcctgccgctggccttgctgctccacgccgccaggccggacatccagatgacacagagccctagcagcctgtctgccagcgtgggagacagagtgaccatcacatgcaaggccagccaggatgtgggcacagccgtggattggtatcagcagaagcctggcaaggcccctaagctgctgatctactgggccagcacaagacacacaggcgtgcccagcagattttctggcagcggctctggcaccgacttcaccctgacaatatccagcctccagcctgaggacttcgccacctactactgccagcagtacaacagctaccctctgaccttcggccagggcaccaaggtggaaatcaaaagactcgaggacctgaagaacgtgttcccacctgaggtggccgtgttcgagcctagcgaggccgagatcagccacacccagaaagccaccctcgtgtgcctggctaccggcttctaccccgaccatgtggaactgtcttggtgggtcaacggcaaagaggtgcacagcggcgtgtctaccgacccccagccactgaaagaacagcccgccctgaacgacagccggtactgcctgagcagcagactgagagtgtccgccaccttctggcagaacccccggaaccacttcagatgccaggtgcagttctacggcctgagcgagaacgacgagtggacccaggacagagccaagcccgtgacccagatcgtgtctgccgaagcctggggcagagccgattgcggatcccagagcttcggcctgctggaccccaagctgtgctacctgctggatggcatcctgttcatctacggcgtgatcctgaccgccctgttcctgagagtgaagttcagcagaagcgccgacgcccctgcctaccagcagggacagaaccaactgtacaacgagctgaacctgggcagacgggaagagtacgacgtgctggacaagcggagaggcagggaccctgagatgggcggaaagccccggagaaagaacccccaggaaggactgtataacgaactccagaaagacaagatggccgaagcctacagcgagatcggcatgaagggcgagcggagaagaggcaagggccacgatggcctgtaccagggcctgagcaccgccaccaaggacacctatgacgccctgcacatgcaggccctgcctccaagaagggccaagcgatctggatctggagcaacaaacttctcactactcaaacaagcaggtgacgtggaggagaatcccgggcctactagtatggactggatttggcgcatccttttccttgtcggcgctgctaccggcgcgcattccttcgaagtgcagctggttgaatcaggtggcggcctggttcaacctggcggatctctgagactgagctgtgccgccagcggctacacctttaccgagtacacaatccactgggtccgacaggcccctggcaaaggacttgagtgggtcgccaacatcaaccccaacaatggcggcaccacctacaaccagaagttcgaggacagattcaccatcagccgggacaacagcaagaacaccctgtacctccagatgaactccctgagagccgaggacaccgccgtgtactattgtgccagaggctggaacttcgactactggggccagggaacactggtcaccgttagctctacgcgtggaatgaggactgaggatcttcccaaagctgtcgtctttctcgaaccccaatggtatcgggtgctcgaaaaagactctgtgacactgaaatgccaaggggcctactctcccgaggacaactccacacagtggtttcataatgagtccctcatcagctctcaggccagctcttatttcattgatgccgctacagtggacgactccggcgagtatcggtgtcagaccaatctgtctacactgtctgaccccgtgcagcttgaggtccacattggatggttgctcttgcaagccccacgctgggttttcaaagaggaagatccaatccatctgcggtgccacagctggaaaaacaccgctctccacaaagtcacatacctgcaaaatggcaaaggacgcaaatacttccatcacaattccgatttttacattccgaaggctaccctgaaagacagcggcagctatttctgccggggactcgtcggctccaagaatgtgtcctccgaaaccgtgaatatcacgattacccaaggactggctgtgcctacaatctctagcttctttccgcctggataccaagtctccttctgtcttgtgatggtcctcctgtttgctgtggacacaggactgtacttttccgtgaaatctagataa

SEQ ID NO: 32766 - DNA, 2361 bp, synthetic construct
  source 1..2361: mol_type = other DNA
atggccttaccagtgaccgccttgctcctgccgctggccttgctgctccacgccgccaggccggacatccagatgacacagagccctagcagcctgtctgccagcgtgggagacagagtgaccatcacatgcaaggccagccaggatgtgggcacagccgtggattggtatcagcagaagcctggcaaggcccctaagctgctgatctactgggccagcacaagacacacaggcgtgcccagcagattttctggcagcggctctggcaccgacttcaccctgacaatatccagcctccagcctgaggacttcgccacctactactgccagcagtacaacagctaccctctgaccttcggccagggcaccaaggtggaaatcaaaagactcgaggacctgaagaacgtgttcccacctgaggtggccgtgttcgagcctagcgaggccgagatcagccacacccagaaagccaccctcgtgtgcctggctaccggcttctaccccgaccatgtggaactgtcttggtgggtcaacggcaaagaggtgcacagcggcgtgtctaccgacccccagccactgaaagaacagcccgccctgaacgacagccggtactgcctgagcagcagactgagagtgtccgccaccttctggcagaacccccggaaccacttcagatgccaggtgcagttctacggcctgagcgagaacgacgagtggacccaggacagagccaagcccgtgacccagatcgtgtctgccgaagcctggggcagagccgattgcggatcccagagcttcggcctgctggaccccaagctgtgctacctgctggatggcatcctgttcatctacggcgtgatcctgaccgccctgttcctgagagtgaagttcagcagaagcgccgacgcccctgcctaccagcagggacagaaccaactgtacaacgagctgaacctgggcagacgggaagagtacgacgtgctggacaagcggagaggcagggaccctgagatgggcggaaagccccggagaaagaacccccaggaaggactgtataacgaactccagaaagacaagatggccgaagcctacagcgagatcggcatgaagggcgagcggagaagaggcaagggccacgatggcctgtaccagggcctgagcaccgccaccaaggacacctatgacgccctgcacatgcaggccctgcctccaagaagggccaagcgatctggatctggagcaacaaacttctcactactcaaacaagcaggtgacgtggaggagaatcccgggcctactagtatggactggatttggcgcatccttttccttgtcggcgctgctaccggcgcgcattccttcgaagtgcagctggttgaatcaggtggcggcctggttcaacctggcggatctctgagactgagctgtgccgccagcggctacacctttaccgagtacacaatccactgggtccgacaggcccctggcaaaggacttgagtgggtcgccaacatcaaccccaacaatggcggcaccacctacaaccagaagttcgaggacagattcaccatcagccgggacaacagcaagaacaccctgtacctccagatgaactccctgagagccgaggacaccgccgtgtactattgtgccagaggctggaacttcgactactggggccagggaacactggtcaccgttagctctacgcgtggaatgaggactgaggatcttcccaaagctgtcgtctttctcgaaccccaatggtatcgggtgctcgaaaaagactctgtgacactgaaatgccaaggggcctactctcccgaggacaactccacacagtggtttcataatgagtccctcatcagctctcaggccagctcttatttcattgatgccgctacagtggacgactccggcgagtatcggtgtcagaccaatctgtctacactgtctgaccccgtgcagcttgaggtccacattggatggttgctcttgcaagccccacgctgggttttcaaagaggaagatccaatccatctgcggtgccacagctggaaaaacaccgctctccacaaagtcacatacctgcaaaatggcaaaggacgcaaatacttccatcacaattccgatttttacattccgaaggctaccctgaaagacagcggcagctatttctgccggggactcgtcggctccaagaatgtgtcctccgaaaccgtgaatatcacgattacccaaggactggctgtgcctacaatctctagcttctttccgcctggataccaagtctccttctgtcttgtgatggtcctcctgtttgctgtggacacaggactgtacttttccgtgtctagataa

SEQ ID NO: 32767 - DNA, 2358 bp, synthetic construct
  source 1..2358: mol_type = other DNA
atggccttaccagtgaccgccttgctcctgccgctggccttgctgctccacgccgccaggccggacatccagatgacacagagccctagcagcctgtctgccagcgtgggagacagagtgaccatcacatgcaaggccagccaggatgtgggcacagccgtggattggtatcagcagaagcctggcaaggcccctaagctgctgatctactgggccagcacaagacacacaggcgtgcccagcagattttctggcagcggctctggcaccgacttcaccctgacaatatccagcctccagcctgaggacttcgccacctactactgccagcagtacaacagctaccctctgaccttcggccagggcaccaaggtggaaatcaaaagactcgaggacctgaagaacgtgttcccacctgaggtggccgtgttcgagcctagcgaggccgagatcagccacacccagaaagccaccctcgtgtgcctggctaccggcttctaccccgaccatgtggaactgtcttggtgggtcaacggcaaagaggtgcacagcggcgtgtctaccgacccccagccactgaaagaacagcccgccctgaacgacagccggtactgcctgagcagcagactgagagtgtccgccaccttctggcagaacccccggaaccacttcagatgccaggtgcagttctacggcctgagcgagaacgacgagtggacccaggacagagccaagcccgtgacccagatcgtgtctgccgaagcctggggcagagccgattgcggatcccagagcttcggcctgctggaccccaagctgtgctacctgctggatggcatcctgttcatctacggcgtgatcctgaccgccctgttcctgagagtgaagttcagcagaagcgccgacgcccctgcctaccagcagggacagaaccaactgtacaacgagctgaacctgggcagacgggaagagtacgacgtgctggacaagcggagaggcagggaccctgagatgggcggaaagccccggagaaagaacccccaggaaggactgtataacgaactccagaaagacaagatggccgaagcctacagcgagatcggcatgaagggcgagcggagaagaggcaagggccacgatggcctgtaccagggcctgagcaccgccaccaaggacacctatgacgccctgcacatgcaggccctgcctccaagaagggccaagcgatctggatctggagcaacaaacttctcactactcaaacaagcaggtgacgtggaggagaatcccgggcctactagtatggactggatttggcgcatccttttccttgtcggcgctgctaccggcgcgcattccttcgaagtgcagctggttgaatcaggtggcggcctggttcaacctggcggatctctgagactgagctgtgccgccagcggctacacctttaccgagtacacaatccactgggtccgacaggcccctggcaaaggacttgagtgggtcgccaacatcaaccccaacaatggcggcaccacctacaaccagaagttcgaggacagattcaccatcagccgggacaacagcaagaacaccctgtacctccagatgaactccctgagagccgaggacaccgccgtgtactattgtgccagaggctggaacttcgactactggggccagggaacactggtcaccgttagctctacgcgtggaatgaggactgaggatcttcccaaagctgtcgtctttctcgaaccccaatggtatcgggtgctcgaaaaagactctgtgacactgaaatgccaaggggcctactctcccgaggacaactccacacagtggtttcataatgagtccctcatcagctctcaggccagctcttatttcattgatgccgctacagtggacgactccggcgagtatcggtgtcagaccaatctgtctacactgtctgaccccgtgcagcttgaggtccacattggatggttgctcttgcaagccccacgctgggttttcaaagaggaagatccaatccatctgcggtgccacagctggaaaaacaccgctctccacaaagtcacatacctgcaaaatggcaaaggacgcaaatacttccatcacaattccgatttttacattccgaaggctaccctgaaagacagcggcagctatttctgccggggactcgtcggctccaagaatgtgtcctccgaaaccgtgaatatcacgattacccaaggactggctgtgcctacaatctctagcttctttccgcctggataccaagtctccttctgtcttgtgatggtcctcctgtttgctgtggacacaggactgtacttttcctctagataa

SEQ ID NO: 32768 - DNA, 2127 bp, synthetic construct
  source 1..2127: mol_type = other DNA
atggccttaccagtgaccgccttgctcctgccgctggccttgctgctccacgccgccaggccggacatccagatgacacagagccctagcagcctgtctgccagcgtgggagacagagtgaccatcacatgcaaggccagccaggatgtgggcacagccgtggattggtatcagcagaagcctggcaaggcccctaagctgctgatctactgggccagcacaagacacacaggcgtgcccagcagattttctggcagcggctctggcaccgacttcaccctgacaatatccagcctccagcctgaggacttcgccacctactactgccagcagtacaacagctaccctctgaccttcggccagggcaccaaggtggaaatcaaaagactcgaggacctgaagaacgtgttcccacctgaggtggccgtgttcgagcctagcgaggccgagatcagccacacccagaaagccaccctcgtgtgcctggctaccggcttctaccccgaccatgtggaactgtcttggtgggtcaacggcaaagaggtgcacagcggcgtgtctaccgacccccagccactgaaagaacagcccgccctgaacgacagccggtactgcctgagcagcagactgagagtgtccgccaccttctggcagaacccccggaaccacttcagatgccaggtgcagttctacggcctgagcgagaacgacgagtggacccaggacagagccaagcccgtgacccagatcgtgtctgccgaagcctggggcagagccgattgcggatcccagagcttcggcctgctggaccccaagctgtgctacctgctggatggcatcctgttcatctacggcgtgatcctgaccgccctgttcctgagagtgaagttcagcagaagcgccgacgcccctgcctaccagcagggacagaaccaactgtacaacgagctgaacctgggcagacgggaagagtacgacgtgctggacaagcggagaggcagggaccctgagatgggcggaaagccccggagaaagaacccccaggaaggactgtataacgaactccagaaagacaagatggccgaagcctacagcgagatcggcatgaagggcgagcggagaagaggcaagggccacgatggcctgtaccagggcctgagcaccgccaccaaggacacctatgacgccctgcacatgcaggccctgcctccaagaagggccaagcgatctggatctggagcaacaaacttctcactactcaaacaagcaggtgacgtggaggagaatcccgggcctactagtatggactggatttggcgcatccttttccttgtcggcgctgctaccggcgcgcattccttcgaagtgcagctggttgaatcaggtggcggcctggttcaacctggcggatctctgagactgagctgtgccgccagcggctacacctttaccgagtacacaatccactgggtccgacaggcccctggcaaaggacttgagtgggtcgccaacatcaaccccaacaatggcggcaccacctacaaccagaagttcgaggacagattcaccatcagccgggacaacagcaagaacaccctgtacctccagatgaactccctgagagccgaggacaccgccgtgtactattgtgccagaggctggaacttcgactactggggccagggaacactggtcaccgttagctctacgcgtatccagaaccctgatcctgccgtgtaccagctgcgggatagcaagagcagcgacaagagcgtgtgtctgttcaccgacttcgacagccagaccaacgtgtcccagagcaaggactccgacgtgtacatcaccgataagaccgtgctggacatgcggagcatggacttcaagagcaactccgccgtggcctggtccaacaagtccgatttcgcctgcgccaacgccttcaacaacagcattatccccgaggacacattcttcccaagccccgagagcagctgcggtaccatcactcaaggtttggcagtgtcaaccatctcatcattctttccacctggctaccaagtgtccttctgcctggtcatggtgctgctgttcgccgtggataccggcctgtacttcagcgtcaagtaa

SEQ ID NO: 32769 - DNA, 2124 bp, synthetic construct
  source 1..2124: mol_type = other DNA
atggccttaccagtgaccgccttgctcctgccgctggccttgctgctccacgccgccaggccggacatccagatgacacagagccctagcagcctgtctgccagcgtgggagacagagtgaccatcacatgcaaggccagccaggatgtgggcacagccgtggattggtatcagcagaagcctggcaaggcccctaagctgctgatctactgggccagcacaagacacacaggcgtgcccagcagattttctggcagcggctctggcaccgacttcaccctgacaatatccagcctccagcctgaggacttcgccacctactactgccagcagtacaacagctaccctctgaccttcggccagggcaccaaggtggaaatcaaaagactcgaggacctgaagaacgtgttcccacctgaggtggccgtgttcgagcctagcgaggccgagatcagccacacccagaaagccaccctcgtgtgcctggctaccggcttctaccccgaccatgtggaactgtcttggtgggtcaacggcaaagaggtgcacagcggcgtgtctaccgacccccagccactgaaagaacagcccgccctgaacgacagccggtactgcctgagcagcagactgagagtgtccgccaccttctggcagaacccccggaaccacttcagatgccaggtgcagttctacggcctgagcgagaacgacgagtggacccaggacagagccaagcccgtgacccagatcgtgtctgccgaagcctggggcagagccgattgcggatcccagagcttcggcctgctggaccccaagctgtgctacctgctggatggcatcctgttcatctacggcgtgatcctgaccgccctgttcctgagagtgaagttcagcagaagcgccgacgcccctgcctaccagcagggacagaaccaactgtacaacgagctgaacctgggcagacgggaagagtacgacgtgctggacaagcggagaggcagggaccctgagatgggcggaaagccccggagaaagaacccccaggaaggactgtataacgaactccagaaagacaagatggccgaagcctacagcgagatcggcatgaagggcgagcggagaagaggcaagggccacgatggcctgtaccagggcctgagcaccgccaccaaggacacctatgacgccctgcacatgcaggccctgcctccaagaagggccaagcgatctggatctggagcaacaaacttctcactactcaaacaagcaggtgacgtggaggagaatcccgggcctactagtatggactggatttggcgcatccttttccttgtcggcgctgctaccggcgcgcattccttcgaagtgcagctggttgaatcaggtggcggcctggttcaacctggcggatctctgagactgagctgtgccgccagcggctacacctttaccgagtacacaatccactgggtccgacaggcccctggcaaaggacttgagtgggtcgccaacatcaaccccaacaatggcggcaccacctacaaccagaagttcgaggacagattcaccatcagccgggacaacagcaagaacaccctgtacctccagatgaactccctgagagccgaggacaccgccgtgtactattgtgccagaggctggaacttcgactactggggccagggaacactggtcaccgttagctctacgcgtatccagaaccctgatcctgccgtgtaccagctgcgggatagcaagagcagcgacaagagcgtgtgtctgttcaccgacttcgacagccagaccaacgtgtcccagagcaaggactccgacgtgtacatcaccgataagaccgtgctggacatgcggagcatggacttcaagagcaactccgccgtggcctggtccaacaagtccgatttcgcctgcgccaacgccttcaacaacagcattatccccgaggacacattcttcccaagccccgagagcagctgcggtaccatcactcaaggtttggcagtgtcaaccatctcatcattctttccacctggctaccaagtgtccttctgcctggtcatggtgctgctgttcgccgtggataccggcctgtacttcagcgtctaa

SEQ ID NO: 32770 - DNA, 3024 bp, synthetic construct
  source 1..3024: mol_type = other DNA
atggccttaccagtgaccgccttgctcctgccgctggccttgctgctccacgccgccaggccggacatccagatgacacagagccctagcagcctgtctgccagcgtgggagacagagtgaccatcacatgcaaggccagccaggatgtgggcacagccgtggattggtatcagcagaagcctggcaaggcccctaagctgctgatctactgggccagcacaagacacacaggcgtgcccagcagattttctggcagcggctctggcaccgacttcaccctgacaatatccagcctccagcctgaggacttcgccacctactactgccagcagtacaacagctaccctctgaccttcggccagggcaccaaggtggaaatcaaaagactcgaggacctgaagaacgtgttcccacctgaggtggccgtgttcgagcctagcgaggccgagatcagccacacccagaaagccaccctcgtgtgcctggctaccggcttctaccccgaccatgtggaactgtcttggtgggtcaacggcaaagaggtgcacagcggcgtgtctaccgacccccagccactgaaagaacagcccgccctgaacgacagccggtactgcctgagcagcagactgagagtgtccgccaccttctggcagaacccccggaaccacttcagatgccaggtgcagttctacggcctgagcgagaacgacgagtggacccaggacagagccaagcccgtgacccagatcgtgtctgccgaagcctggggcagagccgattgcggatcccagagcttcggcctgctggaccccaagctgtgctacctgctggatggcatcctgttcatctacggcgtgatcctgaccgccctgttcctgagagtgaagttcagcagaagcgccgacgcccctgcctaccagcagggacagaaccaactgtacaacgagctgaacctgggcagacgggaagagtacgacgtgctggacaagcggagaggcagggaccctgagatgggcggaaagccccggagaaagaacccccaggaaggactgtataacgaactccagaaagacaagatggccgaagcctacagcgagatcggcatgaagggcgagcggagaagaggcaagggccacgatggcctgtaccagggcctgagcaccgccaccaaggacacctatgacgccctgcacatgcaggccctgcctccaagaagggccaagcgatctggatctggagcaacaaacttctcactactcaaacaagcaggtgacgtggaggagaatcccgggcctactagtatggactggatttggcgcatccttttccttgtcggcgctgctaccggcgcgcattccttcgaagtgcagctggttgaatcaggtggcggcctggttcaacctggcggatctctgagactgagctgtgccgccagcggctacacctttaccgagtacacaatccactgggtccgacaggcccctggcaaaggacttgagtgggtcgccaacatcaaccccaacaatggcggcaccacctacaaccagaagttcgaggacagattcaccatcagccgggacaacagcaagaacaccctgtacctccagatgaactccctgagagccgaggacaccgccgtgtactattgtgccagaggctggaacttcgactactggggccagggaacactggtcaccgttagctctacgcgtatccagaaccctgatcctgccgtgtaccagctgcgggatagcaagagcagcgacaagagcgtgtgtctgttcaccgacttcgacagccagaccaacgtgtcccagagcaaggactccgacgtgtacatcaccgataagaccgtgctggacatgcggagcatggacttcaagagcaactccgccgtggcctggtccaacaagtccgatttcgcctgcgccaacgccttcaacaacagcattatccccgaggacacattcttcccaagccccgagagcagctgcggtaccatcactcaaggtttggcagtgtcaaccatctcatcattctttccacctggctaccaagtgtccttctgcctggtcatggtgctgctgttcgccgtggataccggcctgtacttcagcgtcaagaccaacatccggtccagcaccagagactggaaggaccacaagttcaagtggcggaaggaccctcaggacaagaagagaggccggaagaagctgctgtacatcttcaagcagcctttcatgcggcccgtgcagaccacccaggaagaggacggctgctcctgccggttccccgaggaagaagaaggcggctgcgagctgcgcgccaagagaagcggatctggcgtgaagcagaccctgaatttcgacctgctgaagctggctggcgacgtggaatccaacccaggcccttctagaggccatatgaccgagtacaagcccacggtgcgcctcgccacccgcgacgacgtccccagggccgtacgcaccctcgccgccgcgttcgccgactaccccgccacgcgccacaccgtcgatccggaccgccacatcgagcgggtcaccgagctgcaagaactcttcctcacgcgcgtcgggctcgacatcggcaaggtgtgggtcgcggacgacggcgccgcggtggcggtctggaccacgccggagagcgtcgaagcgggggcggtgttcgccgagatcggcccgcgcatggccgagttgagcggttcccggctggccgcgcagcaacagatggaaggcctcctggcgccgcaccggcccaaggagcccgcgtggttcctggccaccgtcggcgtctcgcccgaccaccagggcaagggtctgggcagcgccgtcgtgctccccggagtggaggcggccgagcgcgccggggtgcccgccttcctggagacctccgcgccccgcaacctccccttctacgagcggctcggcttcaccgtcaccgccgacgtcgaggtgcccgaaggaccgcgcacctggtgcatgacccgcaagcccggtgcctga

SEQ ID NO: 32771 - DNA, 3258 bp, synthetic construct
  source 1..3258: mol_type = other DNA
atggccttaccagtgaccgccttgctcctgccgctggccttgctgctccacgccgccaggccggacatccagatgacacagagccctagcagcctgtctgccagcgtgggagacagagtgaccatcacatgcaaggccagccaggatgtgggcacagccgtggattggtatcagcagaagcctggcaaggcccctaagctgctgatctactgggccagcacaagacacacaggcgtgcccagcagattttctggcagcggctctggcaccgacttcaccctgacaatatccagcctccagcctgaggacttcgccacctactactgccagcagtacaacagctaccctctgaccttcggccagggcaccaaggtggaaatcaaaagactcgaggacctgaagaacgtgttcccacctgaggtggccgtgttcgagcctagcgaggccgagatcagccacacccagaaagccaccctcgtgtgcctggctaccggcttctaccccgaccatgtggaactgtcttggtgggtcaacggcaaagaggtgcacagcggcgtgtctaccgacccccagccactgaaagaacagcccgccctgaacgacagccggtactgcctgagcagcagactgagagtgtccgccaccttctggcagaacccccggaaccacttcagatgccaggtgcagttctacggcctgagcgagaacgacgagtggacccaggacagagccaagcccgtgacccagatcgtgtctgccgaagcctggggcagagccgattgcggatcccagagcttcggcctgctggaccccaagctgtgctacctgctggatggcatcctgttcatctacggcgtgatcctgaccgccctgttcctgagagtgaagttcagcagaagcgccgacgcccctgcctaccagcagggacagaaccaactgtacaacgagctgaacctgggcagacgggaagagtacgacgtgctggacaagcggagaggcagggaccctgagatgggcggaaagccccggagaaagaacccccaggaaggactgtataacgaactccagaaagacaagatggccgaagcctacagcgagatcggcatgaagggcgagcggagaagaggcaagggccacgatggcctgtaccagggcctgagcaccgccaccaaggacacctatgacgccctgcacatgcaggccctgcctccaagaagggccaagcgatctggatctggagcaacaaacttctcactactcaaacaagcaggtgacgtggaggagaatcccgggcctactagtatggactggatttggcgcatccttttccttgtcggcgctgctaccggcgcgcattccttcgaagtgcagctggttgaatcaggtggcggcctggttcaacctggcggatctctgagactgagctgtgccgccagcggctacacctttaccgagtacacaatccactgggtccgacaggcccctggcaaaggacttgagtgggtcgccaacatcaaccccaacaatggcggcaccacctacaaccagaagttcgaggacagattcaccatcagccgggacaacagcaagaacaccctgtacctccagatgaactccctgagagccgaggacaccgccgtgtactattgtgccagaggctggaacttcgactactggggccagggaacactggtcaccgttagctctacgcgtatccagaaccctgatcctgccgtgtaccagctgcgggatagcaagagcagcgacaagagcgtgtgtctgttcaccgacttcgacagccagaccaacgtgtcccagagcaaggactccgacgtgtacatcaccgataagaccgtgctggacatgcggagcatggacttcaagagcaactccgccgtggcctggtccaacaagtccgatttcgcctgcgccaacgccttcaacaacagcattatccccgaggacacattcttcccaagccccgagagcagctgcggtaccatcactcaaggtttggcagtgtcaaccatctcatcattctttccacctggctaccaagtgtccttctgcctggtcatggtgctgctgttcgccgtggataccggcctgtacttcagcgtcaagaccaacatccggtccagcaccagagactggaaggaccacaagttcaagtggcggaaggaccctcaggacaagtggcgacgcaagcgcaaagaaaagcaaagcgagacaagcccaaaagaatttctcactatatacgaggacgtgaaagatttgaagacgaggcggaatcatgagcaagagcagacatttcctggcgggggctctactatctactcaatgattcaatcccaaagctccgctccgacttcccaagagcccgcttacactctctactcactgatacagccttcaagaaaatcaggctctcggaaacggaatcattccccatccttcaatagtaccatctatgaagtaatcggtaagagtcaacctaaagctcaaaaccccgctcgcttgagccgcaaggagctggaaaacttcgatgtatatagccgcgccaagagaagcggatctggcgtgaagcagaccctgaatttcgacctgctgaagctggctggcgacgtggaatccaacccaggcccttctagaggccatatgaccgagtacaagcccacggtgcgcctcgccacccgcgacgacgtccccagggccgtacgcaccctcgccgccgcgttcgccgactaccccgccacgcgccacaccgtcgatccggaccgccacatcgagcgggtcaccgagctgcaagaactcttcctcacgcgcgtcgggctcgacatcggcaaggtgtgggtcgcggacgacggcgccgcggtggcggtctggaccacgccggagagcgtcgaagcgggggcggtgttcgccgagatcggcccgcgcatggccgagttgagcggttcccggctggccgcgcagcaacagatggaaggcctcctggcgccgcaccggcccaaggagcccgcgtggttcctggccaccgtcggcgtctcgcccgaccaccagggcaagggtctgggcagcgccgtcgtgctccccggagtggaggcggccgagcgcgccggggtgcccgccttcctggagacctccgcgccccgcaacctccccttctacgagcggctcggcttcaccgtcaccgccgacgtcgaggtgcccgaaggaccgcgcacctggtgcatgacccgcaagcccggtgcctga

SEQ ID NO: 32772 - DNA, 2949 bp, synthetic construct
  source 1..2949: mol_type = other DNA
atggccttaccagtgaccgccttgctcctgccgctggccttgctgctccacgccgccaggccggacatccagatgacacagagccctagcagcctgtctgccagcgtgggagacagagtgaccatcacatgcaaggccagccaggatgtgggcacagccgtggattggtatcagcagaagcctggcaaggcccctaagctgctgatctactgggccagcacaagacacacaggcgtgcccagcagattttctggcagcggctctggcaccgacttcaccctgacaatatccagcctccagcctgaggacttcgccacctactactgccagcagtacaacagctaccctctgaccttcggccagggcaccaaggtggaaatcaaaagactcgaggacctgaagaacgtgttcccacctgaggtggccgtgttcgagcctagcgaggccgagatcagccacacccagaaagccaccctcgtgtgcctggctaccggcttctaccccgaccatgtggaactgtcttggtgggtcaacggcaaagaggtgcacagcggcgtgtctaccgacccccagccactgaaagaacagcccgccctgaacgacagccggtactgcctgagcagcagactgagagtgtccgccaccttctggcagaacccccggaaccacttcagatgccaggtgcagttctacggcctgagcgagaacgacgagtggacccaggacagagccaagcccgtgacccagatcgtgtctgccgaagcctggggcagagccgattgcggatcccagagcttcggcctgctggaccccaagctgtgctacctgctggatggcatcctgttcatctacggcgtgatcctgaccgccctgttcctgagagtgaagttcagcagaagcgccgacgcccctgcctaccagcagggacagaaccaactgtacaacgagctgaacctgggcagacgggaagagtacgacgtgctggacaagcggagaggcagggaccctgagatgggcggaaagccccggagaaagaacccccaggaaggactgtataacgaactccagaaagacaagatggccgaagcctacagcgagatcggcatgaagggcgagcggagaagaggcaagggccacgatggcctgtaccagggcctgagcaccgccaccaaggacacctatgacgccctgcacatgcaggccctgcctccaagaagggccaagcgatctggatctggagcaacaaacttctcactactcaaacaagcaggtgacgtggaggagaatcccgggcctactagtatggactggatttggcgcatccttttccttgtcggcgctgctaccggcgcgcattccttcgaagtgcagctggttgaatcaggtggcggcctggttcaacctggcggatctctgagactgagctgtgccgccagcggctacacctttaccgagtacacaatccactgggtccgacaggcccctggcaaaggacttgagtgggtcgccaacatcaaccccaacaatggcggcaccacctacaaccagaagttcgaggacagattcaccatcagccgggacaacagcaagaacaccctgtacctccagatgaactccctgagagccgaggacaccgccgtgtactattgtgccagaggctggaacttcgactactggggccagggaacactggtcaccgttagctctacgcgtatccagaaccctgatcctgccgtgtaccagctgcgggatagcaagagcagcgacaagagcgtgtgtctgttcaccgacttcgacagccagaccaacgtgtcccagagcaaggactccgacgtgtacatcaccgataagaccgtgctggacatgcggagcatggacttcaagagcaactccgccgtggcctggtccaacaagtccgatttcgcctgcgccaacgccttcaacaacagcattatccccgaggacacattcttcccaagccccgagagcagctgcggtaccatcactcaaggtttggcagtgtcaaccatctcatcattctttccacctggctaccaagtgtccttctgcctggtcatggtgctgctgttcgccgtggataccggcctgtacttcagcgtcaagagaggccggaagaagctgctgtacatcttcaagcagcctttcatgcggcccgtgcagaccacccaggaagaggacggctgctcctgccggttccccgaggaagaagaaggcggctgcgagctgcgcgccaagagaagcggatctggcgtgaagcagaccctgaatttcgacctgctgaagctggctggcgacgtggaatccaacccaggcccttctagaggccatatgaccgagtacaagcccacggtgcgcctcgccacccgcgacgacgtccccagggccgtacgcaccctcgccgccgcgttcgccgactaccccgccacgcgccacaccgtcgatccggaccgccacatcgagcgggtcaccgagctgcaagaactcttcctcacgcgcgtcgggctcgacatcggcaaggtgtgggtcgcggacgacggcgccgcggtggcggtctggaccacgccggagagcgtcgaagcgggggcggtgttcgccgagatcggcccgcgcatggccgagttgagcggttcccggctggccgcgcagcaacagatggaaggcctcctggcgccgcaccggcccaaggagcccgcgtggttcctggccaccgtcggcgtctcgcccgaccaccagggcaagggtctgggcagcgccgtcgtgctccccggagtggaggcggccgagcgcgccggggtgcccgccttcctggagacctccgcgccccgcaacctccccttctacgagcggctcggcttcaccgtcaccgccgacgtcgaggtgcccgaaggaccgcgcacctggtgcatgacccgcaagcccggtgcctga

SEQ ID NO: 32773 - DNA, 3144 bp, synthetic construct
  source 1..3144: mol_type = other DNA
atggccttaccagtgaccgccttgctcctgccgctggccttgctgctccacgccgccaggccggagatcgtgctgacacagtctcccgccacactgtcactgtctccaggcgaaagagccacactgagctgtagagccagccagagcgtgtcctcttacctggcctggtatcagcagaagcctggacaggctccccggctgctgatctacgatgccagcaatagagccacaggcatccccgccagattttctggctctggcagcggcaccgatttcaccctgaccataagcagcctggaacctgaggacttcgccgtgtactactgccagcagagaagcgactggcccctgacatttggcggcggaacaaaggtggaaatcaaactcgaggacctgaagaacgtgttcccacctgaggtggccgtgttcgagcctagcgaggccgagatcagccacacccagaaagccaccctcgtgtgcctggctaccggcttctaccccgaccatgtggaactgtcttggtgggtcaacggcaaagaggtgcacagcggcgtgtctaccgacccccagccactgaaagaacagcccgccctgaacgacagccggtactgcctgagcagcagactgagagtgtccgccaccttctggcagaacccccggaaccacttcagatgccaggtgcagttctacggcctgagcgagaacgacgagtggacccaggacagagccaagcccgtgacccagatcgtgtctgccgaagcctggggcagagccgattgcggatcccagagcttcggcctgctggaccccaagctgtgctacctgctggatggcatcctgttcatctacggcgtgatcctgaccgccctgttcctgagagtgaagttcagcagaagcgccgacgcccctgcctaccagcagggacagaaccaactgtacaacgagctgaacctgggcagacgggaagagtacgacgtgctggacaagcggagaggcagggaccctgagatgggcggaaagccccggagaaagaacccccaggaaggactgtataacgaactccagaaagacaagatggccgaagcctacagcgagatcggcatgaagggcgagcggagaagaggcaagggccacgatggcctgtaccagggcctgagcaccgccaccaaggacacctatgacgccctgcacatgcaggccctgcctccaagaagggccaagcgatctggatctggagcaacaaacttctcactactcaaacaagcaggtgacgtggaggagaatcccgggcctactagtatggactggatttggcgcatccttttccttgtcggcgctgctaccggcgcgcattccttcgaacaagttcagctggttcagagcggagccgaagtgaagaaacctggcagcagcgtgaaggtgtcctgcaaagcaagcggcggcacctttagcacctacgccatccactgggttcgacaggcaccaggacaaggactggaatggatgggcagaatcatccccatcgagggcagagcctactacgcccagaaattccagggcagagtgaccatcaccgccgacgagtctacaagcaccgcctacatggaactgagcagcctgagaagcgaggataccgctgtgtactattgcgccagaggccggtacagctacagatattggttcgactactggggccagggcaccctggttacagtctcttctacgcgtatccagaaccctgatcctgccgtgtaccagctgcgggatagcaagagcagcgacaagagcgtgtgtctgttcaccgacttcgacagccagaccaacgtgtcccagagcaaggactccgacgtgtacatcaccgataagaccgtgctggacatgcggagcatggacttcaagagcaactccgccgtggcctggtccaacaagtccgatttcgcctgcgccaacgccttcaacaacagcattatccccgaggacacattcttcccaagccccgagagcagctgcggtacccagagttttgggttgttggaccctaaattgtgctatctgttggacggaatcctgttcatttacggagtgatcctgaccgcattgttcctgcgggttaagttttccagatccgcagacgcacccgcttaccaacaagggcagaaccaactctacaatgaacttaatttggggcggagggaagagtacgacgttctggacaaaaggaggggacgagatcccgagatgggcggaaagcctcgaaggaagaatccgcaagaggggctttataacgaactccagaaagataaaatggcagaagcctatagtgagattgggatgaagggagaaaggaggaggggtaaaggtcacgatgggttgtaccaaggattgagcacagccactaaagatacctatgatgcgctccacatgcaggccctgccgccaagacgcgccaagagaagcggatctggcgtgaagcagaccctgaatttcgacctgctgaagctggctggcgacgtggaatccaacccaggcccttctagaggccatatgaccgagtacaagcccacggtgcgcctcgccacccgcgacgacgtccccagggccgtacgcaccctcgccgccgcgttcgccgactaccccgccacgcgccacaccgtcgatccggaccgccacatcgagcgggtcaccgagctgcaagaactcttcctcacgcgcgtcgggctcgacatcggcaaggtgtgggtcgcggacgacggcgccgcggtggcggtctggaccacgccggagagcgtcgaagcgggggcggtgttcgccgagatcggcccgcgcatggccgagttgagcggttcccggctggccgcgcagcaacagatggaaggcctcctggcgccgcaccggcccaaggagcccgcgtggttcctggccaccgtcggcgtctcgcccgaccaccagggcaagggtctgggcagcgccgtcgtgctccccggagtggaggcggccgagcgcgccggggtgcccgccttcctggagacctccgcgccccgcaacctccccttctacgagcggctcggcttcaccgtcaccgccgacgtcgaggtgcccgaaggaccgcgcacctggtgcatgacccgcaagcccggtgcctga

SEQ ID NO: 32774 - DNA, 3273 bp, synthetic construct
  source 1..3273: mol_type = other DNA
atggccttaccagtgaccgccttgctcctgccgctggccttgctgctccacgccgccaggccggagatcgtgctgacacagtctcccgccacactgtcactgtctccaggcgaaagagccacactgagctgtagagccagccagagcgtgtcctcttacctggcctggtatcagcagaagcctggacaggctccccggctgctgatctacgatgccagcaatagagccacaggcatccccgccagattttctggctctggcagcggcaccgatttcaccctgaccataagcagcctggaacctgaggacttcgccgtgtactactgccagcagagaagcgactggcccctgacatttggcggcggaacaaaggtggaaatcaaactcgaggacctgaagaacgtgttcccacctgaggtggccgtgttcgagcctagcgaggccgagatcagccacacccagaaagccaccctcgtgtgcctggctaccggcttctaccccgaccatgtggaactgtcttggtgggtcaacggcaaagaggtgcacagcggcgtgtctaccgacccccagccactgaaagaacagcccgccctgaacgacagccggtactgcctgagcagcagactgagagtgtccgccaccttctggcagaacccccggaaccacttcagatgccaggtgcagttctacggcctgagcgagaacgacgagtggacccaggacagagccaagcccgtgacccagatcgtgtctgccgaagcctggggcagagccgattgcggatcccagagcttcggcctgctggaccccaagctgtgctacctgctggatggcatcctgttcatctacggcgtgatcctgaccgccctgttcctgagagtgaagttcagcagaagcgccgacgcccctgcctaccagcagggacagaaccaactgtacaacgagctgaacctgggcagacgggaagagtacgacgtgctggacaagcggagaggcagggaccctgagatgggcggaaagccccggagaaagaacccccaggaaggactgtataacgaactccagaaagacaagatggccgaagcctacagcgagatcggcatgaagggcgagcggagaagaggcaagggccacgatggcctgtaccagggcctgagcaccgccaccaaggacacctatgacgccctgcacatgcaggccctgcctccaagaagggccaagcgatctggatctggagcaacaaacttctcactactcaaacaagcaggtgacgtggaggagaatcccgggcctactagtatggactggatttggcgcatccttttccttgtcggcgctgctaccggcgcgcattccttcgaacaagttcagctggttcagagcggagccgaagtgaagaaacctggcagcagcgtgaaggtgtcctgcaaagcaagcggcggcacctttagcacctacgccatccactgggttcgacaggcaccaggacaaggactggaatggatgggcagaatcatccccatcgagggcagagcctactacgcccagaaattccagggcagagtgaccatcaccgccgacgagtctacaagcaccgcctacatggaactgagcagcctgagaagcgaggataccgctgtgtactattgcgccagaggccggtacagctacagatattggttcgactactggggccagggcaccctggttacagtctcttctacgcgtatccagaaccctgatcctgccgtgtaccagctgcgggatagcaagagcagcgacaagagcgtgtgtctgttcaccgacttcgacagccagaccaacgtgtcccagagcaaggactccgacgtgtacatcaccgataagaccgtgctggacatgcggagcatggacttcaagagcaactccgccgtggcctggtccaacaagtccgatttcgcctgcgccaacgccttcaacaacagcattatccccgaggacacattcttcccaagccccgagagcagctgcggtaccatcactcaaggtttggcagtgtcaaccatctcatcattctttccacctggctaccaagtgtccttctgcctggtcatggtgctgctgttcgccgtggataccggcctgtacttcagcgtcaagaccaacatccggtccagcaccagagactggaaggaccacaagttcaagtggcggaaggaccctcaggacaagtggcgacgcaagcgcaaagaaaagcaaagcgagacaagcccaaaagaatttctcactatatacgaggacgtgaaagatttgaagacgaggcggaatcatgagcaagagcagacatttcctggcgggggctctactatctactcaatgattcaatcccaaagctccgctccgacttcccaagagcccgcttacactctctactcactgatacagccttcaagaaaatcaggctctcggaaacggaatcattccccatccttcaatagtaccatctatgaagtaatcggtaagagtcaacctaaagctcaaaaccccgctcgcttgagccgcaaggagctggaaaacttcgatgtatatagccgcgccaagagaagcggatctggcgtgaagcagaccctgaatttcgacctgctgaagctggctggcgacgtggaatccaacccaggcccttctagaggccatatgaccgagtacaagcccacggtgcgcctcgccacccgcgacgacgtccccagggccgtacgcaccctcgccgccgcgttcgccgactaccccgccacgcgccacaccgtcgatccggaccgccacatcgagcgggtcaccgagctgcaagaactcttcctcacgcgcgtcgggctcgacatcggcaaggtgtgggtcgcggacgacggcgccgcggtggcggtctggaccacgccggagagcgtcgaagcgggggcggtgttcgccgagatcggcccgcgcatggccgagttgagcggttcccggctggccgcgcagcaacagatggaaggcctcctggcgccgcaccggcccaaggagcccgcgtggttcctggccaccgtcggcgtctcgcccgaccaccagggcaagggtctgggcagcgccgtcgtgctccccggagtggaggcggccgagcgcgccggggtgcccgccttcctggagacctccgcgccccgcaacctccccttctacgagcggctcggcttcaccgtcaccgccgacgtcgaggtgcccgaaggaccgcgcacctggtgcatgacccgcaagcccggtgcctga

SEQ ID NO: 32775 - DNA, 2964 bp, synthetic construct
  source 1..2964: mol_type = other DNA
atggccttaccagtgaccgccttgctcctgccgctggccttgctgctccacgccgccaggccggagatcgtgctgacacagtctcccgccacactgtcactgtctccaggcgaaagagccacactgagctgtagagccagccagagcgtgtcctcttacctggcctggtatcagcagaagcctggacaggctccccggctgctgatctacgatgccagcaatagagccacaggcatccccgccagattttctggctctggcagcggcaccgatttcaccctgaccataagcagcctggaacctgaggacttcgccgtgtactactgccagcagagaagcgactggcccctgacatttggcggcggaacaaaggtggaaatcaaactcgaggacctgaagaacgtgttcccacctgaggtggccgtgttcgagcctagcgaggccgagatcagccacacccagaaagccaccctcgtgtgcctggctaccggcttctaccccgaccatgtggaactgtcttggtgggtcaacggcaaagaggtgcacagcggcgtgtctaccgacccccagccactgaaagaacagcccgccctgaacgacagccggtactgcctgagcagcagactgagagtgtccgccaccttctggcagaacccccggaaccacttcagatgccaggtgcagttctacggcctgagcgagaacgacgagtggacccaggacagagccaagcccgtgacccagatcgtgtctgccgaagcctggggcagagccgattgcggatcccagagcttcggcctgctggaccccaagctgtgctacctgctggatggcatcctgttcatctacggcgtgatcctgaccgccctgttcctgagagtgaagttcagcagaagcgccgacgcccctgcctaccagcagggacagaaccaactgtacaacgagctgaacctgggcagacgggaagagtacgacgtgctggacaagcggagaggcagggaccctgagatgggcggaaagccccggagaaagaacccccaggaaggactgtataacgaactccagaaagacaagatggccgaagcctacagcgagatcggcatgaagggcgagcggagaagaggcaagggccacgatggcctgtaccagggcctgagcaccgccaccaaggacacctatgacgccctgcacatgcaggccctgcctccaagaagggccaagcgatctggatctggagcaacaaacttctcactactcaaacaagcaggtgacgtggaggagaatcccgggcctactagtatggactggatttggcgcatccttttccttgtcggcgctgctaccggcgcgcattccttcgaacaagttcagctggttcagagcggagccgaagtgaagaaacctggcagcagcgtgaaggtgtcctgcaaagcaagcggcggcacctttagcacctacgccatccactgggttcgacaggcaccaggacaaggactggaatggatgggcagaatcatccccatcgagggcagagcctactacgcccagaaattccagggcagagtgaccatcaccgccgacgagtctacaagcaccgcctacatggaactgagcagcctgagaagcgaggataccgctgtgtactattgcgccagaggccggtacagctacagatattggttcgactactggggccagggcaccctggttacagtctcttctacgcgtatccagaaccctgatcctgccgtgtaccagctgcgggatagcaagagcagcgacaagagcgtgtgtctgttcaccgacttcgacagccagaccaacgtgtcccagagcaaggactccgacgtgtacatcaccgataagaccgtgctggacatgcggagcatggacttcaagagcaactccgccgtggcctggtccaacaagtccgatttcgcctgcgccaacgccttcaacaacagcattatccccgaggacacattcttcccaagccccgagagcagctgcggtaccatcactcaaggtttggcagtgtcaaccatctcatcattctttccacctggctaccaagtgtccttctgcctggtcatggtgctgctgttcgccgtggataccggcctgtacttcagcgtcaagagaggccggaagaagctgctgtacatcttcaagcagcctttcatgcggcccgtgcagaccacccaggaagaggacggctgctcctgccggttccccgaggaagaagaaggcggctgcgagctgcgcgccaagagaagcggatctggcgtgaagcagaccctgaatttcgacctgctgaagctggctggcgacgtggaatccaacccaggcccttctagaggccatatgaccgagtacaagcccacggtgcgcctcgccacccgcgacgacgtccccagggccgtacgcaccctcgccgccgcgttcgccgactaccccgccacgcgccacaccgtcgatccggaccgccacatcgagcgggtcaccgagctgcaagaactcttcctcacgcgcgtcgggctcgacatcggcaaggtgtgggtcgcggacgacggcgccgcggtggcggtctggaccacgccggagagcgtcgaagcgggggcggtgttcgccgagatcggcccgcgcatggccgagttgagcggttcccggctggccgcgcagcaacagatggaaggcctcctggcgccgcaccggcccaaggagcccgcgtggttcctggccaccgtcggcgtctcgcccgaccaccagggcaagggtctgggcagcgccgtcgtgctccccggagtggaggcggccgagcgcgccggggtgcccgccttcctggagacctccgcgccccgcaacctccccttctacgagcggctcggcttcaccgtcaccgccgacgtcgaggtgcccgaaggaccgcgcacctggtgcatgacccgcaagcccggtgcctga

SEQ ID NO: 32776 - DNA, 3039 bp, synthetic construct
  source 1..3039: mol_type = other DNA
atggccttaccagtgaccgccttgctcctgccgctggccttgctgctccacgccgccaggccggagatcgtgctgacacagtctcccgccacactgtcactgtctccaggcgaaagagccacactgagctgtagagccagccagagcgtgtcctcttacctggcctggtatcagcagaagcctggacaggctccccggctgctgatctacgatgccagcaatagagccacaggcatccccgccagattttctggctctggcagcggcaccgatttcaccctgaccataagcagcctggaacctgaggacttcgccgtgtactactgccagcagagaagcgactggcccctgacatttggcggcggaacaaaggtggaaatcaaactcgaggacctgaagaacgtgttcccacctgaggtggccgtgttcgagcctagcgaggccgagatcagccacacccagaaagccaccctcgtgtgcctggctaccggcttctaccccgaccatgtggaactgtcttggtgggtcaacggcaaagaggtgcacagcggcgtgtctaccgacccccagccactgaaagaacagcccgccctgaacgacagccggtactgcctgagcagcagactgagagtgtccgccaccttctggcagaacccccggaaccacttcagatgccaggtgcagttctacggcctgagcgagaacgacgagtggacccaggacagagccaagcccgtgacccagatcgtgtctgccgaagcctggggcagagccgattgcggatcccagagcttcggcctgctggaccccaagctgtgctacctgctggatggcatcctgttcatctacggcgtgatcctgaccgccctgttcctgagagtgaagttcagcagaagcgccgacgcccctgcctaccagcagggacagaaccaactgtacaacgagctgaacctgggcagacgggaagagtacgacgtgctggacaagcggagaggcagggaccctgagatgggcggaaagccccggagaaagaacccccaggaaggactgtataacgaactccagaaagacaagatggccgaagcctacagcgagatcggcatgaagggcgagcggagaagaggcaagggccacgatggcctgtaccagggcctgagcaccgccaccaaggacacctatgacgccctgcacatgcaggccctgcctccaagaagggccaagcgatctggatctggagcaacaaacttctcactactcaaacaagcaggtgacgtggaggagaatcccgggcctactagtatggactggatttggcgcatccttttccttgtcggcgctgctaccggcgcgcattccttcgaacaagttcagctggttcagagcggagccgaagtgaagaaacctggcagcagcgtgaaggtgtcctgcaaagcaagcggcggcacctttagcacctacgccatccactgggttcgacaggcaccaggacaaggactggaatggatgggcagaatcatccccatcgagggcagagcctactacgcccagaaattccagggcagagtgaccatcaccgccgacgagtctacaagcaccgcctacatggaactgagcagcctgagaagcgaggataccgctgtgtactattgcgccagaggccggtacagctacagatattggttcgactactggggccagggcaccctggttacagtctcttctacgcgtatccagaaccctgatcctgccgtgtaccagctgcgggatagcaagagcagcgacaagagcgtgtgtctgttcaccgacttcgacagccagaccaacgtgtcccagagcaaggactccgacgtgtacatcaccgataagaccgtgctggacatgcggagcatggacttcaagagcaactccgccgtggcctggtccaacaagtccgatttcgcctgcgccaacgccttcaacaacagcattatccccgaggacacattcttcccaagccccgagagcagctgcggtaccatcactcaaggtttggcagtgtcaaccatctcatcattctttccacctggctaccaagtgtccttctgcctggtcatggtgctgctgttcgccgtggataccggcctgtacttcagcgtcaagaccaacatccggtccagcaccagagactggaaggaccacaagttcaagtggcggaaggaccctcaggacaagaagagaggccggaagaagctgctgtacatcttcaagcagcctttcatgcggcccgtgcagaccacccaggaagaggacggctgctcctgccggttccccgaggaagaagaaggcggctgcgagctgcgcgccaagagaagcggatctggcgtgaagcagaccctgaatttcgacctgctgaagctggctggcgacgtggaatccaacccaggcccttctagaggccatatgaccgagtacaagcccacggtgcgcctcgccacccgcgacgacgtccccagggccgtacgcaccctcgccgccgcgttcgccgactaccccgccacgcgccacaccgtcgatccggaccgccacatcgagcgggtcaccgagctgcaagaactcttcctcacgcgcgtcgggctcgacatcggcaaggtgtgggtcgcggacgacggcgccgcggtggcggtctggaccacgccggagagcgtcgaagcgggggcggtgttcgccgagatcggcccgcgcatggccgagttgagcggttcccggctggccgcgcagcaacagatggaaggcctcctggcgccgcaccggcccaaggagcccgcgtggttcctggccaccgtcggcgtctcgcccgaccaccagggcaagggtctgggcagcgccgtcgtgctccccggagtggaggcggccgagcgcgccggggtgcccgccttcctggagacctccgcgccccgcaacctccccttctacgagcggctcggcttcaccgtcaccgccgacgtcgaggtgcccgaaggaccgcgcacctggtgcatgacccgcaagcccggtgcctga

SEQ ID NO: 32777 - DNA, 2565 bp, synthetic construct
  source 1..2565: mol_type = other DNA
atggccttaccagtgaccgccttgctcctgccgctggccttgctgctccacgccgccaggccggagatcgtgctgacacagtctcccgccacactgtcactgtctccaggcgaaagagccacactgagctgtagagccagccagagcgtgtcctcttacctggcctggtatcagcagaagcctggacaggctccccggctgctgatctacgatgccagcaatagagccacaggcatccccgccagattttctggctctggcagcggcaccgatttcaccctgaccataagcagcctggaacctgaggacttcgccgtgtactactgccagcagagaagcaactggcccctgacctttggacagggcaccaaggtggaaatcaaactcgaggacctgaagaacgtgttcccacctgaggtggccgtgttcgagcctagcgaggccgagatcagccacacccagaaagccaccctcgtgtgcctggctaccggcttctaccccgaccgtgtggaactgtcttggtgggtcaacggcaaagaggtgcacagcggcgtgtgtaccgacccccagccactgaaagaacagcccgccctgaacgacagccggtactgcctgagcagcagactgagagtgtccgccaccttctggcagaacccccggaaccacttcagatgccaggtgcagttctacggcctgagcgagaacgacgagtggacccaggacagagccaagcccgtgacccagatcgtgtctgccgaagcctggggcagagccgattgcggctttaccagcgagagctaccagcagggcgtgctgagcgcctactacatgtacttgttgctgctgctgaagtccgtggtgtacttcgccatcatcacatgctgcctgctgcggagaaccgccttctgctgcaacggcgagaagtctagggccaagcgatctggatctggagcaacaaacttctcactactcaaacaagcaggtgacgtggaggagaatcccgggcctactagtatggactggatttggcgcatccttttccttgtcggcgctgctaccggcgcgcattccttcgaacaagttcagctggttcagagcggagccgaagtgaagaaacctggcagcagcgtgaaggtgtcctgcaaagcaagcggcggcacctttagcacctacgccatccactgggttcgacaggcaccaggacaaggactggaatggatgggcagaatcatccccatcgagggcagagcctactacgcccagaaattccagggcagagtgaccatcaccgccgacgagtctacaagcaccgcctacatggaactgagcagcctgagaagcgaggataccgctgtgtactattgcgccagaggccggtacagctacagatattggttcgactactggggccagggcaccctggttacagtctcttctacgcgtatccagaaccctgatcctgccgtgtaccagctgcgggatagcaagagcagcgacaagagcgtgtgtctgttcaccgacttcgacagccagaccaacgtgtcccagagcaaggactccgacgtgtacatcaccgataagtgcgtgctggacatgcggagcatggacttcaagagcaactccgccgtggcctggtccaacaagtccgatttcgcctgcgccaacgccttcaacaacagcattatccccgaggacacattcttcccaagccccgagagcagctgcgacgtgaagctggtggaaaagagcttcgagacagacaccaacctgaacttccagaacctgagcgtgatcggcttcagaatcctgctgctgaaagtggccggctttaacctgctgatgaccctgcggctgtggtccagccgcgccaagagaagcggatctggcgtgaagcagaccctgaatttcgacctgctgaagctggctggcgacgtggaatccaacccaggcccttctagaggccatatgaccgagtacaagcccacggtgcgcctcgccacccgcgacgacgtccccagggccgtacgcaccctcgccgccgcgttcgccgactaccccgccacgcgccacaccgtcgatccggaccgccacatcgagcgggtcaccgagctgcaagaactcttcctcacgcgcgtcgggctcgacatcggcaaggtgtgggtcgcggacgacggcgccgcggtggcggtctggaccacgccggagagcgtcgaagcgggggcggtgttcgccgagatcggcccgcgcatggccgagttgagcggttcccggctggccgcgcagcaacagatggaaggcctcctggcgccgcaccggcccaaggagcccgcgtggttcctggccaccgtcggcgtctcgcccgaccaccagggcaagggtctgggcagcgccgtcgtgctccccggagtggaggcggccgagcgcgccggggtgcccgccttcctggagacctccgcgccccgcaacctccccttctacgagcggctcggcttcaccgtcaccgccgacgtcgaggtgcccgaaggaccgcgcacctggtgcatgacccgcaagcccggtgcctga

SEQ ID NO: 32778 - DNA, 1866 bp, synthetic construct
  source 1..1866: mol_type = other DNA
atggccttaccagtgaccgccttgctcctgccgctggccttgctgctccacgccgccaggccggagatcgtgctgacacagtctcccgccacactgtcactgtctccaggcgaaagagccacactgagctgtagagccagccagagcgtgtcctcttacctggcctggtatcagcagaagcctggacaggctccccggctgctgatctacgatgccagcaatagagccacaggcatccccgccagattttctggctctggcagcggcaccgatttcaccctgaccataagcagcctggaacctgaggacttcgccgtgtactactgccagcagagaagcaactggcccctgacctttggacagggcaccaaggtggaaatcaaactcgaggacctgaagaacgtgttcccacctgaggtggccgtgttcgagcctagcgaggccgagatcagccacacccagaaagccaccctcgtgtgcctggctaccggcttctaccccgaccgtgtggaactgtcttggtgggtcaacggcaaagaggtgcacagcggcgtgtgtaccgacccccagccactgaaagaacagcccgccctgaacgacagccggtactgcctgagcagcagactgagagtgtccgccaccttctggcagaacccccggaaccacttcagatgccaggtgcagttctacggcctgagcgagaacgacgagtggacccaggacagagccaagcccgtgacccagatcgtgtctgccgaagcctggggcagagccgattgcggctttaccagcgagagctaccagcagggcgtgctgagcgcctactacatgtacttgttgctgctgctgaagtccgtggtgtacttcgccatcatcacatgctgcctgctgcggagaaccgccttctgctgcaacggcgagaagtctagggccaagcgatctggatctggagcaacaaacttctcactactcaaacaagcaggtgacgtggaggagaatcccgggcctactagtatggactggatttggcgcatccttttccttgtcggcgctgctaccggcgcgcattccttcgaacaagttcagctggttcagagcggagccgaagtgaagaaacctggcagcagcgtgaaggtgtcctgcaaagcaagcggcggcacctttagcacctacgccatccactgggttcgacaggcaccaggacaaggactggaatggatgggcagaatcatccccatcgagggcagagcctactacgcccagaaattccagggcagagtgaccatcaccgccgacgagtctacaagcaccgcctacatggaactgagcagcctgagaagcgaggataccgctgtgtactattgcgccagaggccggtacagctacagatattggttcgactactggggccagggcaccctggttacagtctcttctacgcgtatccagaaccctgatcctgccgtgtaccagctgcgggatagcaagagcagcgacaagagcgtgtgtctgttcaccgacttcgacagccagaccaacgtgtcccagagcaaggactccgacgtgtacatcaccgataagtgcgtgctggacatgcggagcatggacttcaagagcaactccgccgtggcctggtccaacaagtccgatttcgcctgcgccaacgccttcaacaacagcattatccccgaggacacattcttcccaagccccgagagcagctgcgacgtgaagctggtggaaaagagcttcgagacagacaccaacctgaacttccagaacctgagcgtgatcggcttcagaatcctgctgctgaaagtggccggctttaacctgctgatgaccctgcggctgtggtccagctaa

SEQ ID NO: 32779 - DNA, 1905 bp, synthetic construct; identical to SEQ ID NO: 32293
  source 1..1905: mol_type = other DNA

SEQ ID NO: 32780 - DNA, 1917 bp, synthetic construct; identical to SEQ ID NO: 32294
  source 1..1917: mol_type = other DNA

SEQ ID NO: 32781 - DNA, 1905 bp, synthetic construct
  source 1..1905: mol_type = other DNA
atggccttaccagtgaccgccttgctcctgccgctggccttgctgctccacgccgccaggccgcaggttcagctccagcagtctggacctggcctggtcaagcctagccagacactgtctctgacctgtgccatcagcggcgatagcgtgtcctctaatagagccgcctggaactggatcagacagagccctagcagaggactccagtggctgggcagaacctactaccgcagcaagtggtacaacgactacgccgtgtctctgcggagccggatcaccatcaatcccgtgaccagcaagaaccaggtggccctgcacatgaacagcgtgacccctgaagataccgccgtgtactactgtgccagagccggaattgtggtggtgcccggacctgagacattctactactacgaccacggcctggacgtgtggggccagggaacaacagtgactgtctcttctctcgaggacctgaagaacgtgttcccacctgaggtggccgtgttcgagcctagcaaggccgagatcgcccacacccagaaagccaccctcgtgtgcctggctaccggcttctaccccgaccatgtggaactgtcttggtgggtcaacggcaaagaggtgcacagcggcgtgtgtaccgacccccagccactgaaagaacagcccgccctgaacgacagccggtactgcctgagcagcagactgagagtgtccgccaccttctggcagaacccccggaaccacttcagatgccaggtgcagttctacggcctgagcgagaacgacgagtggacccaggacagagccaagcccgtgacccagatcgtgtctgccgaagcctggggcagagccgattgcggcatcaccagcgccagctaccaccagggcgtgctgagcgccaccatcctgtacgagatcctgctgggcaaggccaccctgtacgccgtgctggtgtctgccctggtgctgatggctatggtcaagcggaaggacagccggggaagggccaagcgatctggatctggagcaacaaacttctcactactcaaacaagcaggtgacgtggaggagaatcccgggcctactagtatggactggatttggcgcatccttttccttgtcggcgctgctaccggcgcgcattccttcgaagacatccagatgacacagagcccctctagcctgtctgccagcgtgggagacagagtgaccatcacctgtagagccagccagagcatcagaaactacctgaactggtatcagcaaaagcccggcaaggcccctgagctgctgattcatgctgcaagcagcctccagagcggcgtgccaagcagattttctggcagcggcagcggaaccgacttcaccctgacaatatctagcctccagcctgaggacttcgccagctactactgccagcagagctacagcgcccctcctatcacctttggacagggcaccagactggaaatcaagacgcgtatccagaaccctgatcctgccgtgtaccagctgcgggatagcaagagcagcgacaagagcgtgtgtctgttcaccgacttcgacagccagaccaacgtgtcccagagcaaggactccgacgtgtacatcaccgataagtgcgtgctggacatgcggagcatggacttcaagagcaactccgccgtggcctggtccaacaagtccgatttcgcctgcgccaacgccttcaacaacagcattatccccgaggacacattcttcccaagcagcgacgtgccctgcgacgtgaagctggtggaaaagagcttcgagacagacaccaacctgaacttccagaacctgagcgtgatcggcttcagaatcctgctgctgaaagtggccggctttaacctgctgatgaccctgcggctgtggtccagctaa

SEQ ID NO: 32782 - DNA, 3111 bp, synthetic construct
  source 1..3111: mol_type = other DNA
atggccttaccagtgaccgccttgctcctgccgctggccttgctgctccacgccgccaggccgcaggttcagctccagcagtctggacctggcctggtcaagcctagccagacactgtctctgacctgtgccatcagcggcgatagcgtgtcctctaatagagccgcctggaactggatcagacagagccctagcagaggactccagtggctgggcagaacctactaccgcagcaagtggtacaacgactacgccgtgtctctgcggagccggatcaccatcaatcccgtgaccagcaagaaccaggtggccctgcacatgaacagcgtgacccctgaagataccgccgtgtactactgtgccagagccggaattgtggtggtgcccggacctgagacattctactactacgaccacggcctggacgtgtggggccagggaacaacagtgactgtctcttctctcgaggacctgaagaacgtgttcccacctgaggtggccgtgttcgagcctagcgaggccgagatcagccacacccagaaagccaccctcgtgtgcctggctaccggcttctaccccgaccatgtggaactgtcttggtgggtcaacggcaaagaggtgcacagcggcgtgtctaccgacccccagccactgaaagaacagcccgccctgaacgacagccggtactgcctgagcagcagactgagagtgtccgccaccttctggcagaacccccggaaccacttcagatgccaggtgcagttctacggcctgagcgagaacgacgagtggacccaggacagagccaagcccgtgacccagatcgtgtctgccgaagcctggggcagagccgattgcggatcccagagcttcggcctgctggaccccaagctgtgctacctgctggatggcatcctgttcatctacggcgtgatcctgaccgccctgttcctgagagtgaagttcagcagaagcgccgacgcccctgcctaccagcagggacagaaccaactgtacaacgagctgaacctgggcagacgggaagagtacgacgtgctggacaagcggagaggcagggaccctgagatgggcggaaagccccggagaaagaacccccaggaaggactgtataacgaactccagaaagacaagatggccgaagcctacagcgagatcggcatgaagggcgagcggagaagaggcaagggccacgatggcctgtaccagggcctgagcaccgccaccaaggacacctatgacgccctgcacatgcaggccctgcctccaagaagggccaagcgatctggatctggagcaacaaacttctcactactcaaacaagcaggtgacgtggaggagaatcccgggcctactagtatggactggatttggcgcatccttttccttgtcggcgctgctaccggcgcgcattccttcgaagacatccagatgacacagagcccctctagcctgtctgccagcgtgggagacagagtgaccatcacctgtagagccagccagagcatcagaaactacctgaactggtatcagcaaaagcccggcaaggcccctgagctgctgattcatgctgcaagcagcctccagagcggcgtgccaagcagattttctggcagcggcagcggaaccgacttcaccctgacaatatctagcctccagcctgaggacttcgccagctactactgccagcagagctacagcgcccctcctatcacctttggacagggcaccagactggaaatcaagacgcgtatccagaaccctgatcctgccgtgtaccagctgcgggatagcaagagcagcgacaagagcgtgtgtctgttcaccgacttcgacagccagaccaacgtgtcccagagcaaggactccgacgtgtacatcaccgataagaccgtgctggacatgcggagcatggacttcaagagcaactccgccgtggcctggtccaacaagtccgatttcgcctgcgccaacgccttcaacaacagcattatccccgaggacacattcttcccaagccccgagagcagctgcggtaccatcactcaaggtttggcagtgtcaaccatctcatcattctttccacctggctaccaagtgtccttctgcctggtcatggtgctgctgttcgccgtggataccggcctgtacttcagcgtcaagaccaacatccggtccagcaccagagactggaaggaccacaagttcaagtggcggaaggaccctcaggacaagagggccaagcgatctggatctggagcaacaaacttctcactactcaaacaagcaggtgacgtggaggagaatcccgggccttctagaatggaatacgcctctgacgcttcactggaccccgaagccccgtggcctcccgcgccccgcgctcgcgcctgccgcgtactgccttgggccctggtcgcggggctgctgctgctgctgctgctcgctgccgcctgcgccgtcttcctcgcctgcccctgggccgtgtccggggctcgcgcctcgcccggctccgcggccagcccgagactccgcgagggtcccgagctttcgcccgacgatcccgccggcctcttggacctgcggcagggcatgtttgcgcagctggtggcccaaaatgttctgctgatcgatgggcccctgagctggtacagtgacccaggcctggcaggcgtgtccctgacggggggcctgagctacaaagaggacacgaaggagctggtggtggccaaggctggagtctactatgtcttctttcaactagagctgcggcgcgtggtggccggcgagggctcaggctccgtttcacttgcgctgcacctgcagccactgcgctctgctgctggggccgccgccctggctttgaccgtggacctgccacccgcctcctccgaggctcggaactcggccttcggtttccagggccgcttgctgcacctgagtgccggccagcgcctgggcgtccatcttcacactgaggccagggcacgccatgcctggcagcttacccagggcgccacagtcttgggactcttccgggtgacccccgaaatcccagccggactcccttcaccgaggtcggaacatatgtga

SEQ ID NO: 32783 - DNA, 2256 bp, synthetic construct; identical to SEQ ID NO: 32295
  source 1..2256: mol_type = other DNA

SEQ ID NO: 32784 - DNA, 2181 bp, synthetic construct
  source 1..2181: mol_type = other DNA
atggccttaccagtgaccgccttgctcctgccgctggccttgctgctccacgccgccaggccgcaggttcagctccagcagtctggacctggcctggtcaagcctagccagacactgtctctgacctgtgccatcagcggcgatagcgtgtcctctaatagagccgcctggaactggatcagacagagccctagcagaggactccagtggctgggcagaacctactaccgcagcaagtggtacaacgactacgccgtgtctctgcggagccggatcaccatcaatcccgtgaccagcaagaaccaggtggccctgcacatgaacagcgtgacccctgaagataccgccgtgtactactgtgccagagccggaattgtggtggtgcccggacctgagacattctactactacgaccacggcctggacgtgtggggccagggaacaacagtgactgtctcttctctcgaggacctgaagaacgtgttcccacctgaggtggccgtgttcgagcctagcgaggccgagatcagccacacccagaaagccaccctcgtgtgcctggctaccggcttctaccccgaccatgtggaactgtcttggtgggtcaacggcaaagaggtgcacagcggcgtgtctaccgacccccagccactgaaagaacagcccgccctgaacgacagccggtactgcctgagcagcagactgagagtgtccgccaccttctggcagaacccccggaaccacttcagatgccaggtgcagttctacggcctgagcgagaacgacgagtggacccaggacagagccaagcccgtgacccagatcgtgtctgccgaagcctggggcagagccgattgcggatcccagagcttcggcctgctggaccccaagctgtgctacctgctggatggcatcctgttcatctacggcgtgatcctgaccgccctgttcctgagagtgaagttcagcagaagcgccgacgcccctgcctaccagcagggacagaaccaactgtacaacgagctgaacctgggcagacgggaagagtacgacgtgctggacaagcggagaggcagggaccctgagatgggcggaaagccccggagaaagaacccccaggaaggactgtataacgaactccagaaagacaagatggccgaagcctacagcgagatcggcatgaagggcgagcggagaagaggcaagggccacgatggcctgtaccagggcctgagcaccgccaccaaggacacctatgacgccctgcacatgcaggccctgcctccaagaagggccaagcgatctggatctggagcaacaaacttctcactactcaaacaagcaggtgacgtggaggagaatcccgggcctactagtatggactggatttggcgcatccttttccttgtcggcgctgctaccggcgcgcattccttcgaagacatccagatgacacagagcccctctagcctgtctgccagcgtgggagacagagtgaccatcacctgtagagccagccagagcatcagaaactacctgaactggtatcagcaaaagcccggcaaggcccctgagctgctgattcatgctgcaagcagcctccagagcggcgtgccaagcagattttctggcagcggcagcggaaccgacttcaccctgacaatatctagcctccagcctgaggacttcgccagctactactgccagcagagctacagcgcccctcctatcacctttggacagggcaccagactggaaatcaagacgcgtatccagaaccctgatcctgccgtgtaccagctgcgggatagcaagagcagcgacaagagcgtgtgtctgttcaccgacttcgacagccagaccaacgtgtcccagagcaaggactccgacgtgtacatcaccgataagaccgtgctggacatgcggagcatggacttcaagagcaactccgccgtggcctggtccaacaagtccgatttcgcctgcgccaacgccttcaacaacagcattatccccgaggacacattcttcccaagccccgagagcagctgcggtaccattacccaaggactggctgtgcctacaatctctagcttctttccgcctggataccaagtctccttctgtcttgtgatggtcctcctgtttgctgtggacacaggactgtacttttccgtgtaa

SEQ ID NO: 32785 - DNA, 2643 bp, synthetic construct
  source 1..2643: mol_type = other DNA
atggccttaccagtgaccgccttgctcctgccgctggccttgctgctccacgccgccaggccgcaggttcagctccagcagtctggacctggcctggtcaagcctagccagacactgtctctgacctgtgccatcagcggcgatagcgtgtcctctaatagagccgcctggaactggatcagacagagccctagcagaggactccagtggctgggcagaacctactaccgcagcaagtggtacaacgactacgccgtgtctctgcggagccggatcaccatcaatcccgtgaccagcaagaaccaggtggccctgcacatgaacagcgtgacccctgaagataccgccgtgtactactgtgccagagccggaattgtggtggtgcccggacctgagacattctactactacgaccacggcctggacgtgtggggccagggaacaacagtgactgtctcttctctcgaggacctgaagaacgtgttcccacctgaggtggccgtgttcgagcctagcgaggccgagatcagccacacccagaaagccaccctcgtgtgcctggctaccggcttctaccccgaccatgtggaactgtcttggtgggtcaacggcaaagaggtgcacagcggcgtgtgtaccgacccccagccactgaaagaacagcccgccctgaacgacagccggtactgcctgagcagcagactgagagtgtccgccaccttctggcagaacccccggaaccacttcagatgccaggtgcagttctacggcctgagcgagaacgacgagtggacccaggacagagccaagcccgtgacccagatcgtgtctgccgaagcctggggcagagccgattgcggctttaccagcgagagctaccagcagggcgtgctgagcgccaccatcctgtacgagatcctgctgggcaaggccaccctgtacgccgtgctggtgtctgccctggtgctgatggctatggtcaagcggaaggacagccggggaagggccaagcgatctggatctggagcaacaaacttctcactactcaaacaagcaggtgacgtggaggagaatcccgggcctactagtatggactggatttggcgcatccttttccttgtcggcgctgctaccggcgcgcattccttcgaagacatccagatgacacagagcccctctagcctgtctgccagcgtgggagacagagtgaccatcacctgtagagccagccagagcatcagaaactacctgaactggtatcagcaaaagcccggcaaggcccctgagctgctgattcatgctgcaagcagcctccagagcggcgtgccaagcagattttctggcagcggcagcggaaccgacttcaccctgacaatatctagcctccagcctgaggacttcgccagctactactgccagcagagctacagcgcccctcctatcacctttggacagggcaccagactggaaatcaagacgcgtagccagcctcacaccaagcccagcgtgttcgtgatgaagaacggcaccaacgtggcctgcctcgtgaaagagttctaccccaaggacatcaggatcaacctggtgtccagcaagaagatcaccgagttcgaccccgccatcgtgatctcccccagcggcaagtacaacgccgtgaagctggggaagtacgaggacagcaacagcgtgacctgctccgtgcagcacgacaacaagaccgtgcacagcaccgactttgaagtgaaaaccgactccaccgaccacgtgaagcccaaagagacagagaacaccaagcagcccagcaagagctgccacaagcccaaggccatcgtgcacaccgagaaagtgaacatgatgagcctgaccgtgctgggcttcagaatcctgctgctgaaagtggccggctttaacctgctgatgaccctgcggctgtggtccagccgcgccaagagaagcggatctggcgtgaagcagaccctgaatttcgacctgctgaagctggctggcgacgtggaatccaacccaggcccttctagaggccatatgaccgagtacaagcccacggtgcgcctcgccacccgcgacgacgtccccagggccgtacgcaccctcgccgccgcgttcgccgactaccccgccacgcgccacaccgtcgatccggaccgccacatcgagcgggtcaccgagctgcaagaactcttcctcacgcgcgtcgggctcgacatcggcaaggtgtgggtcgcggacgacggcgccgcggtggcggtctggaccacgccggagagcgtcgaagcgggggcggtgttcgccgagatcggcccgcgcatggccgagttgagcggttcccggctggccgcgcagcaacagatggaaggcctcctggcgccgcaccggcccaaggagcccgcgtggttcctggccaccgtcggcgtctcgcccgaccaccagggcaagggtctgggcagcgccgtcgtgctccccggagtggaggcggccgagcgcgccggggtgcccgccttcctggagacctccgcgccccgcaacctccccttctacgagcggctcggcttcaccgtcaccgccgacgtcgaggtgcccgaaggaccgcgcacctggtgcatgacccgcaagcccggtgcctga

SEQ ID NO: 32786 - DNA, 2643 bp, synthetic construct
  source 1..2643: mol_type = other DNA
atggccttaccagtgaccgccttgctcctgccgctggccttgctgctccacgccgccaggccgcaggttcagctccagcagtctggacctggcctggtcaagcctagccagacactgtctctgacctgtgccatcagcggcgatagcgtgtcctctaatagagccgcctggaactggatcagacagagccctagcagaggactccagtggctgggcagaacctactaccgcagcaagtggtacaacgactacgccgtgtctctgcggagccggatcaccatcaatcccgtgaccagcaagaaccaggtggccctgcacatgaacagcgtgacccctgaagataccgccgtgtactactgtgccagagccggaattgtggtggtgcccggacctgagacattctactactacgaccacggcctggacgtgtggggccagggaacaacagtgactgtctcttctctcgaggacctgaagaacgtgttcccacctgaggtggccgtgttcgagcctagcgaggccgagatcagccacacccagaaagccaccctcgtgtgcctggctaccggcttctaccccgaccatgtggaactgtcttggtgggtcaacggcaaagaggtgcacagcggcgtgtgtaccgacccccagccactgaaagaacagcccgccctgaacgacagccggtactgcctgagcagcagactgagagtgtccgccaccttctggcagaacccccggaaccacttcagatgccaggtgcagttctacggcctgagcgagaacgacgagtggacccaggacagagccaagcccgtgacccagatcgtgtctgccgaagcctggggcagagccgattgcggctttaccagcgagagctaccagcagggcgtgctgagcgccaccatcctgtacgagatcctgctgggcaaggccaccctgtacgccgtgctggtgtctgccctggtgctgatggctatggtcaagcggaaggacagccggggaagggccaagcgatctggatctggagcaacaaacttctcactactcaaacaagcaggtgacgtggaggagaatcccgggcctactagtatggactggatttggcgcatccttttccttgtcggcgctgctaccggcgcgcattccttcgaagacatccagatgacacagagcccctctagcctgtctgccagcgtgggagacagagtgaccatcacctgtagagccagccagagcatcagaaactacctgaactggtatcagcaaaagcccggcaaggcccctgagctgctgattcatgctgcaagcagcctccagagcggcgtgccaagcagattttctggcagcggcagcggaaccgacttcaccctgacaatatctagcctccagcctgaggacttcgccagctactactgccagcagagctacagcgcccctcctatcacctttggacagggcaccagactggaaatcaagacgcgtagccagcctcacaccaagcccagcgtgttcgtgatgaagaacggcaccaacgtggcctgcctcgtgaaagagttctaccccaaggacatcaggatcaacctggtgtccagcaagaagatcaccgagttcgaccccgccatcgtgatctcccccagcggcaagtacaacgccgtgaagctggggaagtacgaggacagcaacagcgtgacctgctccgtgcagcacgacaacaagaccgtgcacagcaccgactttgaagtgaaaaccgactccaccgaccacgtgaagcccaaagagacagagaacaccaagcagcccagcaagagctgccacaagcccaaggccatcgtgcacaccgagaaagtgaacatgatgagcctgaccgtgatcggcttcagaatcctgctgctgaaagtggccggctttaacctgctgatgaccctgcggctgtggtccagccgcgccaagagaagcggatctggcgtgaagcagaccctgaatttcgacctgctgaagctggctggcgacgtggaatccaacccaggcccttctagaggccatatgaccgagtacaagcccacggtgcgcctcgccacccgcgacgacgtccccagggccgtacgcaccctcgccgccgcgttcgccgactaccccgccacgcgccacaccgtcgatccggaccgccacatcgagcgggtcaccgagctgcaagaactcttcctcacgcgcgtcgggctcgacatcggcaaggtgtgggtcgcggacgacggcgccgcggtggcggtctggaccacgccggagagcgtcgaagcgggggcggtgttcgccgagatcggcccgcgcatggccgagttgagcggttcccggctggccgcgcagcaacagatggaaggcctcctggcgccgcaccggcccaaggagcccgcgtggttcctggccaccgtcggcgtctcgcccgaccaccagggcaagggtctgggcagcgccgtcgtgctccccggagtggaggcggccgagcgcgccggggtgcccgccttcctggagacctccgcgccccgcaacctccccttctacgagcggctcggcttcaccgtcaccgccgacgtcgaggtgcccgaaggaccgcgcacctggtgcatgacccgcaagcccggtgcctga

SEQ ID NO: 32787 - DNA, 2280 bp, synthetic construct
  source 1..2280: mol_type = other DNA
atggccttaccagtgaccgccttgctcctgccgctggccttgctgctccacgccgccaggccggagatcgtgctgacacagagccctggcacactgtcactgtctccaggcgaaagagccacactgagctgcaaagccagccagagcgtgtccatcagcggcatcaacctgatgaactggtatcagcagaagcccggccagcagccaagactgctgatctaccacgccagcatcctggcctctggcatccccgatagattttctggcagcggctccggcaccgacttcaccctgacaatcagcagactggaacccgaggacttcgccgtgtactactgccagcagaccagagagagccctctgacattcggccagggcacaagactggaaatcaaactcgaggacctgaagaacgtgttcccacctgaggtggccgtgttcgagcctagcgaggccgagatcagccacacccagaaagccaccctcgtgtgcctggctaccggcttctaccccgaccatgtggaactgtcttggtgggtcaacggcaaagaggtgcacagcggcgtgtgtaccgacccccagccactgaaagaacagcccgccctgaacgacagccggtactgcctgagcagcagactgagagtgtccgccaccttctggcagaacccccggaaccacttcagatgccaggtgcagttctacggcctgagcgagaacgacgagtggacccaggacagagccaagcccgtgacccagatcgtgtctgccgaagcctggggcagagccgattgcggctttaccagcgagagctaccagcagggcgtgctgagcgccaccatcctgtacgagatcctgctgggcaaggccaccctgtacgccgtgctggtgtctgccctggtgctgatggctatggtcaagcggaaggacagccggggaagggccaagcgatctggatctggagcaacaaacttctcactactcaaacaagcaggtgacgtggaggagaatcccgggcctactagtgccaccatggactggatttggcgcatccttttccttgtcggcgctgctaccggcgcccattccgggcccgaagtgcaactggttgaatccggtggcggcctggtgcaagcaggcggatctctcagacttagctgtgccgcctccggcagaaccttcacaatgggatggtttaggcaggctccagggaaagagagagagttcgtcgccgccatctctctgtctcccacactggcctactacgccgactctgtgaaaggccggttcaccatctccagagataatgccaagaacaccgtggtgctgcaaatgaactctctgaaacccgaggatacagccctgtactattgtgccgctgaccggaagtccgtgatgagcatcagacccgattactggggacagggcacacaagtcacagtgtcctctggatccggcggcggaggatctggcggaggcggatctgggggcggaggctctttcgaacaagttcagctggttgaatccggtggcggagtggtgcaacctggcagaagtctgagactgagctgtgccgccagcggcttcagcttcagcaattatggcatggcctgggtccgacaggcccctggaaaaggacttgagtgggtcgccagcatctctaccggcggaggcaatacctactacgccgacagcgtgaaggacagattcaccatcagccgggacaacagcaagaacaccctgtacctccagatgaacagcctgagagccgaggataccgccgtgtactactgcaccagacacgatagaggcggcctgtattggggccagggaacaatggtcaccgtgtcctctacgcgtatccagaaccctgatcctgccgtgtaccagctgcgggatagcaagagcagcgacaagagcgtgtgtctgttcaccgacttcgacagccagaccaacgtgtcccagagcaaggactccgacgtgtacatcaccgataagtgcgtgctggacatgcggagcatggacttcaagagcaactccgccgtggcctggtccaacaagtccgatttcgcctgcgccaacgccttcaacaacagcattatccccgaggacacattcttcccaagccccgagagcagctgcgacgtgaagctggtggaaaagagcttcgagacagacaccaacctgaacttccagaacctgagcgtgatcggcttcagaatcctgctgctgaaagtggccggctttaacctgctgatgaccctgcggctgtggtccagctaa

SEQ ID NO: 32788 - DNA, 2295 bp, synthetic construct; identical to SEQ ID NO: 32342
  source 1..2295: mol_type = other DNA

SEQ ID NO: 32789 - DNA, 2280 bp, synthetic construct
  source 1..2280: mol_type = other DNA
atggccttaccagtgaccgccttgctcctgccgctggccttgctgctccacgccgccaggccggagatcgtgctgacacagagccctggcacactgtcactgtctccaggcgaaagagccacactgagctgcaaagccagccagagcgtgtccatcagcggcatcaacctgatgaactggtatcagcagaagcccggccagcagccaagactgctgatctaccacgccagcatcctggcctctggcatccccgatagattttctggcagcggctccggcaccgacttcaccctgacaatcagcagactggaacccgaggacttcgccgtgtactactgccagcagaccagagagagccctctgacattcggccagggcacaagactggaaatcaaactcgaggacctgaagaacgtgttcccacctgaggtggccgtgttcgagcctagcgaggccgagatcagccacacccagaaagccaccctcgtgtgcctggctaccggcttctaccccgaccatgtggaactgtcttggtgggtcaacggcaaagaggtgcacagcggcgtgtgtaccgacccccagccactgaaagaacagcccgccctgaacgacagccggtactgcctgagcagcagactgagagtgtccgccaccttctggcagaacccccggaaccacttcagatgccaggtgcagttctacggcctgagcgagaacgacgagtggacccaggacagagccaagcccgtgacccagatcgtgtctgccgaagcctggggcagagccgattgcggctttaccagcgagagctaccagcagggcgtgctgagcgccaccatcctgtacgagatcctgctgggcaaggccaccctgtacgccgtgctggtgtctgccctggtgctgatggctatggtcaagcggaaggacagccggggaagggccaagcgatctggatctggagcaacaaacttctcactactcaaacaagcaggtgacgtggaggagaatcccgggcctactagtgccaccatggactggatttggcgcatccttttccttgtcggcgctgctaccggcgcccattccgggcccgaagtgcaactggttgaatccggtggcggcctggtgcaagcaggcggatctctcagacttagctgtgccgcctccggcagaaccttcacaatgggatggtttaggcaggctccagggaaagagagagagttcgtcgccgccatctctctgtctcccacactggcctactacgccgactctgtgaaaggccggttcaccatctccagagataatgccaagaacaccgtggtgctgcaaatgaactctctgaaacccgaggatacagccctgtactattgtgccgctgaccggaagtccgtgatgagcatcagacccgattactggggacagggcacacaagtcacagtgtcctctggatccggcggcggaggatctggcggaggcggatctgggggcggaggctctttcgaactgcaactgcttgaatcaggtggcggcctggttcagcctggcggatctctgagactgagctgtgccgccagcggcttcaccttctctaagtacgctatggcctgggtccgacaggcccctggaaaaggacttgagtgggtcgcctctatcagcacaggcggcgtgaacacctactacgccgacagcgtgaaggacagattcaccatcagccgggacaacgccaagaacaccctgtacctccagatgaacagcctgagagccgaggacacagccgtgtattattgcgccacacacaccggcgactacttcgactattggggccagggaacaatggtcaccgtgtcctctacgcgtatccagaaccctgatcctgccgtgtaccagctgcgggatagcaagagcagcgacaagagcgtgtgtctgttcaccgacttcgacagccagaccaacgtgtcccagagcaaggactccgacgtgtacatcaccgataagtgcgtgctggacatgcggagcatggacttcaagagcaactccgccgtggcctggtccaacaagtccgatttcgcctgcgccaacgccttcaacaacagcattatccccgaggacacattcttcccaagccccgagagcagctgcgacgtgaagctggtggaaaagagcttcgagacagacaccaacctgaacttccagaacctgagcgtgatcggcttcagaatcctgctgctgaaagtggccggctttaacctgctgatgaccctgcggctgtggtccagctaa

SEQ ID NO: 32790 - DNA, 3402 bp, synthetic construct
  source 1..3402: mol_type = other DNA
atggccttaccagtgaccgccttgctcctgccgctggccttgctgctccacgccgccaggccggcatgcgaagtgcagctgcttgaaagtggcggcggactgattcagcctggcggatctctgagactgagctgtgccgccagcggcttcaccttttctagccacgccatgacctgggtccgacaggcacctggaaaagggcttgaatgggtgtccgccatcagcggctctggcgattacacacactacgccgacagcgtgaagggcagattcaccatcagcagagacaacagcaagaacaccgtgtacctccagatgaacagcctgagagccgaggacagcgccgtgtattattgcgccaaggatgaggatggcggcagcctgcttggacacagaggacaaggcaccctggtcaccgtttcttccggtaccggcggaggcggatctggcggcggaggtagcggtggcggaggatctgaattcgacatcgtgctgacacagagccctgccaccctgtctctgagccctggcgatagagccaccatcagctgtagagccagcgagagcgtgaccatcctgggcagccacctgatccactggtatcagcagaagcccggccagccccccagactgctgattcagctggcctccaatgtgcagaccggcgtgccagccagattttccggcagcggcagcagaaccgacttcaccctgaccatcagcagcgtggaacccgaggacttcgccgtgtactactgcctccagagccggaccatccccagaacattcggccagggcaccaagctggaaatcaagagactcgaggccgacgtgtcccccaagcctaccatcttcctgccctctatcgccgagacaaagctccagaaggccggcacctacctgtgcctgctggaaaagttcttcccagatgtgattaagatccactggcaggaaaagaagtccaacaccatcctgggcagccaggaaggcaacaccatgaagaccaacgacacctacatgaagttcagctggctgaccgtgcccgagaagtccctggacaaagaacacagatgcatcgtgcggcacgaaaacaacaagaacggcgtggaccaggaaatcatcttcccacccatcaagaccgatgtgattacaatggaccccaaggacaactgctccaaggacgccaacgataccctgctgctccagctgaccaacaccagcgcctactacatgtacttgttgctgctgctgaagtccgtggtgtacttcgccatcatcacatgctgcctgctgcggagaaccgccttctgctgcaacggcgagaagtctagggccaagcgatctggatctggagcaacaaacttctcactactcaaacaagcaggtgacgtggaggagaatcccgggcctactagtatggactggatttggcgcatccttttccttgtcggcgctgctaccggcgcgcattccgggccccaggttcagctgcaagagtctggcggaggacttgctcaagctggcggaagcctgagactgtcttgtgccgcctctggcagaaccttcagcatgggctggtttagacaggcccctggcaaagagagagagttcgtcgccgccatcacatacagcggcggcagcccttactacgcctcttctgtcagaggccggttcaccatcagccgggacaacgccaagaacaccgtgtacctccagatgaacagcctgaagccagaggacaccgccgtgtactactgtgccgccaatccaacctacggcagcgactggaatgccgagaattggggccagggcacccaagtgacagtgtctagtggatccggcggcggaggatctggcggaggcggatctgggggcggaggctctttcgaacagattcagctcgtgcagtctggccccgagctgaagaaacctggcggctctgtgaagatcagctgtgccgccagcggctacaccttcaccgactactctatcaactgggtccgacaggctcccggcaaaggactggaatgggtcggatggatcaacaccgagacaagagagcccgcctacgcctacgacttcagaggcagattcaccttcagcgccgacaccagcaagagcacagcctacctccagatgaacagcctgagagccgaggacaccgccgtgtattattgcgccctggactacagctacgctatggactattggggccagggcaccctggtcacagtctcttctacgcgtcctcacaccaagcccagcgtgttcgtgatgaagaacggcaccaacgtggcctgcctcgtgaaagagttctaccccaaggacatcaggatcaacctggtgtccagcaagaagatcaccgagttcgaccccgccatcgtgatctcccccagcggcaagtacaacgccgtgaagctggggaagtacgaggacagcaacagcgtgacctgctccgtgcagcacgacaacaagaccgtgcacagcaccgactttgaagtgaaaaccgactccaccgaccacgtgaagcccaaagagacagagaacaccaagcagcccagcaagagctgccacaagcccaaggccatcgtgcacaccgagaaagtgaacatgatgagcctgaccgtgctgggcctgcggatgctgttcgccaaaaccgtggccgtgaacttcctgctgaccgccaagctgttcttcctccgcgccaagagaagcggatctggcgtgaagcagaccctgaatttcgacctgctgaagctggctggcgacgtggaatccaacccaggcccttctagaggccatatgaccgagtacaagcccacggtgcgcctcgccacccgcgacgacgtccccagggccgtacgcaccctcgccgccgcgttcgccgactaccccgccacgcgccacaccgtcgatccggaccgccacatcgagcgggtcaccgagctgcaagaactcttcctcacgcgcgtcgggctcgacatcggcaaggtgtgggtcgcggacgacggcgccgcggtggcggtctggaccacgccggagagcgtcgaagcgggggcggtgttcgccgagatcggcccgcgcatggccgagttgagcggttcccggctggccgcgcagcaacagatggaaggcctcctggcgccgcaccggcccaaggagcccgcgtggttcctggccaccgtcggcgtctcgcccgaccaccagggcaagggtctgggcagcgccgtcgtgctccccggagtggaggcggccgagcgcgccggggtgcccgccttcctggagacctccgcgccccgcaacctccccttctacgagcggctcggcttcaccgtcaccgccgacgtcgaggtgcccgaaggaccgcgcacctggtgcatgacccgcaagcccggtgcctga

SEQ ID NO: 32791 - DNA, 3408 bp, synthetic construct
  source 1..3408: mol_type = other DNA
atggccttaccagtgaccgccttgctcctgccgctggccttgctgctccacgccgccaggccggcatgccaggtgcagctggttgaatctggtggcggagttgtgcagcctggcagaagcctgagactgtcttgtgccgccagcggctatagaagcagcgtgtgcatgggctggttcagacaggcccctggcaaaggactggaacgagtggccgtgatcggcagagatggcagcacaacctacatcgacagcgtgaagggcagattcaccatcagccgggacaacagcaagaacaccctgtacctccagatgaacagcctgagagccgaggacaccgccgtgtactattgtgccagaggactcggctattgggcctgcgagtacgattattggggccagggcacactggtcaccgtgtcatctggtaccggcggaggcggatctggcggcggaggtagcggtggcggaggatctgaattcgacatcgtgatgacacagagccctagcagcctgacagtgacagccggcgagaaagtgaccatgagctgcaagagcagccagagcctgctgaacagcggcaaccagaagaactacctgacctggtatcagcagaagcccggccagcctcctaagctgctgatctactgggccagcaccagagaaagcggcgtgcccgatagattcacaggcagcggcagcggaaccgacttcaccctgacaatcagctctgtgcaggccgaggatctggccgtgtactactgccagaacgactacagctaccctctgacctttggagccggcaccaagctggaacttaaactcgaggacctgaagaacgtgttcccacctgaggtggccgtgttcgagcctagcgaggccgagatcagccacacccagaaagccaccctcgtgtgcctggctaccggcttctaccccgaccatgtggaactgtcttggtgggtcaacggcaaagaggtgcacagcggcgtgtgtaccgacccccagccactgaaagaacagcccgccctgaacgacagccggtactgcctgagcagcagactgagagtgtccgccaccttctggcagaacccccggaaccacttcagatgccaggtgcagttctacggcctgagcgagaacgacgagtggacccaggacagagccaagcccgtgacccagatcgtgtctgccgaagcctggggcagagccgattgcggctttaccagcgagagctaccagcagggcgtgctgagcgccaccatcctgtacgagatcctgctgggcaaggccaccctgtacgccgtgctggtgtctgccctggtgctgatggctatggtcaagcggaaggacagccggggaagggccaagcgatctggatctggagcaacaaacttctcactactcaaacaagcaggtgacgtggaggagaatcccgggcctactagtgccaccatggactggatttggcgcatccttttccttgtcggcgctgctaccggcgcccattccgggcccgaagtgcagctggttgaatctggcggaggactggttcaggctggcggatctctgagactgtcttgtgccgccagcggcagaacctttagcatgggctggtttagacaggcccctggcaaagagagagagttcgtcgccgccatcacatactctggcggcagcccttactacgccgactctgtgaagggcagattcaccatcagccgggacaacgccaagaacaccgtgtacctccagatgaacagcctgaagcctgaggacaccgccgtgtactactgcgccgccaatccaacatacggcagcgactggaacgccgagaattggggccagggaacccaagtgacagtgtctagcggatccggcggcggaggatctggcggaggcggatctgggggcggaggctctttcgaacaaattcagctggtgcagtctggccccgagctgaagaaacctggcgagacagtgaagatttcctgcaaggccagcggctacaccttcaccaactacggcatgaactgggtcaagcaggcccctggcaagggcctgaaatggatgggctggatcaacaccaacaccggcgagcctacctacgccgaagagttcaagggcagattcgccttcagcctggaaaccagcgccagcacagcctacctccagatcaacaacctgaagaacgaggacaccgccacctacttttgcgccagactcggcttcggcaacgctatggattattggggccagggcaccagcgtgaccgtttcttctacgcgtatccagaaccctgatcctgccgtgtaccagctgcgggatagcaagagcagcgacaagagcgtgtgtctgttcaccgacttcgacagccagaccaacgtgtcccagagcaaggactccgacgtgtacatcaccgataagtgcgtgctggacatgcggagcatggacttcaagagcaactccgccgtggcctggtccaacaagtccgatttcgcctgcgccaacgccttcaacaacagcattatccccgaggacacattcttcccaagccccgagagcagctgcgacgtgaagctggtggaaaagagcttcgagacagacaccaacctgaacttccagaacctgagcgtgatcggcttcagaatcctgctgctgaaagtggccggctttaacctgctgatgaccctgcggctgtggtccagccgcgccaagagaagcggatctggcgtgaagcagaccctgaatttcgacctgctgaagctggctggcgacgtggaatccaacccaggcccttctagaggccatatgaccgagtacaagcccacggtgcgcctcgccacccgcgacgacgtccccagggccgtacgcaccctcgccgccgcgttcgccgactaccccgccacgcgccacaccgtcgatccggaccgccacatcgagcgggtcaccgagctgcaagaactcttcctcacgcgcgtcgggctcgacatcggcaaggtgtgggtcgcggacgacggcgccgcggtggcggtctggaccacgccggagagcgtcgaagcgggggcggtgttcgccgagatcggcccgcgcatggccgagttgagcggttcccggctggccgcgcagcaacagatggaaggcctcctggcgccgcaccggcccaaggagcccgcgtggttcctggccaccgtcggcgtctcgcccgaccaccagggcaagggtctgggcagcgccgtcgtgctccccggagtggaggcggccgagcgcgccggggtgcccgccttcctggagacctccgcgccccgcaacctccccttctacgagcggctcggcttcaccgtcaccgccgacgtcgaggtgcccgaaggaccgcgcacctggtgcatgacccgcaagcccggtgcctga

SEQ ID NO: 32792 - DNA, 3408 bp, synthetic construct
  source 1..3408: mol_type = other DNA
atggccttaccagtgaccgccttgctcctgccgctggccttgctgctccacgccgccaggccggcatgccaggtgcagctggttgaatctggtggcggagttgtgcagcctggcagaagcctgagactgtcttgtgccgccagcggctatagaagcagcgtgtgcatgggctggttcagacaggcccctggcaaaggactggaacgagtggccgtgatcggcagagatggcagcacaacctacatcgacagcgtgaagggcagattcaccatcagccgggacaacagcaagaacaccctgtacctccagatgaacagcctgagagccgaggacaccgccgtgtactattgtgccagaggactcggctattgggcctgcgagtacgattattggggccagggcacactggtcaccgtgtcatctggtaccggcggaggcggatctggcggcggaggtagcggtggcggaggatctgaattcgacatcgtgatgacacagagccctagcagcctgacagtgacagccggcgagaaagtgaccatgagctgcaagagcagccagagcctgctgaacagcggcaaccagaagaactacctgacctggtatcagcagaagcccggccagcctcctaagctgctgatctactgggccagcaccagagaaagcggcgtgcccgatagattcacaggcagcggcagcggaaccgacttcaccctgacaatcagctctgtgcaggccgaggatctggccgtgtactactgccagaacgactacagctaccccttcacctttggctccggcaccaagctggaaatcaaactcgaggacctgaagaacgtgttcccacctgaggtggccgtgttcgagcctagcgaggccgagatcagccacacccagaaagccaccctcgtgtgcctggctaccggcttctaccccgaccatgtggaactgtcttggtgggtcaacggcaaagaggtgcacagcggcgtgtgtaccgacccccagccactgaaagaacagcccgccctgaacgacagccggtactgcctgagcagcagactgagagtgtccgccaccttctggcagaacccccggaaccacttcagatgccaggtgcagttctacggcctgagcgagaacgacgagtggacccaggacagagccaagcccgtgacccagatcgtgtctgccgaagcctggggcagagccgattgcggctttaccagcgagagctaccagcagggcgtgctgagcgccaccatcctgtacgagatcctgctgggcaaggccaccctgtacgccgtgctggtgtctgccctggtgctgatggctatggtcaagcggaaggacagccggggaagggccaagcgatctggatctggagcaacaaacttctcactactcaaacaagcaggtgacgtggaggagaatcccgggcctactagtgccaccatggactggatttggcgcatccttttccttgtcggcgctgctaccggcgcccattccgggcccgaagtgcagctggttgaatctggcggaggactggttcaggctggcggatctctgagactgtcttgtgccgccagcggcagaacctttagcatgggctggtttagacaggcccctggcaaagagagagagttcgtcgccgccatcacatactctggcggcagcccttactacgccgactctgtgaagggcagattcaccatcagccgggacaacgccaagaacaccgtgtacctccagatgaacagcctgaagcctgaggacaccgccgtgtactactgcgccgccaatccaacatacggcagcgactggaacgccgagaattggggccagggaacccaagtgacagtgtctagcggatccggcggcggaggatctggcggaggcggatctgggggcggaggctctttcgaacaaattcagctggtgcagtctggccccgagctgaagaaacctggcgagacagtgaagatttcctgcaaggccagcggctacaccttcaccaactacggcatgaactgggtcaagcaggcccctggcaagggcctgaaatggatgggctggatcaacaccaacaccggcgagcctacctacgccgaagagttcaagggcagattcgccttcagcctggaaaccagcgccagcacagcctacctccagatcaacaacctgaagaacgaggacaccgccacctacttttgcgccagactcggcttcggcaacgctatggattattggggccagggcaccagcgtgaccgtttcttctacgcgtatccagaaccctgatcctgccgtgtaccagctgcgggatagcaagagcagcgacaagagcgtgtgtctgttcaccgacttcgacagccagaccaacgtgtcccagagcaaggactccgacgtgtacatcaccgataagtgcgtgctggacatgcggagcatggacttcaagagcaactccgccgtggcctggtccaacaagtccgatttcgcctgcgccaacgccttcaacaacagcattatccccgaggacacattcttcccaagccccgagagcagctgcgacgtgaagctggtggaaaagagcttcgagacagacaccaacctgaacttccagaacctgagcgtgatcggcttcagaatcctgctgctgaaagtggccggctttaacctgctgatgaccctgcggctgtggtccagccgcgccaagagaagcggatctggcgtgaagcagaccctgaatttcgacctgctgaagctggctggcgacgtggaatccaacccaggcccttctagaggccatatgaccgagtacaagcccacggtgcgcctcgccacccgcgacgacgtccccagggccgtacgcaccctcgccgccgcgttcgccgactaccccgccacgcgccacaccgtcgatccggaccgccacatcgagcgggtcaccgagctgcaagaactcttcctcacgcgcgtcgggctcgacatcggcaaggtgtgggtcgcggacgacggcgccgcggtggcggtctggaccacgccggagagcgtcgaagcgggggcggtgttcgccgagatcggcccgcgcatggccgagttgagcggttcccggctggccgcgcagcaacagatggaaggcctcctggcgccgcaccggcccaaggagcccgcgtggttcctggccaccgtcggcgtctcgcccgaccaccagggcaagggtctgggcagcgccgtcgtgctccccggagtggaggcggccgagcgcgccggggtgcccgccttcctggagacctccgcgccccgcaacctccccttctacgagcggctcggcttcaccgtcaccgccgacgtcgaggtgcccgaaggaccgcgcacctggtgcatgacccgcaagcccggtgcctga

SEQ ID NO: 32793 - DNA, 3408 bp, synthetic construct
  source 1..3408: mol_type = other DNA
atggccttaccagtgaccgccttgctcctgccgctggccttgctgctccacgccgccaggccggcatgcgaagtgcagctgcttgaaagtggcggcggactgattcagcctggcggatctctgagactgagctgtgccgccagcggcttcaccttttctagccacgccatgacctgggtccgacaggcacctggaaaagggcttgaatgggtgtccgccatcagcggctctggcgattacacacactacgccgacagcgtgaagggcagattcaccatcagcagagacaacagcaagaacaccgtgtacctccagatgaacagcctgagagccgaggacagcgccgtgtattattgcgccaaggatgaggatggcggcagcctgcttggacacagaggacaaggcaccctggtcaccgtttcttccggtaccggcggaggcggatctggcggcggaggtagcggtggcggaggatctgaattcgacatcgtgatgacacagagccctagcagcctgacagtgacagccggcgagaaagtgaccatgagctgcaagagcagccagagcctgctgaacagcggcaaccagaagaactacctgacctggtatcagcagaagcccggccagcctcctaagctgctgatctactgggccagcaccagagaaagcggcgtgcccgatagattcacaggcagcggcagcggaaccgacttcaccctgacaatcagctctgtgcaggccgaggatctggccgtgtactactgccagaacgactacagctaccctctgacctttggagccggcaccaagctggaacttaaactcgaggacctgaagaacgtgttcccacctgaggtggccgtgttcgagcctagcgaggccgagatcagccacacccagaaagccaccctcgtgtgcctggctaccggcttctaccccgaccatgtggaactgtcttggtgggtcaacggcaaagaggtgcacagcggcgtgtgtaccgacccccagccactgaaagaacagcccgccctgaacgacagccggtactgcctgagcagcagactgagagtgtccgccaccttctggcagaacccccggaaccacttcagatgccaggtgcagttctacggcctgagcgagaacgacgagtggacccaggacagagccaagcccgtgacccagatcgtgtctgccgaagcctggggcagagccgattgcggctttaccagcgagagctaccagcagggcgtgctgagcgccaccatcctgtacgagatcctgctgggcaaggccaccctgtacgccgtgctggtgtctgccctggtgctgatggctatggtcaagcggaaggacagccggggaagggccaagcgatctggatctggagcaacaaacttctcactactcaaacaagcaggtgacgtggaggagaatcccgggcctactagtaccatggactggatttggcgcatccttttccttgtcggcgctgctaccggcgcccattccgggccccaggtgcagctggttgaatctggtggcggagttgtgcagcctggcagaagcctgagactgtcttgtgccgccagcggctatagaagcagcgtgtgcatgggctggttcagacaggcccctggcaaaggactggaaagagtggccctgatcggcagagatggcagcaccacctacatcgacagcgtgaagggcagattcaccatcagccgggacaacagcaagaacaccctgtacctccagatgaacagcctgagagccgaggacaccgccgtgtactattgtgccagaggactcggctattgggcctgcgagtacaactattggggccagggcacactggtcaccgtttctagcggatccggcggcggaggatctggcggaggcggatctgggggcggaggctctttcgaacaaattcagctggtgcagtctggccccgagctgaagaaacctggcgagacagtgaagatttcctgcaaggccagcggctacaccttcaccaactacggcatgaactgggtcaagcaggcccctggcaagggcctgaaatggatgggctggatcaacaccaacaccggcgagcctacctacgccgaagagttcaagggcagattcgccttcagcctggaaaccagcgccagcacagcctacctccagatcaacaacctgaagaacgaggacaccgccacctacttttgcgccagactcggcttcggcaacgctatggattattggggccagggcaccagcgtgaccgtttcttctacgcgtatccagaaccctgatcctgccgtgtaccagctgcgggatagcaagagcagcgacaagagcgtgtgtctgttcaccgacttcgacagccagaccaacgtgtcccagagcaaggactccgacgtgtacatcaccgataagtgcgtgctggacatgcggagcatggacttcaagagcaactccgccgtggcctggtccaacaagtccgatttcgcctgcgccaacgccttcaacaacagcattatccccgaggacacattcttcccaagccccgagagcagctgcgacgtgaagctggtggaaaagagcttcgagacagacaccaacctgaacttccagaacctgagcgtgatcggcttcagaatcctgctgctgaaagtggccggctttaacctgctgatgaccctgcggctgtggtccagccgcgccaagagaagcggatctggcgtgaagcagaccctgaatttcgacctgctgaagctggctggcgacgtggaatccaacccaggcccttctagaggccatatgaccgagtacaagcccacggtgcgcctcgccacccgcgacgacgtccccagggccgtacgcaccctcgccgccgcgttcgccgactaccccgccacgcgccacaccgtcgatccggaccgccacatcgagcgggtcaccgagctgcaagaactcttcctcacgcgcgtcgggctcgacatcggcaaggtgtgggtcgcggacgacggcgccgcggtggcggtctggaccacgccggagagcgtcgaagcgggggcggtgttcgccgagatcggcccgcgcatggccgagttgagcggttcccggctggccgcgcagcaacagatggaaggcctcctggcgccgcaccggcccaaggagcccgcgtggttcctggccaccgtcggcgtctcgcccgaccaccagggcaagggtctgggcagcgccgtcgtgctccccggagtggaggcggccgagcgcgccggggtgcccgccttcctggagacctccgcgccccgcaacctccccttctacgagcggctcggcttcaccgtcaccgccgacgtcgaggtgcccgaaggaccgcgcacctggtgcatgacccgcaagcccggtgcctga

SEQ ID NO: 32794 - DNA, 3408 bp, synthetic construct
  source 1..3408: mol_type = other DNA
atggccttaccagtgaccgccttgctcctgccgctggccttgctgctccacgccgccaggccggcatgcgaagtgcagctgcttgaaagtggcggcggactgattcagcctggcggatctctgagactgagctgtgccgccagcggcttcaccttttctagccacgccatgacctgggtccgacaggcacctggaaaagggcttgaatgggtgtccgccatcagcggctctggcgattacacacactacgccgacagcgtgaagggcagattcaccatcagcagagacaacagcaagaacaccgtgtacctccagatgaacagcctgagagccgaggacagcgccgtgtattattgcgccaaggatgaggatggcggcagcctgcttggacacagaggacaaggcaccctggtcaccgtttcttccggtaccggcggaggcggatctggcggcggaggtagcggtggcggaggatctgaattcgacatcgtgatgacacagagccctagcagcctgacagtgacagccggcgagaaagtgaccatgagctgcaagagcagccagagcctgctgaacagcggcaaccagaagaactacctgacctggtatcagcagaagcccggccagcctcctaagctgctgatctactgggccagcaccagagaaagcggcgtgcccgatagattcacaggcagcggcagcggaaccgacttcaccctgacaatcagctctgtgcaggccgaggatctggccgtgtactactgccagaacgactacagctaccctctgacctttggagccggcaccaagctggaacttaaactcgaggacctgaagaacgtgttcccacctgaggtggccgtgttcgagcctagcgaggccgagatcagccacacccagaaagccaccctcgtgtgcctggctaccggcttctaccccgaccatgtggaactgtcttggtgggtcaacggcaaagaggtgcacagcggcgtgtgtaccgacccccagccactgaaagaacagcccgccctgaacgacagccggtactgcctgagcagcagactgagagtgtccgccaccttctggcagaacccccggaaccacttcagatgccaggtgcagttctacggcctgagcgagaacgacgagtggacccaggacagagccaagcccgtgacccagatcgtgtctgccgaagcctggggcagagccgattgcggctttaccagcgagagctaccagcagggcgtgctgagcgccaccatcctgtacgagatcctgctgggcaaggccaccctgtacgccgtgctggtgtctgccctggtgctgatggctatggtcaagcggaaggacagccggggaagggccaagcgatctggatctggagcaacaaacttctcactactcaaacaagcaggtgacgtggaggagaatcccgggcctactagtaccatggactggatttggcgcatccttttccttgtcggcgctgctaccggcgcccattccgggccccaggtgcagctggttgaatctggtggcggagttgtgcagcctggcagaagcctgagactgtcttgtgccgccagcggctatagaagcagcgtgtgcatgggctggttcagacaggcccctggcaaaggactggaaagagtggccctgatcggcagagatggcagcaccacctacatcgacagcgtgaagggcagattcaccatcagccgggacaacagcaagaacaccctgtacctccagatgaacagcctgagagccgaggacaccgccgtgtactattgtgccagaggactcggctattgggcctgcgagtacaactattggggccagggcacactggtcaccgtttctagcggatccggcggcggaggatctggcggaggcggatctgggggcggaggctctttcgaacaagttcagctggttcagagcggagccgaagtgaagaaacctggggcctctgtgaaggtgtcctgcaaggcttccggctataccttcaccagcttttggctgaactgggtccgacaggcccctggacaaggactggaatggatgggcaacatctaccccagcaccagctacaccgtgtacaaccagaaattcaaggaccgcgtgaccatgaccagggacaccagcacaagcacagtgtacatggaactgagcagcctgcggagcgaggataccgccgtgtattattgcgccagaacctggcggggcaacagcttcgattattggggccagggaaccaccgtgaccgtgtcatctacgcgtatccagaaccctgatcctgccgtgtaccagctgcgggatagcaagagcagcgacaagagcgtgtgtctgttcaccgacttcgacagccagaccaacgtgtcccagagcaaggactccgacgtgtacatcaccgataagtgcgtgctggacatgcggagcatggacttcaagagcaactccgccgtggcctggtccaacaagtccgatttcgcctgcgccaacgccttcaacaacagcattatccccgaggacacattcttcccaagccccgagagcagctgcgacgtgaagctggtggaaaagagcttcgagacagacaccaacctgaacttccagaacctgagcgtgatcggcttcagaatcctgctgctgaaagtggccggctttaacctgctgatgaccctgcggctgtggtccagccgcgccaagagaagcggatctggcgtgaagcagaccctgaatttcgacctgctgaagctggctggcgacgtggaatccaacccaggcccttctagaggccatatgaccgagtacaagcccacggtgcgcctcgccacccgcgacgacgtccccagggccgtacgcaccctcgccgccgcgttcgccgactaccccgccacgcgccacaccgtcgatccggaccgccacatcgagcgggtcaccgagctgcaagaactcttcctcacgcgcgtcgggctcgacatcggcaaggtgtgggtcgcggacgacggcgccgcggtggcggtctggaccacgccggagagcgtcgaagcgggggcggtgttcgccgagatcggcccgcgcatggccgagttgagcggttcccggctggccgcgcagcaacagatggaaggcctcctggcgccgcaccggcccaaggagcccgcgtggttcctggccaccgtcggcgtctcgcccgaccaccagggcaagggtctgggcagcgccgtcgtgctccccggagtggaggcggccgagcgcgccggggtgcccgccttcctggagacctccgcgccccgcaacctccccttctacgagcggctcggcttcaccgtcaccgccgacgtcgaggtgcccgaaggaccgcgcacctggtgcatgacccgcaagcccggtgcctga

SEQ ID NO: 32795 - DNA, 3408 bp, synthetic construct
  source 1..3408: mol_type = other DNA
atggccttaccagtgaccgccttgctcctgccgctggccttgctgctccacgccgccaggccggcatgcgaagtgcagctgcttgaaagtggcggcggactgattcagcctggcggatctctgagactgagctgtgccgccagcggcttcaccttttctagccacgccatgacctgggtccgacaggcacctggaaaagggcttgaatgggtgtccgccatcagcggctctggcgattacacacactacgccgacagcgtgaagggcagattcaccatcagcagagacaacagcaagaacaccgtgtacctccagatgaacagcctgagagccgaggacagcgccgtgtattattgcgccaaggatgaggatggcggcagcctgcttggacacagaggacaaggcaccctggtcaccgtttcttccggtaccggcggaggcggatctggcggcggaggtagcggtggcggaggatctgaattcgacatcgtgatgacacagagccctagcagcctgacagtgacagccggcgagaaagtgaccatgagctgcaagagcagccagagcctgctgaacagcggcaaccagaagaactacctgacctggtatcagcagaagcccggccagcctcctaagctgctgatctactgggccagcaccagagaaagcggcgtgcccgatagattcacaggcagcggcagcggaaccgacttcaccctgacaatcagctctgtgcaggccgaggatctggccgtgtactactgccagaacgactacagctaccctctgacctttggagccggcaccaagctggaacttaaactcgaggacctgaagaacgtgttcccacctgaggtggccgtgttcgagcctagcgaggccgagatcagccacacccagaaagccaccctcgtgtgcctggctaccggcttctaccccgaccatgtggaactgtcttggtgggtcaacggcaaagaggtgcacagcggcgtgtgtaccgacccccagccactgaaagaacagcccgccctgaacgacagccggtactgcctgagcagcagactgagagtgtccgccaccttctggcagaacccccggaaccacttcagatgccaggtgcagttctacggcctgagcgagaacgacgagtggacccaggacagagccaagcccgtgacccagatcgtgtctgccgaagcctggggcagagccgattgcggctttaccagcgagagctaccagcagggcgtgctgagcgccaccatcctgtacgagatcctgctgggcaaggccaccctgtacgccgtgctggtgtctgccctggtgctgatggctatggtcaagcggaaggacagccggggaagggccaagcgatctggatctggagcaacaaacttctcactactcaaacaagcaggtgacgtggaggagaatcccgggcctactagtaccatggactggatttggcgcatccttttccttgtcggcgctgctaccggcgcccattccgggccccaggtgcagctggttgaatctggtggcggagttgtgcagcctggcagaagcctgagactgtcttgtgccgccagcggctatagaagcagcgtgtgcatgggctggttcagacaggcccctggcaaaggactggaaagagtggccctgatcggcagagatggcagcaccacctacatcgacagcgtgaagggcagattcaccatcagccgggacaacagcaagaacaccctgtacctccagatgaacagcctgagagccgaggacaccgccgtgtactattgtgccagaggactcggctattgggcctgcgagtacaactattggggccagggcacactggtcaccgtttctagcggatccggcggcggaggatctggcggaggcggatctgggggcggaggctctttcgaacaagttcagctgcaacagcctggggccgaactcgttagacctggcgcttctgtgaagctgtcctgcaaggccagcggctacacctttaccagctactggatcaactgggtcaagcagcggcctggacagggcctcgaatggatcggcaatatctaccccagcgacagctacaccaactacaatcagaagttcaaggacaaggccacactgaccgtggacaagtctagcagcaccgcctacatgcagctgagcagccctacaagcgaggacagcgccgtgtattattgcacccggtcttggcggggcaacagcttcgattattggggccagggcacaaccctgaccgtgtcatctacgcgtatccagaaccctgatcctgccgtgtaccagctgcgggatagcaagagcagcgacaagagcgtgtgtctgttcaccgacttcgacagccagaccaacgtgtcccagagcaaggactccgacgtgtacatcaccgataagtgcgtgctggacatgcggagcatggacttcaagagcaactccgccgtggcctggtccaacaagtccgatttcgcctgcgccaacgccttcaacaacagcattatccccgaggacacattcttcccaagccccgagagcagctgcgacgtgaagctggtggaaaagagcttcgagacagacaccaacctgaacttccagaacctgagcgtgatcggcttcagaatcctgctgctgaaagtggccggctttaacctgctgatgaccctgcggctgtggtccagccgcgccaagagaagcggatctggcgtgaagcagaccctgaatttcgacctgctgaagctggctggcgacgtggaatccaacccaggcccttctagaggccatatgaccgagtacaagcccacggtgcgcctcgccacccgcgacgacgtccccagggccgtacgcaccctcgccgccgcgttcgccgactaccccgccacgcgccacaccgtcgatccggaccgccacatcgagcgggtcaccgagctgcaagaactcttcctcacgcgcgtcgggctcgacatcggcaaggtgtgggtcgcggacgacggcgccgcggtggcggtctggaccacgccggagagcgtcgaagcgggggcggtgttcgccgagatcggcccgcgcatggccgagttgagcggttcccggctggccgcgcagcaacagatggaaggcctcctggcgccgcaccggcccaaggagcccgcgtggttcctggccaccgtcggcgtctcgcccgaccaccagggcaagggtctgggcagcgccgtcgtgctccccggagtggaggcggccgagcgcgccggggtgcccgccttcctggagacctccgcgccccgcaacctccccttctacgagcggctcggcttcaccgtcaccgccgacgtcgaggtgcccgaaggaccgcgcacctggtgcatgacccgcaagcccggtgcctga

SEQ ID NO: 32796 - DNA, 2601 bp, synthetic construct
  source 1..2601: mol_type = other DNA
atggccttaccagtgaccgccttgctcctgccgctggccttgctgctccacgccgccaggccgcaggtgcagctggttgaatctggcggaggactggttcagcctggcggatctctgagactgtcttgtgccgccagcggcttcaccttcaccaatcacgccatgagctgggtccgacaggcccctggaaaaggactggaactggtgtctagcatcagcggcaacggcagaaccacctactacgccgatagcgtgaagggcagattcaccatcagccgggacatcagcaagaacaccctggacctccagatgaacagcctgagagccgaggataccgccgtgtactactgtgccaaggatggcggagagacactggtggatagcagaggccagggcacactggtcacagtgtcatctctcgagggacagcctaaggccaatcctaccgtgacactgttccctccaagcagcgaagaactccaggccaacaaggccacacttgtgtgcctgatctccgacttctaccctggggctgtgacagtggcttggaaggccgatggatctcctgtgaaagccggcgtggaaaccaccaagccatccaagcagagcaacaacaaatacgccgccagctcctacctgagcctgacacctgagcagtggaagtcccacagatcctacagctgccaagtgacccacgaaggcagcaccgtggaaaagacagtggcccctacagagtgcagcggcagagccgattgcggctttaccagcgagagctaccagcagggcgtgctgagcgccaccatcctgtacgagatcctgctgggcaaggccaccctgtacgccgtgctggtgtctgccctggtgctgatggctatggtcaagcggaaggacagccggggaagggccaagcgatctggatctggagcaacaaacttctcactactcaaacaagcaggtgacgtggaggagaatcccgggcctactagtatggactggatttggcgcatccttttccttgtcggcgctgctaccggcgcgcattccttcgaacaggttcagctgcttgagtctggcggaggactggttcaacctggcggaagcctgagactgtcttgtgccgcctctggcagaaccttcagcatgggctggtatagacaggcccctggcaagggcctcgaatttgtgtctgccatcacatacagcggcggcagcccttactacgccgattctgtgaagggcagattcaccatcagccgggacaacagcaagaacaccgtgtacctccagatgaacagcctgagagccgaggacaccgccgtgtactactgtgccgccaatccaacctacggcagcgactggaatgccgagaattggggccagggcacactggtcacagtgtctagtacgcgtgcctctacaaagggaccctccgtgtttcctctggctcccagcagcaagtctacaagcggaggaacagccgctctgggctgcctggtcaaggattactttcccgagcctgtgaccgtgtcctggaatagcggagcactgacaagcggcgtgcacacctttccagccgtgctgcaaagcagcggcctgtactctctgagcagcgtggtcacagtgcctagctctagcctgggcacccagacctacatctgcaatgtgaaccacaagcctagcaacaccaaggtggacaagagagtggaacccaagagctgtatccccgaggacacattcttcccaagccccgagagcagctgcgacgtgaagctggtggaaaagagcttcgagacagacaccaacctgaacttccagaacctgagcgtgatcggcttcagaatcctgctgctgaaagtggccggctttaacctgctgatgaccctgcggctgtggtccagccgcgccaagagaagcggatctggcgtgaagcagaccctgaatttcgacctgctgaagctggctggcgacgtggaatccaacccaggcccttctagaggccatatgaccgagtacaagcccacggtgcgcctcgccacccgcgacgacgtccccagggccgtacgcaccctcgccgccgcgttcgccgactaccccgccacgcgccacaccgtcgatccggaccgccacatcgagcgggtcaccgagctgcaagaactcttcctcacgcgcgtcgggctcgacatcggcaaggtgtgggtcgcggacgacggcgccgcggtggcggtctggaccacgccggagagcgtcgaagcgggggcggtgttcgccgagatcggcccgcgcatggccgagttgagcggttcccggctggccgcgcagcaacagatggaaggcctcctggcgccgcaccggcccaaggagcccgcgtggttcctggccaccgtcggcgtctcgcccgaccaccagggcaagggtctgggcagcgccgtcgtgctccccggagtggaggcggccgagcgcgccggggtgcccgccttcctggagacctccgcgccccgcaacctccccttctacgagcggctcggcttcaccgtcaccgccgacgtcgaggtgcccgaaggaccgcgcacctggtgcatgacccgcaagcccggtgcctga

SEQ ID NO: 32797 - DNA, 2601 bp, synthetic construct
  source 1..2601: mol_type = other DNA
atggccttaccagtgaccgccttgctcctgccgctggccttgctgctccacgccgccaggccgcaggtgcagctggttgaatctggcggaggactggttcagcctggcggatctctgagactgtcttgtgccgccagcggcttcaccttcaccaatcacgccatgagctgggtccgacaggcccctggaaaaggactggaactggtgtctagcatcagcggcaacggcagaaccacctactacgccgatagcgtgaagggcagattcaccatcagccgggacatcagcaagaacaccctggacctccagatgaacagcctgagagccgaggataccgccgtgtactactgtgccaaggatggcggagagacactggtggatagcagaggccagggcacactggtcacagtgtcatctctcgagggacagcctaaggccaatcctaccgtgacactgttccctccaagcagcgaagaactccaggccaacaaggccacacttgtgtgcctgatctccgacttctaccctggggctgtgacagtggcttggaaggccgatggatctcctgtgaaagccggcgtggaaaccaccaagccatccaagcagagcaacaacaaatacgccgccagctcctacctgagcctgacacctgagcagtggaagtcccacagatcctacagctgccaagtgacccacgaaggcagcaccgtggaaaagacagtggcccctacagagtgcagcggcagagccgattgcggctttaccagcgagagctaccagcagggcgtgctgagcgccaccatcctgtacgagatcctgctgggcaaggccaccctgtacgccgtgctggtgtctgccctggtgctgatggctatggtcaagcggaaggacagccggggaagggccaagcgatctggatctggagcaacaaacttctcactactcaaacaagcaggtgacgtggaggagaatcccgggcctactagtatggactggatttggcgcatccttttccttgtcggcgctgctaccggcgcgcattccttcgaacaggttcagctgcttgagtctggcggaggactggttcaacctggcggaagcctgagactgtcttgtgccgcctctggcagaaccttcagcatgggctggtatagacaggcccctggcaaggagagagaatttgtggccgccatcacatacagcggcggcagcccttactacgccgattctgtgaagggcagattcaccatcagccgggacaacagcaagaacaccgtgtacctccagatgaacagcctgagagccgaggacaccgccgtgtactactgtgccgccaatccaacctacggcagcgactggaatgccgagaattggggccagggcacactggtcacagtgtctagtacgcgtgcctctacaaagggaccctccgtgtttcctctggctcccagcagcaagtctacaagcggaggaacagccgctctgggctgcctggtcaaggattactttcccgagcctgtgaccgtgtcctggaatagcggagcactgacaagcggcgtgcacacctttccagccgtgctgcaaagcagcggcctgtactctctgagcagcgtggtcacagtgcctagctctagcctgggcacccagacctacatctgcaatgtgaaccacaagcctagcaacaccaaggtggacaagagagtggaacccaagagctgtatccccgaggacacattcttcccaagccccgagagcagctgcgacgtgaagctggtggaaaagagcttcgagacagacaccaacctgaacttccagaacctgagcgtgatcggcttcagaatcctgctgctgaaagtggccggctttaacctgctgatgaccctgcggctgtggtccagccgcgccaagagaagcggatctggcgtgaagcagaccctgaatttcgacctgctgaagctggctggcgacgtggaatccaacccaggcccttctagaggccatatgaccgagtacaagcccacggtgcgcctcgccacccgcgacgacgtccccagggccgtacgcaccctcgccgccgcgttcgccgactaccccgccacgcgccacaccgtcgatccggaccgccacatcgagcgggtcaccgagctgcaagaactcttcctcacgcgcgtcgggctcgacatcggcaaggtgtgggtcgcggacgacggcgccgcggtggcggtctggaccacgccggagagcgtcgaagcgggggcggtgttcgccgagatcggcccgcgcatggccgagttgagcggttcccggctggccgcgcagcaacagatggaaggcctcctggcgccgcaccggcccaaggagcccgcgtggttcctggccaccgtcggcgtctcgcccgaccaccagggcaagggtctgggcagcgccgtcgtgctccccggagtggaggcggccgagcgcgccggggtgcccgccttcctggagacctccgcgccccgcaacctccccttctacgagcggctcggcttcaccgtcaccgccgacgtcgaggtgcccgaaggaccgcgcacctggtgcatgacccgcaagcccggtgcctga

SEQ ID NO: 32798 - DNA, 2694 bp, synthetic construct
  source 1..2694: mol_type = other DNA
atggccttaccagtgaccgccttgctcctgccgctggccttgctgctccacgccgccaggccggaagtgcagctggttgaatctggcggaggactggttcaggctggcggatctctgagactgtcttgtgccgccagcggcagaacctttagcatgggctggtttagacaggcccctggcaaagagagagagttcgtcgccgccatcacatactctggcggcagcccttactacgccgactctgtgaagggcagattcaccatcagccgggacaacgccaagaacaccgtgtacctccagatgaacagcctgaagcctgaggacaccgccgtgtactactgcgccgccaatccaacatacggcagcgactggaacgccgagaattggggccagggaacccaagtgacagtgtctagcggtaccggcggaggcggatctggcggcggaggtagcggtggcggaggatctgaattcgacatccagatgacacagagccctagcagcctgtctgccagcgtgggagacagagtgaccatcacatgcaaggccagcgaccacatcaacaactggctggcctggtatcagcagaagcctggacaggcccctaagctgctgatctacggcgctaccacactggaaacaggcgtgcccagcagattttctggcagcggctctggcaccgactacaccctgacaatatccagcctccagcctgaggacttcgccacctactactgtcagcagagctggaacaccccttggacattcggccagggcaccaagctggaaatcaagagactcgaggacctgaagaacgtgttcccacctgaggtggccgtgttcgagcctagcgaggccgagatcagccacacccagaaagccaccctcgtgtgcctggctaccggcttctaccccgaccatgtggaactgtcttggtgggtcaacggcaaagaggtgcacagcggcgtgtgtaccgacccccagccactgaaagaacagcccgccctgaacgacagccggtactgcctgagcagcagactgagagtgtccgccaccttctggcagaacccccggaaccacttcagatgccaggtgcagttctacggcctgagcgagaacgacgagtggacccaggacagagccaagcccgtgacccagatcgtgtctgccgaagcctggggcagagccgattgcggctttaccagcgagagctaccagcagggcgtgctgagcgccaccatcctgtacgagatcctgctgggcaaggccaccctgtacgccgtgctggtgtctgccctggtgctgatggctatggtcaagcggaaggacagccggggaagggccaagcgatctggatctggagcaacaaacttctcactactcaaacaagcaggtgacgtggaggagaatcccgggcctactagtaccatggactggatttggcgcatccttttccttgtcggcgctgctaccggcgcccattccgggccccaagtgcaactggttgaatccggtggcggcctggtgcaacccggcggatctctcagacttagctgtgccgcctccggcagaaccttcacaatgggatggtacaggcaggctccagggaaagggctcgagttcgtcagcgccatctctctgtctcccacactggcctactacgccgactctgtgaaaggccggttcaccatctccagagataatagcaagaacaccgtggtgctgcaaatgaactctctgagagccgaggatacagccctgtactattgtgccgctgaccggaagtccgtgatgagcatcagacccgattactggggacagggcacactggtcacagtgtctagtggatccggcggcggaggatctggcggaggcggatctgggggcggaggctctttcgaacaagttcagcttcaacagcctggcgctgagctggtcaaacctggcgcttctgtgaagatgagctgcaaagccagcggctacgccttcagcagctactggatcaactggatgaagcagaaacccggccagggactcgaatggatcggccaaatctatcccggcgacggcgacaccaactacaacggcaagttcaagggcagagccacactgaccgccgatacctctagcagcacagcctacatgcagctgagcagcctgaccagcgaagatagcgccgtgtacttctgtgcccggtccatcacaacagtcgtgggctgcgctatggactattggggccagggaacaagcgtgaccgtgtctagtacgcgtatccagaaccctgatcctgccgtgtaccagctgcgggatagcaagagcagcgacaagagcgtgtgtctgttcaccgacttcgacagccagaccaacgtgtcccagagcaaggactccgacgtgtacatcaccgataagtgcgtgctggacatgcggagcatggacttcaagagcaactccgccgtggcctggtccaacaagtccgatttcgcctgcgccaacgccttcaacaacagcattatccccgaggacacattcttcccaagccccgagagcagctgcgacgtgaagctggtggaaaagagcttcgagacagacaccaacctgaacttccagaacctgagcgtgatcggcttcagaatcctgctgctgaaagtggccggctttaacctgctgatgaccctgcggctgtggtccagctaa

SEQ ID NO: 32799 - DNA, 3396 bp, synthetic construct
  source 1..3396: mol_type = other DNA
atggccttaccagtgaccgccttgctcctgccgctggccttgctgctccacgccgccaggccggaggttcagctgcttgagtctggcggaggactggttcaacctggcggaagcctgagactgtcttgtgccgcctctggcagaaccttcagcatgggctggtatagacaggcccctggcaagggcctcgaatttgtgtctgccatcacatacagcggcggcagcccttactacgccgattctgtgaagggcagattcaccatcagccgggacaacagcaagaacaccgtgtacctccagatgaacagcctgagagccgaggacaccgccgtgtactactgtgccgccaatccaacctacggcagcgactggaatgccgagaattggggccagggcacactggtcacagtgtctagtggtaccggcggaggcggatctggcggcggaggtagcggtggcggaggatctgaattcgacatccagatgacacagagccctagcagcctgtctgccagcgtgggagacagagtgaccatcacatgcaaggccagcgaccacatcaacaactggctggcctggtatcagcagaagcctggacaggcccctaagctgctgatctacggcgctaccacactggaaacaggcgtgcccagcagattttctggcagcggctctggcaccgactacaccctgacaatatccagcctccagcctgaggacttcgccacctactactgtcagcagagctggaacaccccttggacattcggccagggcaccaagctggaaatcaagagactcgaggacctgaagaacgtgttcccacctgaggtggccgtgttcgagcctagcgaggccgagatcagccacacccagaaagccaccctcgtgtgcctggctaccggcttctaccccgaccatgtggaactgtcttggtgggtcaacggcaaagaggtgcacagcggcgtgtgtaccgacccccagccactgaaagaacagcccgccctgaacgacagccggtactgcctgagcagcagactgagagtgtccgccaccttctggcagaacccccggaaccacttcagatgccaggtgcagttctacggcctgagcgagaacgacgagtggacccaggacagagccaagcccgtgacccagatcgtgtctgccgaagcctggggcagagccgattgcggctttaccagcgagagctaccagcagggcgtgctgagcgccaccatcctgtacgagatcctgctgggcaaggccaccctgtacgccgtgctggtgtctgccctggtgctgatggctatggtcaagcggaaggacagccggggaagggccaagcgatctggatctggagcaacaaacttctcactactcaaacaagcaggtgacgtggaggagaatcccgggcctactagtgccaccatggactggatttggcgcatccttttccttgtcggcgctgctaccggcgcccattccgggcccgaggttcagctgcttgagtctggcggaggactggttcaacctggcggaagcctgagactgtcttgtgccgcctctggcagaaccttcagcatgggctggtatagacaggcccctggcaagggcctcgaatttgtgtctgccatcacatacagcggcggcagcccttactacgccgattctgtgaagggcagattcaccatcagccgggacaacagcaagaacaccgtgtacctccagatgaacagcctgagagccgaggacaccgccgtgtactactgtgccgccaatccaacctacggcagcgactggaatgccgagaattggggccagggcacactggtcacagtgtctagtggatccggcggcggaggatctggcggaggcggatctgggggcggaggctctttcgaacaagttcagcttcaacagcctggcgctgagctggtcaaacctggcgcttctgtgaagatgagctgcaaagccagcggctacgccttcagcagctactggatcaactggatgaagcagaaacccggccagggactcgaatggatcggccaaatctatcccggcgacggcgacaccaactacaacggcaagttcaagggcagagccacactgaccgccgatacctctagcagcacagcctacatgcagctgagcagcctgaccagcgaagatagcgccgtgtacttctgtgcccggtccatcacaacagtcgtgggctgcgctatggactattggggccagggaacaagcgtgaccgtgtctagtacgcgtatccagaaccctgatcctgccgtgtaccagctgcgggatagcaagagcagcgacaagagcgtgtgtctgttcaccgacttcgacagccagaccaacgtgtcccagagcaaggactccgacgtgtacatcaccgataagtgcgtgctggacatgcggagcatggacttcaagagcaactccgccgtggcctggtccaacaagtccgatttcgcctgcgccaacgccttcaacaacagcattatccccgaggacacattcttcccaagccccgagagcagctgcgacgtgaagctggtggaaaagagcttcgagacagacaccaacctgaacttccagaacctgagcgtgatcggcttcagaatcctgctgctgaaagtggccggctttaacctgctgatgaccctgcggctgtggtccagccgcgccaagagaagcggatctggcgtgaagcagaccctgaatttcgacctgctgaagctggctggcgacgtggaatccaacccaggcccttctagaggccatatgaccgagtacaagcccacggtgcgcctcgccacccgcgacgacgtccccagggccgtacgcaccctcgccgccgcgttcgccgactaccccgccacgcgccacaccgtcgatccggaccgccacatcgagcgggtcaccgagctgcaagaactcttcctcacgcgcgtcgggctcgacatcggcaaggtgtgggtcgcggacgacggcgccgcggtggcggtctggaccacgccggagagcgtcgaagcgggggcggtgttcgccgagatcggcccgcgcatggccgagttgagcggttcccggctggccgcgcagcaacagatggaaggcctcctggcgccgcaccggcccaaggagcccgcgtggttcctggccaccgtcggcgtctcgcccgaccaccagggcaagggtctgggcagcgccgtcgtgctccccggagtggaggcggccgagcgcgccggggtgcccgccttcctggagacctccgcgccccgcaacctccccttctacgagcggctcggcttcaccgtcaccgccgacgtcgaggtgcccgaaggaccgcgcacctggtgcatgacccgcaagcccggtgcctga

SEQ ID NO: 32800 - DNA, 3396 bp, synthetic construct
  source 1..3396: mol_type = other DNA
atggccttaccagtgaccgccttgctcctgccgctggccttgctgctccacgccgccaggccggaggttcagctgcttgagtctggcggaggactggttcaacctggcggaagcctgagactgtcttgtgccgcctctggcagaaccttcagcatgggctggtatagacaggcccctggcaagggcctcgaatttgtgtctgccatcacatacagcggcggcagcccttactacgccgattctgtgaagggcagattcaccatcagccgggacaacagcaagaacaccgtgtacctccagatgaacagcctgagagccgaggacaccgccgtgtactactgtgccgccaatccaacctacggcagcgactggaatgccgagaattggggccagggcacactggtcacagtgtctagtggtaccggcggaggcggatctggcggcggaggtagcggtggcggaggatctgaattcgacatccagatgacacagagccctagcagcctgtctgccagcgtgggagacagagtgaccatcacatgcaaggccagcgaccacatcaacaactggctggcctggtatcagcagaagcctggacaggcccctaagctgctgatctacggcgctaccacactggaaacaggcgtgcccagcagattttctggcagcggctctggcaccgactacaccctgacaatatccagcctccagcctgaggacttcgccacctactactgtcagcagagctggaacaccccttggacattcggccagggcaccaagctggaaatcaagagactcgaggacctgaagaacgtgttcccacctgaggtggccgtgttcgagcctagcgaggccgagatcagccacacccagaaagccaccctcgtgtgcctggctaccggcttctaccccgaccatgtggaactgtcttggtgggtcaacggcaaagaggtgcacagcggcgtgtgtaccgacccccagccactgaaagaacagcccgccctgaacgacagccggtactgcctgagcagcagactgagagtgtccgccaccttctggcagaacccccggaaccacttcagatgccaggtgcagttctacggcctgagcgagaacgacgagtggacccaggacagagccaagcccgtgacccagatcgtgtctgccgaagcctggggcagagccgattgcggctttaccagcgagagctaccagcagggcgtgctgagcgccaccatcctgtacgagatcctgctgggcaaggccaccctgtacgccgtgctggtgtctgccctggtgctgatggctatggtcaagcggaaggacagccggggaagggccaagcgatctggatctggagcaacaaacttctcactactcaaacaagcaggtgacgtggaggagaatcccgggcctactagtgccaccatggactggatttggcgcatccttttccttgtcggcgctgctaccggcgcccattccgggccccaggttcagctgcttgagtctggcggaggactggttcaacctggcggaagcctgagactgtcttgtgccgcctctggcagaaccttcagcatgggctggtatagacaggcccctggcaaggagagagaatttgtggccgccatcacatacagcggcggcagcccttactacgccgattctgtgaagggcagattcaccatcagccgggacaacagcaagaacaccgtgtacctccagatgaacagcctgagagccgaggacaccgccgtgtactactgtgccgccaatccaacctacggcagcgactggaatgccgagaattggggccagggcacactggtcacagtgtctagtggatccggcggcggaggatctggcggaggcggatctgggggcggaggctctttcgaacaagttcagcttcaacagcctggcgctgagctggtcaaacctggcgcttctgtgaagatgagctgcaaagccagcggctacgccttcagcagctactggatcaactggatgaagcagaaacccggccagggactcgaatggatcggccaaatctatcccggcgacggcgacaccaactacaacggcaagttcaagggcagagccacactgaccgccgatacctctagcagcacagcctacatgcagctgagcagcctgaccagcgaagatagcgccgtgtacttctgtgcccggtccatcacaacagtcgtgggctgcgctatggactattggggccagggaacaagcgtgaccgtgtctagtacgcgtatccagaaccctgatcctgccgtgtaccagctgcgggatagcaagagcagcgacaagagcgtgtgtctgttcaccgacttcgacagccagaccaacgtgtcccagagcaaggactccgacgtgtacatcaccgataagtgcgtgctggacatgcggagcatggacttcaagagcaactccgccgtggcctggtccaacaagtccgatttcgcctgcgccaacgccttcaacaacagcattatccccgaggacacattcttcccaagccccgagagcagctgcgacgtgaagctggtggaaaagagcttcgagacagacaccaacctgaacttccagaacctgagcgtgatcggcttcagaatcctgctgctgaaagtggccggctttaacctgctgatgaccctgcggctgtggtccagccgcgccaagagaagcggatctggcgtgaagcagaccctgaatttcgacctgctgaagctggctggcgacgtggaatccaacccaggcccttctagaggccatatgaccgagtacaagcccacggtgcgcctcgccacccgcgacgacgtccccagggccgtacgcaccctcgccgccgcgttcgccgactaccccgccacgcgccacaccgtcgatccggaccgccacatcgagcgggtcaccgagctgcaagaactcttcctcacgcgcgtcgggctcgacatcggcaaggtgtgggtcgcggacgacggcgccgcggtggcggtctggaccacgccggagagcgtcgaagcgggggcggtgttcgccgagatcggcccgcgcatggccgagttgagcggttcccggctggccgcgcagcaacagatggaaggcctcctggcgccgcaccggcccaaggagcccgcgtggttcctggccaccgtcggcgtctcgcccgaccaccagggcaagggtctgggcagcgccgtcgtgctccccggagtggaggcggccgagcgcgccggggtgcccgccttcctggagacctccgcgccccgcaacctccccttctacgagcggctcggcttcaccgtcaccgccgacgtcgaggtgcccgaaggaccgcgcacctggtgcatgacccgcaagcccggtgcctga

SEQ ID NO: 32801 - DNA, 2277 bp, synthetic construct
  source 1..2277: mol_type = other DNA
atggccttaccagtgaccgccttgctcctgccgctggccttgctgctccacgccgccaggccggacatccagatgacacagagccctagcagcctgtctgccagcgtgggagacagagtgaccatcacctgtagagccagccaggacatcagcagctacctgaactggtatcagcagaagcccggcaaggcccctaagctgctgatctactacaccagcagactgcacagcggcgtgcccagcagattttctggctctggcagcggcaccgacttcaccctgacaatatctagcctccagcctgaggacttcgccacctactattgccagcagggcaacaccctgccttacacatttggacagggcaccaaggtggaaatcaagagactcgaggacctgaagaacgtgttcccacctgaggtggccgtgttcgagcctagcgaggccgagatcagccacacccagaaagccaccctcgtgtgcctggctaccggcttctaccccgaccatgtggaactgtcttggtgggtcaacggcaaagaggtgcacagcggcgtgtgtaccgacccccagccactgaaagaacagcccgccctgaacgacagccggtactgcctgagcagcagactgagagtgtccgccaccttctggcagaacccccggaaccacttcagatgccaggtgcagttctacggcctgagcgagaacgacgagtggacccaggacagagccaagcccgtgacccagatcgtgtctgccgaagcctggggcagagccgattgcggctttaccagcgagagctaccagcagggcgtgctgagcgccaccatcctgtacgagatcctgctgggcaaggccaccctgtacgccgtgctggtgtctgccctggtgctgatggctatggtcaagcggaaggacagccggggaagggccaagcgatctggatctggagcaacaaacttctcactactcaaacaagcaggtgacgtggaggagaatcccgggcctactagtgccaccatggactggatttggcgcatccttttccttgtcggcgctgctaccggcgcccattccgggcccgaagttcagctgcaagagtctggcggaggactggttcaacctggcggaagcctgagactgtcttgtgccgcctctggcagaaccttcagcagcctgttcatgggctggttcagacaggcccctggcaaagagagagaactggtcgccgccatcagccggtacagcctgtacacctactacgccgacagcgtgaagggcagattcaccatcagcgccgacaacgccaagaacgccgtgtacctccagatgaacagcctgaagccagaggacacagccgtgtactactgcgccagcaaacttgagtacaccagcaacgactacgacagctggggccagggaacccaagtgacagtctcttctggatccggcggcggaggatctggcggaggcggatctgggggcggaggctctttcgaagtgcagctggttgaatcaggtggcggcctggttcaacctggcggatctctgagactgagctgtgccgccagcggctacaccttcagcgactactttatgagctgggtccgacaggcccctggcaaaggacttgaatgggtcgccaccatcagcaatggcggcacctacacttactaccccgacagcgtgaagggcagattcaccatctccagagacaacagcaagaacaccctgtacctccagatgaactccctgagagccgaggacaccgccgtgtactactgcgccagattcgacggctacatcttcgactattggggccagggcaccctggtcacagtctcttctacgcgtatccagaaccctgatcctgccgtgtaccagctgcgggatagcaagagcagcgacaagagcgtgtgtctgttcaccgacttcgacagccagaccaacgtgtcccagagcaaggactccgacgtgtacatcaccgataagtgcgtgctggacatgcggagcatggacttcaagagcaactccgccgtggcctggtccaacaagtccgatttcgcctgcgccaacgccttcaacaacagcattatccccgaggacacattcttcccaagccccgagagcagctgcgacgtgaagctggtggaaaagagcttcgagacagacaccaacctgaacttccagaacctgagcgtgatcggcttcagaatcctgctgctgaaagtggccggctttaacctgctgatgaccctgcggctgtggtccagctaa

SEQ ID NO: 32802 - DNA, 2289 bp, synthetic construct
  source 1..2289: mol_type = other DNA
atggccttaccagtgaccgccttgctcctgccgctggccttgctgctccacgccgccaggccggacatccagatgacacagagccctagcagcctgtctgccagcgtgggagacagagtgaccatcacatgcaaggccagcgaccacatcaacaactggctggcctggtatcagcagaagcctggacaggcccctaagctgctgatctacggcgctaccacactggaaacaggcgtgcccagcagattttctggcagcggctctggcaccgactacaccctgacaatatccagcctccagcctgaggacttcgccacctactactgtcagcagagctggaacaccccttggacattcggccagggcaccaagctggaaatcaagagactcgaggacctgaagaacgtgttcccacctgaggtggccgtgttcgagcctagcgaggccgagatcagccacacccagaaagccaccctcgtgtgcctggctaccggcttctaccccgaccatgtggaactgtcttggtgggtcaacggcaaagaggtgcacagcggcgtgtgtaccgacccccagccactgaaagaacagcccgccctgaacgacagccggtactgcctgagcagcagactgagagtgtccgccaccttctggcagaacccccggaaccacttcagatgccaggtgcagttctacggcctgagcgagaacgacgagtggacccaggacagagccaagcccgtgacccagatcgtgtctgccgaagcctggggcagagccgattgcggctttaccagcgagagctaccagcagggcgtgctgagcgccaccatcctgtacgagatcctgctgggcaaggccaccctgtacgccgtgctggtgtctgccctggtgctgatggctatggtcaagcggaaggacagccggggaagggccaagcgatctggatctggagcaacaaacttctcactactcaaacaagcaggtgacgtggaggagaatcccgggcctactagtaccatggactggatttggcgcatccttttccttgtcggcgctgctaccggcgcccattccgggcccgaagttcagctgcaagagtctggcggaggactggttcaggctggcgatagcctgagactgtcttgtgccgcttctggcagagccgtgtccagcctgtttatgggctggtttcggagagcccctggcaaagagagagaactggttgccgccatcagccggtacagcctgtacacctactacgccgacagcgtgaagggcagattcaccatcagcgccgacaacgccaagaacgccgtgtacctccagatgaacagcctgaagcctgaggacacagccgtgtactactgcgccagcaaacttgagtacaccagcaacgactacgacagctggggccagggaacccaagtgacagtctcttctggatccggcggcggaggatctggcggaggcggatctgggggcggaggctctttcgaacaagttcagcttcaacagcctggcgctgagctggtcaaacctggcgcttctgtgaagatgagctgcaaagccagcggctacgccttcagcagctactggatcaactggatgaagcagaaacccggccagggactcgaatggatcggccaaatctatcccggcgacggcgacaccaactacaacggcaagttcaagggcagagccacactgaccgccgatacctctagcagcacagcctacatgcagctgagcagcctgaccagcgaagatagcgccgtgtacttctgtgcccggtccatcacaacagtcgtgggctgcgctatggactattggggccagggaacaagcgtgaccgtgtctagtacgcgtatccagaaccctgatcctgccgtgtaccagctgcgggatagcaagagcagcgacaagagcgtgtgtctgttcaccgacttcgacagccagaccaacgtgtcccagagcaaggactccgacgtgtacatcaccgataagtgcgtgctggacatgcggagcatggacttcaagagcaactccgccgtggcctggtccaacaagtccgatttcgcctgcgccaacgccttcaacaacagcattatccccgaggacacattcttcccaagccccgagagcagctgcgacgtgaagctggtggaaaagagcttcgagacagacaccaacctgaacttccagaacctgagcgtgatcggcttcagaatcctgctgctgaaagtggccggctttaacctgctgatgaccctgcggctgtggtccagctaa

SEQ ID NO: 32803 - DNA, 2289 bp, synthetic construct
  source 1..2289: mol_type = other DNA
atggccttaccagtgaccgccttgctcctgccgctggccttgctgctccacgccgccaggccggacatccagatgacacagagccctagcagcctgtctgccagcgtgggagacagagtgaccatcacatgcaaggccagcgaccacatcaacaactggctggcctggtatcagcagaagcctggacaggcccctaagctgctgatctacggcgctaccacactggaaacaggcgtgcccagcagattttctggcagcggctctggcaccgactacaccctgacaatatccagcctccagcctgaggacttcgccacctactactgtcagcagagctggaacaccccttggacattcggccagggcaccaagctggaaatcaagagactcgaggacctgaagaacgtgttcccacctgaggtggccgtgttcgagcctagcgaggccgagatcagccacacccagaaagccaccctcgtgtgcctggctaccggcttctaccccgaccatgtggaactgtcttggtgggtcaacggcaaagaggtgcacagcggcgtgtgtaccgacccccagccactgaaagaacagcccgccctgaacgacagccggtactgcctgagcagcagactgagagtgtccgccaccttctggcagaacccccggaaccacttcagatgccaggtgcagttctacggcctgagcgagaacgacgagtggacccaggacagagccaagcccgtgacccagatcgtgtctgccgaagcctggggcagagccgattgcggctttaccagcgagagctaccagcagggcgtgctgagcgccaccatcctgtacgagatcctgctgggcaaggccaccctgtacgccgtgctggtgtctgccctggtgctgatggctatggtcaagcggaaggacagccggggaagggccaagcgatctggatctggagcaacaaacttctcactactcaaacaagcaggtgacgtggaggagaatcccgggcctactagtaccatggactggatttggcgcatccttttccttgtcggcgctgctaccggcgcccattccgggcccgaagttcagctgcaagagtctggcggaggactggttcaacctggcggaagcctgagactgtcttgtgccgcctctggcagaaccttcagcagcctgtttatgggctgggtccgacaggcccctggcaaaggactggaactggtgtctgccatcagccggtacagcctgtacacctactacgccgacagcgtgaagggcagattcaccatcagcagagacaacgccaagaacaccctgtacctccagatgaacagcctgcggcctgaggataccgccgtgtactactgcgccagcaaacttgagtacaccagcaacgactacgacagctggggccagggaacactggtcacagtctcttctggatccggcggcggaggatctggcggaggcggatctgggggcggaggctctttcgaacaagttcagcttcaacagcctggcgctgagctggtcaaacctggcgcttctgtgaagatgagctgcaaagccagcggctacgccttcagcagctactggatcaactggatgaagcagaaacccggccagggactcgaatggatcggccaaatctatcccggcgacggcgacaccaactacaacggcaagttcaagggcagagccacactgaccgccgatacctctagcagcacagcctacatgcagctgagcagcctgaccagcgaagatagcgccgtgtacttctgtgcccggtccatcacaacagtcgtgggctgcgctatggactattggggccagggaacaagcgtgaccgtgtctagtacgcgtatccagaaccctgatcctgccgtgtaccagctgcgggatagcaagagcagcgacaagagcgtgtgtctgttcaccgacttcgacagccagaccaacgtgtcccagagcaaggactccgacgtgtacatcaccgataagtgcgtgctggacatgcggagcatggacttcaagagcaactccgccgtggcctggtccaacaagtccgatttcgcctgcgccaacgccttcaacaacagcattatccccgaggacacattcttcccaagccccgagagcagctgcgacgtgaagctggtggaaaagagcttcgagacagacaccaacctgaacttccagaacctgagcgtgatcggcttcagaatcctgctgctgaaagtggccggctttaacctgctgatgaccctgcggctgtggtccagctaa

SEQ ID NO: 32804 - DNA, 2970 bp, synthetic construct
  source 1..2970: mol_type = other DNA
atggccttaccagtgaccgccttgctcctgccgctggccttgctgctccacgccgccaggccggaagttcagctgcaagagtctggcggaggactggttcaacctggcggaagcctgagactgtcttgtgccgcctctggcagaaccttcagcagcctgttcatgggctggttcagacaggcccctggcaaagagagagaactggtcgccgccatcagccggtacagcctgtacacctactacgccgacagcgtgaagggcagattcaccatcagcgccgacaacgccaagaacgccgtgtacctccagatgaacagcctgaagccagaggacacagccgtgtactactgcgccagcaaacttgagtacaccagcaacgactacgacagctggggccagggaacccaagtgacagtctcttctggtaccggcggaggcggatctggcggcggaggtagcggtggcggaggatctgaattcgacatccagatgacacagagccctagcagcctgtctgccagcgtgggagacagagtgaccatcacctgtagagccagccaggacatcagcaactacctgaactggtatcagcagaagcccggcaaggcccctaagctgctgatctactacaccagcagactgcacagcggcgtgcccagcagattttctggctctggcagcggcaccgacttcaccctgacaatatctagcctccagcctgaggacttcgccacctactattgccagcagggcaacaccctgccttacacatttggacagggcaccaaggtggaaatcaagagactcgaggacctgaagaacgtgttcccacctgaggtggccgtgttcgagcctagcaaggccgagatcgcccacacccagaaagccaccctcgtgtgcctggctaccggcttctaccccgaccatgtggaactgtcttggtgggtcaacggcaaagaggtgcacagcggcgtgtgtaccgacccccagccactgaaagaacagcccgccctgaacgacagccggtactgcctgagcagcagactgagagtgtccgccaccttctggcagaacccccggaaccacttcagatgccaggtgcagttctacggcctgagcgagaacgacgagtggacccaggacagagccaagcccgtgacccagatcgtgtctgccgaagcctggggcagagccgattgcggcatcaccagcgccagctaccaccagggcgtgctgagcgccaccatcctgtacgagatcctgctgggcaaggccaccctgtacgccgtgctggtgtctgccctggtgctgatggctatggtcaagcggaaggacagccggggaagggccaagcgatctggatctggagcaacaaacttctcactactcaaacaagcaggtgacgtggaggagaatcccgggcctactagtatggactggatttggcgcatccttttccttgtcggcgctgctaccggcgcgcattccttcgaagtgcagctggttgaatcaggtggcggcctggttcaacctggcggatctctgagactgagctgtgccgccagcggcttcaccttcagcgactactttatgagctgggtccgacaggcccctggcaaaggacttgaatgggtcgccaccatcagcaatggcggcacctacacttactaccccgacagcgtgaagggcagattcaccatctccagagacaacagcaagaacaccctgtacctccagatgaactccctgagagccgaggacaccgccgtgtactactgcgccagattcgacggctacatcttcgactattggggccagggcaccctggtcacagtctcttctacgcgtatccagaaccctgatcctgccgtgtaccagctgcgggatagcaagagcagcgacaagagcgtgtgtctgttcaccgacttcgacagccagaccaacgtgtcccagagcaaggactccgacgtgtacatcaccgataagtgcgtgctggacatgcggagcatggacttcaagagcaactccgccgtggcctggtccaacaagtccgatttcgcctgcgccaacgccttcaacaacagcattatccccgaggacacattcttcccaagcagcgacgtgccctgcgacgtgaagctggtggaaaagagcttcgagacagacaccaacctgaacttccagaacctgagcgtgatcggcttcagaatcctgctgctgaaagtggccggctttaacctgctgatgaccctgcggctgtggtccagccgcgccaagagaagcggatctggcgtgaagcagaccctgaatttcgacctgctgaagctggctggcgacgtggaatccaacccaggcccttctagaggccatatgaccgagtacaagcccacggtgcgcctcgccacccgcgacgacgtccccagggccgtacgcaccctcgccgccgcgttcgccgactaccccgccacgcgccacaccgtcgatccggaccgccacatcgagcgggtcaccgagctgcaagaactcttcctcacgcgcgtcgggctcgacatcggcaaggtgtgggtcgcggacgacggcgccgcggtggcggtctggaccacgccggagagcgtcgaagcgggggcggtgttcgccgagatcggcccgcgcatggccgagttgagcggttcccggctggccgcgcagcaacagatggaaggcctcctggcgccgcaccggcccaaggagcccgcgtggttcctggccaccgtcggcgtctcgcccgaccaccagggcaagggtctgggcagcgccgtcgtgctccccggagtggaggcggccgagcgcgccggggtgcccgccttcctggagacctccgcgccccgcaacctccccttctacgagcggctcggcttcaccgtcaccgccgacgtcgaggtgcccgaaggaccgcgcacctggtgcatgacccgcaagcccggtgcctga

SEQ ID NO: 32805 - DNA, 2697 bp, synthetic construct; identical to SEQ ID NO: 32341
  source 1..2697: mol_type = other DNA

SEQ ID NO: 32806 - DNA, 2310 bp, synthetic construct
  source 1..2310: mol_type = other DNA
atggccttaccagtgaccgccttgctcctgccgctggccttgctgctccacgccgccaggccggaagtgcagctggttgaatctggcggaggactggttcagcctggcggatctctgagactgagctgtgaagccagcggcttcgccagcgacgattacatcatcggctggttcagacaggcccctggcaaagagagagagggcgtcagctgcatcagctctaagtacgccaacaccgtgtacaccgacagcgtgaagggcagattcagactgagcagaggcaccgccaagaataccgtgtacctccagatgagcgccctgaagcctgaggataccgccgtgtactactgcgctatggacagccgcagagtgacatgccctgagatcagcaccatgcaccggaacttcgattcttggggccagggcacactggtcacagtgtcatctggtaccggcggaggcggatctggcggcggaggtagcggtggcggaggatctgaattcgacatccagatgacacagagccctagcagcctgtctgccagcgtgggagacagagtgaccatcacatgcaaggccagcgaccacatcaacaactggctggcctggtatcagcagaagcctggacaggcccctaagctgctgatctacggcgctaccacactggaaacaggcgtgcccagcagattttctggcagcggctctggcaccgactacaccctgacaatatccagcctccagcctgaggacttcgccacctactactgtcagcagagctggaacaccccttggacattcggccagggcaccaagctggaaatcaagagactcgaggacctgaagaacgtgttcccacctgaggtggccgtgttcgagcctagcaaggccgagatcgcccacacccagaaagccaccctcgtgtgcctggctaccggcttctaccccgaccatgtggaactgtcttggtgggtcaacggcaaagaggtgcacagcggcgtgtgtaccgacccccagccactgaaagaacagcccgccctgaacgacagccggtactgcctgagcagcagactgagagtgtccgccaccttctggcagaacccccggaaccacttcagatgccaggtgcagttctacggcctgagcgagaacgacgagtggacccaggacagagccaagcccgtgacccagatcgtgtctgccgaagcctggggcagagccgattgcggcatcaccagcgccagctaccaccagggcgtgctgagcgccaccatcctgtacgagatcctgctgggcaaggccaccctgtacgccgtgctggtgtctgccctggtgctgatggctatggtcaagcggaaggacagccggggaagggccaagcgatctggatctggagcaacaaacttctcactactcaaacaagcaggtgacgtggaggagaatcccgggcctactagtatggactggatttggcgcatccttttccttgtcggcgctgctaccggcgcgcattccttcgaacaagttcagcttcaacagcctggcgctgagctggtcaaacctggcgcttctgtgaagatgagctgcaaagccagcggctacgccttcagcagctactggatcaactggatgaagcagaaacccggccagggactcgaatggatcggccaaatctatcccggcgacggcgacaccaactacaacggcaagttcaagggcagagccacactgaccgccgatacctctagcagcacagcctacatgcagctgagcagcctgaccagcgaagatagcgccgtgtacttctgtgcccggtccatcacaacagtcgtgggctgcgctatggactattggggccagggaacaagcgtgaccgtgtctagtacgcgtatccagaaccctgatcctgccgtgtaccagctgcgggatagcaagagcagcgacaagagcgtgtgtctgttcaccgacttcgacagccagaccaacgtgtcccagagcaaggactccgacgtgtacatcaccgataagtgcgtgctggacatgcggagcatggacttcaagagcaactccgccgtggcctggtccaacaagtccgatttcgcctgcgccaacgccttcaacaacagcattatccccgaggacacattcttcccaagcagcgacgtgccctgcgacgtgaagctggtggaaaagagcttcgagacagacaccaacctgaacttccagaacctgagcgtgatcggcttcagaatcctgctgctgaaagtggccggctttaacctgctgatgaccctgcggctgtggtccagctaa

SEQ ID NO: 32807 - DNA, 2310 bp, synthetic construct
  source 1..2310: mol_type = other DNA
atggccttaccagtgaccgccttgctcctgccgctggccttgctgctccacgccgccaggccggaagtgcagctggttgaatctggcggaggactggttcagcctggcggatctctgagactgtcttgtgccgcctctggcttcgccagcgactactatatcatcggctggttcagacaggcccctggcaaagagagagagggcgtcagctgtatcagcagcagatacgccaacaccaactacgccgacagcgtgaagggcagattcaccatcagccgggacaacgccaagaacaccgtgtacctccagatgaacagcctgaagcctgaggacaccgccgtgtactactgtgccgccgacaccagaagatacacctgtcctgacattgccaccatgcaccggaacttcgattcttggggccagggcacactggtcaccgtttcttctggtaccggcggaggcggatctggcggcggaggtagcggtggcggaggatctgaattcgacatccagatgacacagagccctagcagcctgtctgccagcgtgggagacagagtgaccatcacatgcaaggccagcgaccacatcaacaactggctggcctggtatcagcagaagcctggacaggcccctaagctgctgatctacggcgctaccacactggaaacaggcgtgcccagcagattttctggcagcggctctggcaccgactacaccctgacaatatccagcctccagcctgaggacttcgccacctactactgtcagcagagctggaacaccccttggacattcggccagggcaccaagctggaaatcaagagactcgaggacctgaagaacgtgttcccacctgaggtggccgtgttcgagcctagcaaggccgagatcgcccacacccagaaagccaccctcgtgtgcctggctaccggcttctaccccgaccatgtggaactgtcttggtgggtcaacggcaaagaggtgcacagcggcgtgtgtaccgacccccagccactgaaagaacagcccgccctgaacgacagccggtactgcctgagcagcagactgagagtgtccgccaccttctggcagaacccccggaaccacttcagatgccaggtgcagttctacggcctgagcgagaacgacgagtggacccaggacagagccaagcccgtgacccagatcgtgtctgccgaagcctggggcagagccgattgcggcatcaccagcgccagctaccaccagggcgtgctgagcgccaccatcctgtacgagatcctgctgggcaaggccaccctgtacgccgtgctggtgtctgccctggtgctgatggctatggtcaagcggaaggacagccggggaagggccaagcgatctggatctggagcaacaaacttctcactactcaaacaagcaggtgacgtggaggagaatcccgggcctactagtatggactggatttggcgcatccttttccttgtcggcgctgctaccggcgcgcattccttcgaacaagttcagcttcaacagcctggcgctgagctggtcaaacctggcgcttctgtgaagatgagctgcaaagccagcggctacgccttcagcagctactggatcaactggatgaagcagaaacccggccagggactcgaatggatcggccaaatctatcccggcgacggcgacaccaactacaacggcaagttcaagggcagagccacactgaccgccgatacctctagcagcacagcctacatgcagctgagcagcctgaccagcgaagatagcgccgtgtacttctgtgcccggtccatcacaacagtcgtgggctgcgctatggactattggggccagggaacaagcgtgaccgtgtctagtacgcgtatccagaaccctgatcctgccgtgtaccagctgcgggatagcaagagcagcgacaagagcgtgtgtctgttcaccgacttcgacagccagaccaacgtgtcccagagcaaggactccgacgtgtacatcaccgataagtgcgtgctggacatgcggagcatggacttcaagagcaactccgccgtggcctggtccaacaagtccgatttcgcctgcgccaacgccttcaacaacagcattatccccgaggacacattcttcccaagcagcgacgtgccctgcgacgtgaagctggtggaaaagagcttcgagacagacaccaacctgaacttccagaacctgagcgtgatcggcttcagaatcctgctgctgaaagtggccggctttaacctgctgatgaccctgcggctgtggtccagctaa

SEQ ID NO: 32808 - DNA, 2283 bp, synthetic construct
  source 1..2283: mol_type = other DNA
atggccttaccagtgaccgccttgctcctgccgctggccttgctgctccacgccgccaggccggacatccagatgacacagagccctagcagcctgtctgccagcgtgggagacagagtgaccatcacatgcaaggccagcgaccacatcaacaactggctggcctggtatcagcagaagcctggacaggcccctaagctgctgatctacggcgctaccacactggaaacaggcgtgcccagcagattttctggcagcggctctggcaccgactacaccctgacaatatccagcctccagcctgaggacttcgccacctactactgtcagcagagctggaacaccccttggacattcggccagggcaccaagctggaaatcaagagactcgaggacctgaagaacgtgttcccacctgaggtggccgtgttcgagcctagcgaggccgagatcagccacacccagaaagccaccctcgtgtgcctggctaccggcttctaccccgaccatgtggaactgtcttggtgggtcaacggcaaagaggtgcacagcggcgtgtgtaccgacccccagccactgaaagaacagcccgccctgaacgacagccggtactgcctgagcagcagactgagagtgtccgccaccttctggcagaacccccggaaccacttcagatgccaggtgcagttctacggcctgagcgagaacgacgagtggacccaggacagagccaagcccgtgacccagatcgtgtctgccgaagcctggggcagagccgattgcggctttaccagcgagagctaccagcagggcgtgctgagcgccaccatcctgtacgagatcctgctgggcaaggccaccctgtacgccgtgctggtgtctgccctggtgctgatggctatggtcaagcggaaggacagccggggaagggccaagcgatctggatctggagcaacaaacttctcactactcaaacaagcaggtgacgtggaggagaatcccgggcctactagtaccatggactggatttggcgcatccttttccttgtcggcgctgctaccggcgcccattccgggcccgaagtgcaactggttgaatccggtggcggcctggtgcaacccggcggatctctcagacttagctgtgccgcctccggcagaaccttcacaatgggatggtacaggcaggctccagggaaagagagagagttcgtcgccgccatctctctgtctcccacactggcctactacgccgactctgtgaaaggccggttcaccatctccagagataatagcaagaacaccgtggtgctgcaaatgaactctctgagagccgaggatacagccctgtactattgtgccgctgaccggaagtccgtgatgagcatcagacccgattactggggacagggcacactggtcacagtgtctagtggatccggcggcggaggatctggcggaggcggatctgggggcggaggctctttcgaacaagttcagcttcaacagcctggcgctgagctggtcaaacctggcgcttctgtgaagatgagctgcaaagccagcggctacgccttcagcagctactggatcaactggatgaagcagaaacccggccagggactcgaatggatcggccaaatctatcccggcgacggcgacaccaactacaacggcaagttcaagggcagagccacactgaccgccgatacctctagcagcacagcctacatgcagctgagcagcctgaccagcgaagatagcgccgtgtacttctgtgcccggtccatcacaacagtcgtgggctgcgctatggactattggggccagggaacaagcgtgaccgtgtctagtacgcgtatccagaaccctgatcctgccgtgtaccagctgcgggatagcaagagcagcgacaagagcgtgtgtctgttcaccgacttcgacagccagaccaacgtgtcccagagcaaggactccgacgtgtacatcaccgataagtgcgtgctggacatgcggagcatggacttcaagagcaactccgccgtggcctggtccaacaagtccgatttcgcctgcgccaacgccttcaacaacagcattatccccgaggacacattcttcccaagccccgagagcagctgcgacgtgaagctggtggaaaagagcttcgagacagacaccaacctgaacttccagaacctgagcgtgatcggcttcagaatcctgctgctgaaagtggccggctttaacctgctgatgaccctgcggctgtggtccagctaa

SEQ ID NO: 32809 - DNA, 2982 bp, synthetic construct
  source 1..2982: mol_type = other DNA
atggccttaccagtgaccgccttgctcctgccgctggccttgctgctccacgccgccaggccggacatccagatgacacagagccctagcagcctgtctgccagcgtgggagacagagtgaccatcacatgcaaggccagcgaccacatcaacaactggctggcctggtatcagcagaagcctggacaggcccctaagctgctgatctacggcgctaccacactggaaacaggcgtgcccagcagattttctggcagcggctctggcaccgactacaccctgacaatatccagcctccagcctgaggacttcgccacctactactgtcagcagagctggaacaccccttggacattcggccagggcaccaagctggaaatcaagagactcgaggacctgaagaacgtgttcccacctgaggtggccgtgttcgagcctagcgaggccgagatcagccacacccagaaagccaccctcgtgtgcctggctaccggcttctaccccgaccatgtggaactgtcttggtgggtcaacggcaaagaggtgcacagcggcgtgtgtaccgacccccagccactgaaagaacagcccgccctgaacgacagccggtactgcctgagcagcagactgagagtgtccgccaccttctggcagaacccccggaaccacttcagatgccaggtgcagttctacggcctgagcgagaacgacgagtggacccaggacagagccaagcccgtgacccagatcgtgtctgccgaagcctggggcagagccgattgcggctttaccagcgagagctaccagcagggcgtgctgagcgccaccatcctgtacgagatcctgctgggcaaggccaccctgtacgccgtgctggtgtctgccctggtgctgatggctatggtcaagcggaaggacagccggggaagggccaagcgatctggatctggagcaacaaacttctcactactcaaacaagcaggtgacgtggaggagaatcccgggcctactagtaccatggactggatttggcgcatccttttccttgtcggcgctgctaccggcgcccattccgggcccgaagtgcaactggttgaatccggtggcggcctggtgcaacccggcggatctctcagacttagctgtgccgcctccggcagaaccttcacaatgggatggtacaggcaggctccagggaaagagagagagttcgtcgccgccatctctctgtctcccacactggcctactacgccgactctgtgaaaggccggttcaccatctccagagataatagcaagaacaccgtggtgctgcaaatgaactctctgagagccgaggatacagccctgtactattgtgccgctgaccggaagtccgtgatgagcatcagacccgattactggggacagggcacactggtcacagtgtctagtggatccggcggcggaggatctggcggaggcggatctgggggcggaggctctttcgaacaagttcagcttcaacagcctggcgctgagctggtcaaacctggcgcttctgtgaagatgagctgcaaagccagcggctacgccttcagcagctactggatcaactggatgaagcagaaacccggccagggactcgaatggatcggccaaatctatcccggcgacggcgacaccaactacaacggcaagttcaagggcagagccacactgaccgccgatacctctagcagcacagcctacatgcagctgagcagcctgaccagcgaagatagcgccgtgtacttctgtgcccggtccatcacaacagtcgtgggctgcgctatggactattggggccagggaacaagcgtgaccgtgtctagtacgcgtatccagaaccctgatcctgccgtgtaccagctgcgggatagcaagagcagcgacaagagcgtgtgtctgttcaccgacttcgacagccagaccaacgtgtcccagagcaaggactccgacgtgtacatcaccgataagtgcgtgctggacatgcggagcatggacttcaagagcaactccgccgtggcctggtccaacaagtccgatttcgcctgcgccaacgccttcaacaacagcattatccccgaggacacattcttcccaagccccgagagcagctgcgacgtgaagctggtggaaaagagcttcgagacagacaccaacctgaacttccagaacctgagcgtgatcggcttcagaatcctgctgctgaaagtggccggctttaacctgctgatgaccctgcggctgtggtccagccgcgccaagagaagcggatctggcgtgaagcagaccctgaatttcgacctgctgaagctggctggcgacgtggaatccaacccaggcccttctagaggccatatgaccgagtacaagcccacggtgcgcctcgccacccgcgacgacgtccccagggccgtacgcaccctcgccgccgcgttcgccgactaccccgccacgcgccacaccgtcgatccggaccgccacatcgagcgggtcaccgagctgcaagaactcttcctcacgcgcgtcgggctcgacatcggcaaggtgtgggtcgcggacgacggcgccgcggtggcggtctggaccacgccggagagcgtcgaagcgggggcggtgttcgccgagatcggcccgcgcatggccgagttgagcggttcccggctggccgcgcagcaacagatggaaggcctcctggcgccgcaccggcccaaggagcccgcgtggttcctggccaccgtcggcgtctcgcccgaccaccagggcaagggtctgggcagcgccgtcgtgctccccggagtggaggcggccgagcgcgccggggtgcccgccttcctggagacctccgcgccccgcaacctccccttctacgagcggctcggcttcaccgtcaccgccgacgtcgaggtgcccgaaggaccgcgcacctggtgcatgacccgcaagcccggtgcctga

SEQ ID NO: 32810 - DNA, 2280 bp, synthetic construct; identical to SEQ ID NO: 32787
  source 1..2280: mol_type = other DNA

SEQ ID NO: 32811 - DNA, 2295 bp, synthetic construct; identical to SEQ ID NO: 32342
  source 1..2295: mol_type = other DNA

SEQ ID NO: 32812 - DNA, 2280 bp, synthetic construct; identical to SEQ ID NO: 32789
  source 1..2280: mol_type = other DNA

SEQ ID NO: 32813 - DNA, 2277 bp, synthetic construct
  source 1..2277: mol_type = other DNA
atggccttaccagtgaccgccttgctcctgccgctggccttgctgctccacgccgccaggccggacatccagatgacacagagccctagcagcctgtctgccagcgtgggagacagagtgaccatcacctgtagagccagccaggacatcagcagctacctgaactggtatcagcagaagcccggcaaggcccctaagctgctgatctactacaccagcagactgcacagcggcgtgcccagcagattttctggctctggcagcggcaccgacttcaccctgacaatatctagcctccagcctgaggacttcgccacctactattgccagcagggcaacaccctgccttacacatttggacagggcaccaaggtggaaatcaagagactcgaggacctgaagaacgtgttcccacctgaggtggccgtgttcgagcctagcgaggccgagatcagccacacccagaaagccaccctcgtgtgcctggctaccggcttctaccccgaccatgtggaactgtcttggtgggtcaacggcaaagaggtgcacagcggcgtgtgtaccgacccccagccactgaaagaacagcccgccctgaacgacagccggtactgcctgagcagcagactgagagtgtccgccaccttctggcagaacccccggaaccacttcagatgccaggtgcagttctacggcctgagcgagaacgacgagtggacccaggacagagccaagcccgtgacccagatcgtgtctgccgaagcctggggcagagccgattgcggctttaccagcgagagctaccagcagggcgtgctgagcgccaccatcctgtacgagatcctgctgggcaaggccaccctgtacgccgtgctggtgtctgccctggtgctgatggctatggtcaagcggaaggacagccggggaagggccaagcgatctggatctggagcaacaaacttctcactactcaaacaagcaggtgacgtggaggagaatcccgggcctactagtgccaccatggactggatttggcgcatccttttccttgtcggcgctgctaccggcgcccattccgggcccgaagttcagctgcaagagtctggcggaggactggttcaggctggcgatagcctgagactgtcttgtgccgcttctggcagagccgtgtccagcctgtttatgggctggtttcggagagcccctggcaaagagagagaactggttgccgccatcagccggtacagcctgtacacctactacgccgacagcgtgaagggcagattcaccatcagcgccgacaacgccaagaacgccgtgtacctccagatgaacagcctgaagcctgaggacacagccgtgtactactgcgccagcaaacttgagtacaccagcaacgactacgacagctggggccagggaacccaagtgacagtctcttctggatccggcggcggaggatctggcggaggcggatctgggggcggaggctctttcgaagtgcagctggttgaatcaggtggcggcctggttcaacctggcggatctctgagactgagctgtgccgccagcggctacaccttcagcgactactttatgagctgggtccgacaggcccctggcaaaggacttgaatgggtcgccaccatcagcaatggcggcacctacacttactaccccgacagcgtgaagggcagattcaccatctccagagacaacagcaagaacaccctgtacctccagatgaactccctgagagccgaggacaccgccgtgtactactgcgccagattcgacggctacatcttcgactattggggccagggcaccctggtcacagtctcttctacgcgtatccagaaccctgatcctgccgtgtaccagctgcgggatagcaagagcagcgacaagagcgtgtgtctgttcaccgacttcgacagccagaccaacgtgtcccagagcaaggactccgacgtgtacatcaccgataagtgcgtgctggacatgcggagcatggacttcaagagcaactccgccgtggcctggtccaacaagtccgatttcgcctgcgccaacgccttcaacaacagcattatccccgaggacacattcttcccaagccccgagagcagctgcgacgtgaagctggtggaaaagagcttcgagacagacaccaacctgaacttccagaacctgagcgtgatcggcttcagaatcctgctgctgaaagtggccggctttaacctgctgatgaccctgcggctgtggtccagctaa

SEQ ID NO: 32814 - DNA, 2055 bp, synthetic construct
  source 1..2055: mol_type = other DNA
atggccttaccagtgaccgccttgctcctgccgctggccttgctgctccacgccgccaggccgagctacgtgctgacacagcctccatccgtgtctgtggctccaggacagaccgccagaatcacatgcggcggcaacaacatcggcggcaagagcgtgcactggtatcagcagccacctggacaggctccagtggtggtggtgtacgacgacagcgatagacctagcggcatccccgagagattcagcggcagcaattccggcaataccgccacactgaccatcagcagagtggaagctggcgacgaggccgtgtactactgccaagtgtgggacagcagcagcgatcacgtggtgtttggcggcggaacaaagctgacagtgcttctcgagggacagcctaaggccaatcctaccgtgacactgttccctccaagcagcgaagaactccaggccaacaaggccacacttgtgtgcctgatctccgacttctaccctggggctgtgacagtggcttggaaggccgatggatctcctgtgaaagccggcgtggaaaccaccaagccatccaagcagagcaacaacaaatacgccgccagctcctacctgagcctgacacctgagcagtggaagtcccacagatcctacagctgccaagtgacccacgaaggcagcaccgtggaaaagacagtggcccctacagagtgcagcggatcccccatcaagaccgatgtgattacaatggaccccaaggacaactgctccaaggacgccaacgataccctgctgctccagctgaccaacaccagcgcctactacatgtacttgttgctgctgctgaagtccgtggtgtacttcgccatcatcacatgctgcctgctgcggagaaccgccttctgctgcaacggcgagaagtctagggccaagcgatctggatctggagcaacaaacttctcactactcaaacaagcaggtgacgtggaggagaatcccgggcctactagtatggactggatttggcgcatccttttccttgtcggcgctgctaccggcgcgcattccttcgaacaagttcagcttcaacagcctggcgctgagctggtcaaacctggcgcttctgtgaagatgagctgcaaagccagcggctacgccttcagcagctactggatcaactggatgaagcagaaacccggccagggactcgaatggatcggccaaatctatcccggcgacggcgacaccaactacaacggcaagttcaagggcagagccacactgaccgccgatacctctagcagcacagcctacatgcagctgagcagcctgaccagcgaagatagcgccgtgtacttctgtgcccggtccatcacaacagtcgtgggctgcgctatggactattggggccagggaacaagcgtgaccgtgtctagtacgcgtgcgtccactaagggtccgtcagtcttcccgctggcgccctgttcccgcagcacgagtgaatctaccgccgcccttgggtgcttggtaaaagactattttcctgagcccgttacagtatcatggaacagcggggctctgactagcggggtgcatacgttccctgcggttctgcaatctagcggactgtattctctctccagtgttgtgaccgtgccaagctccagcctcggtactaaaacttatacatgtaatgtggatcataaaccttcaaataccaaggttgacaaaagggtagagagtaagtacggtggtaccgaagtgaaaaccgactccaccgaccacgtgaagcccaaagagacagagaacaccaagcagcccagcaagagctgccacaagcccaaggccatcgtgcacaccgagaaagtgaacatgatgagcctgaccgtgctgggcctgcggatgctgttcgccaaaaccgtggccgtgaacttcctgctgaccgccaagctgttcttcctccgcgccaagagaagcggatctggcgtgaagcagaccctgaatttcgacctgctgaagctggctggcgacgtggaatccaacccaggcccttctagataa

SEQ ID NO: 32815 - DNA, 2466 bp, synthetic construct
  source 1..2466: mol_type = other DNA
atggccttaccagtgaccgccttgctcctgccgctggccttgctgctccacgccgccaggccggaagtgcagctggttgaatctggcggaggactggttcaggctggcggatctctgagactgtcttgtgccgccagcggcagaacctttagcatgggctggtttagacaggcccctggcaaagagagagagttcgtcgccgccatcacatactctggcggcagcccttactacgccgactctgtgaagggcagattcaccatcagccgggacaacgccaagaacaccgtgtacctccagatgaacagcctgaagcctgaggacaccgccgtgtactactgcgccgccaatccaacatacggcagcgactggaacgccgagaattggggccagggaacccaagtgacagtgtctagcggtaccggcggaggcggatctggcggcggaggtagcggtggcggaggatctgaattcgacatccagatgacacagagccctagcagcctgtctgccagcgtgggagacagagtgaccatcacatgcaaggccagcgaccacatcaacaactggctggcctggtatcagcagaagcctggacaggcccctaagctgctgatctacggcgctaccacactggaaacaggcgtgcccagcagattttctggcagcggctctggcaccgactacaccctgacaatatccagcctccagcctgaggacttcgccacctactactgtcagcagagctggaacaccccttggacattcggccagggcaccaagctggaaatcaagagactcgagggacagcctaaggccaatcctaccgtgacactgttccctccaagcagcgaagaactccaggccaacaaggccacacttgtgtgcctgatctccgacttctaccctggggctgtgacagtggcttggaaggccgatggatctcctgtgaaagccggcgtggaaaccaccaagccatccaagcagagcaacaacaaatacgccgccagctcctacctgagcctgacacctgagcagtggaagtcccacagatcctacagctgccaagtgacccacgaaggcagcaccgtggaaaagacagtggcccctacagagtgcagcggatcccccatcaagaccgatgtgattacaatggaccccaaggacaactgctccaaggacgccaacgataccctgctgctccagctgaccaacaccagcgcctactacatgtacttgttgctgctgctgaagtccgtggtgtacttcgccatcatcacatgctgcctgctgcggagaaccgccttctgctgcaacggcgagaagtctagggccaagcgatctggatctggagcaacaaacttctcactactcaaacaagcaggtgacgtggaggagaatcccgggcctactagtatggactggatttggcgcatccttttccttgtcggcgctgctaccggcgcgcattccttcgaacaagttcagcttcaacagcctggcgctgagctggtcaaacctggcgcttctgtgaagatgagctgcaaagccagcggctacgccttcagcagctactggatcaactggatgaagcagaaacccggccagggactcgaatggatcggccaaatctatcccggcgacggcgacaccaactacaacggcaagttcaagggcagagccacactgaccgccgatacctctagcagcacagcctacatgcagctgagcagcctgaccagcgaagatagcgccgtgtacttctgtgcccggtccatcacaacagtcgtgggctgcgctatggactattggggccagggaacaagcgtgaccgtgtctagtacgcgtgcgtccactaagggtccgtcagtcttcccgctggcgccctgttcccgcagcacgagtgaatctaccgccgcccttgggtgcttggtaaaagactattttcctgagcccgttacagtatcatggaacagcggggctctgactagcggggtgcatacgttccctgcggttctgcaatctagcggactgtattctctctccagtgttgtgaccgtgccaagctccagcctcggtactaaaacttatacatgtaatgtggatcataaaccttcaaataccaaggttgacaaaagggtagagagtaagtacggtggtaccgaagtgaaaaccgactccaccgaccacgtgaagcccaaagagacagagaacaccaagcagcccagcaagagctgccacaagcccaaggccatcgtgcacaccgagaaagtgaacatgatgagcctgaccgtgctgggcctgcggatgctgttcgccaaaaccgtggccgtgaacttcctgctgaccgccaagctgttcttcctccgcgccaagagaagcggatctggcgtgaagcagaccctgaatttcgacctgctgaagctggctggcgacgtggaatccaacccaggcccttctagataa

SEQ ID NO: 32816 - DNA, 2511 bp, synthetic construct
  source 1..2511: mol_type = other DNA
atggccttaccagtgaccgccttgctcctgccgctggccttgctgctccacgccgccaggccggaagtgcagctggttgaatctggcggaggactggttcaggctggcggatctctgagactgtcttgtgccgccagcggcagaacctttagcatgggctggtttagacaggcccctggcaaagagagagagttcgtcgccgccatcacatactctggcggcagcccttactacgccgactctgtgaagggcagattcaccatcagccgggacaacgccaagaacaccgtgtacctccagatgaacagcctgaagcctgaggacaccgccgtgtactactgcgccgccaatccaacatacggcagcgactggaacgccgagaattggggccagggaacccaagtgacagtgtctagcggtaccggcggaggcggatctggcggcggaggtagcggtggcggaggatctgaattcgacatccagatgacacagagccctagcagcctgtctgccagcgtgggagacagagtgaccatcacatgcaaggccagcgaccacatcaacaactggctggcctggtatcagcagaagcctggacaggcccctaagctgctgatctacggcgctaccacactggaaacaggcgtgcccagcagattttctggcagcggctctggcaccgactacaccctgacaatatccagcctccagcctgaggacttcgccacctactactgtcagcagagctggaacaccccttggacattcggccagggcaccaagctggaaatcaagagactcgaggacctgaagaacgtgttcccacctgaggtggccgtgttcgagcctagcgaggccgagatcagccacacccagaaagccaccctcgtgtgcctggctaccggcttctaccccgaccatgtggaactgtcttggtgggtcaacggcaaagaggtgcacagcggcgtgtctaccgacccccagccactgaaagaacagcccgccctgaacgacagccggtactgcctgagcagcagactgagagtgtccgccaccttctggcagaacccccggaaccacttcagatgccaggtgcagttctacggcctgagcgagaacgacgagtggacccaggacagagccaagcccgtgacccagatcgtgtctgccgaagcctggggcagagccgattgcggatcccccatcaagaccgatgtgattacaatggaccccaaggacaactgctccaaggacgccaacgataccctgctgctccagctgaccaacaccagcgcctactacatgtacttgttgctgctgctgaagtccgtggtgtacttcgccatcatcacatgctgcctgctgcggagaaccgccttctgctgcaacggcgagaagtctagggccaagcgatctggatctggagcaacaaacttctcactactcaaacaagcaggtgacgtggaggagaatcccgggcctactagtatggactggatttggcgcatccttttccttgtcggcgctgctaccggcgcgcattccttcgaacaagttcagcttcaacagcctggcgctgagctggtcaaacctggcgcttctgtgaagatgagctgcaaagccagcggctacgccttcagcagctactggatcaactggatgaagcagaaacccggccagggactcgaatggatcggccaaatctatcccggcgacggcgacaccaactacaacggcaagttcaagggcagagccacactgaccgccgatacctctagcagcacagcctacatgcagctgagcagcctgaccagcgaagatagcgccgtgtacttctgtgcccggtccatcacaacagtcgtgggctgcgctatggactattggggccagggaacaagcgtgaccgtgtctagtacgcgtatccagaaccctgatcctgccgtgtaccagctgcgggatagcaagagcagcgacaagagcgtgtgtctgttcaccgacttcgacagccagaccaacgtgtcccagagcaaggactccgacgtgtacatcaccgataagaccgtgctggacatgcggagcatggacttcaagagcaactccgccgtggcctggtccaacaagtccgatttcgcctgcgccaacgccttcaacaacagcattatccccgaggacacattcttcccaagccccgagagcagctgcggtaccgaagtgaaaaccgactccaccgaccacgtgaagcccaaagagacagagaacaccaagcagcccagcaagagctgccacaagcccaaggccatcgtgcacaccgagaaagtgaacatgatgagcctgaccgtgctgggcctgcggatgctgttcgccaaaaccgtggccgtgaacttcctgctgaccgccaagctgttcttcctccgcgccaagagaagcggatctggcgtgaagcagaccctgaatttcgacctgctgaagctggctggcgacgtggaatccaacccaggcccttctagataa

SEQ ID NO: 32817 - DNA, 2421 bp, synthetic construct
  source 1..2421: mol_type = other DNA
atggccttaccagtgaccgccttgctcctgccgctggccttgctgctccacgccgccaggccggaagtgcagctggttgaatctggcggaggactggttcaggctggcggatctctgagactgtcttgtgccgccagcggcagaacctttagcatgggctggtttagacaggcccctggcaaagagagagagttcgtcgccgccatcacatactctggcggcagcccttactacgccgactctgtgaagggcagattcaccatcagccgggacaacgccaagaacaccgtgtacctccagatgaacagcctgaagcctgaggacaccgccgtgtactactgcgccgccaatccaacatacggcagcgactggaacgccgagaattggggccagggaacccaagtgacagtgtctagcggtaccggcggaggcggatctggcggcggaggtagcggtggcggaggatctgaattcgacatccagatgacacagagccctagcagcctgtctgccagcgtgggagacagagtgaccatcacatgcaaggccagcgaccacatcaacaactggctggcctggtatcagcagaagcctggacaggcccctaagctgctgatctacggcgctaccacactggaaacaggcgtgcccagcagattttctggcagcggctctggcaccgactacaccctgacaatatccagcctccagcctgaggacttcgccacctactactgtcagcagagctggaacaccccttggacattcggccagggcaccaagctggaaatcaagagactcgagggacagcctaaggccaatcctaccgtgacactgttccctccaagcagcgaagaactccaggccaacaaggccacacttgtgtgcctgatctccgacttctaccctggggctgtgacagtggcttggaaggccgatggatctcctgtgaaagccggcgtggaaaccaccaagccatccaagcagagcaacaacaaatacgccgccagctcctacctgagcctgacacctgagcagtggaagtcccacagatcctacagctgccaagtgacccacgaaggcagcaccgtggaaaagacagtggcccctacagagtgcagcggatcctccaaggacgccaacgataccctgctgctccagctgaccaacaccagcgcctactacatgtacttgttgctgctgctgaagtccgtggtgtacttcgccatcatcacatgctgcctgctgcggagaaccgccttctgctgcaacggcgagaagtctagggccaagcgatctggatctggagcaacaaacttctcactactcaaacaagcaggtgacgtggaggagaatcccgggcctactagtatggactggatttggcgcatccttttccttgtcggcgctgctaccggcgcgcattccttcgaacaagttcagcttcaacagcctggcgctgagctggtcaaacctggcgcttctgtgaagatgagctgcaaagccagcggctacgccttcagcagctactggatcaactggatgaagcagaaacccggccagggactcgaatggatcggccaaatctatcccggcgacggcgacaccaactacaacggcaagttcaagggcagagccacactgaccgccgatacctctagcagcacagcctacatgcagctgagcagcctgaccagcgaagatagcgccgtgtacttctgtgcccggtccatcacaacagtcgtgggctgcgctatggactattggggccagggaacaagcgtgaccgtgtctagtacgcgtgcgtccactaagggtccgtcagtcttcccgctggcgccctgttcccgcagcacgagtgaatctaccgccgcccttgggtgcttggtaaaagactattttcctgagcccgttacagtatcatggaacagcggggctctgactagcggggtgcatacgttccctgcggttctgcaatctagcggactgtattctctctccagtgttgtgaccgtgccaagctccagcctcggtactaaaacttatacatgtaatgtggatcataaaccttcaaataccaaggttgacaaaagggtagagagtaagtacggtggtaccgaagtgaaaaccgactccaccgaccacgtgaagcccaaagagacagagaacaccaagcagcccagcaagagctgccacaagcccaaggccatcgtgcacaccgagaaagtgaacatgatgagcctgaccgtgctgggcctgcggatgctgttcgccaaaaccgtggccgtgaacttcctgctgaccgccaagctgttcttcctccgcgccaagagaagcggatctggcgtgaagcagaccctgaatttcgacctgctgaagctggctggcgacgtggaatccaacccaggcccttctagataa

SEQ ID NO: 32818 - DNA, 2382 bp, synthetic construct
  source 1..2382: mol_type = other DNA
atggccttaccagtgaccgccttgctcctgccgctggccttgctgctccacgccgccaggccgatgctgcccgctcctaagaatctggtggtgtccagaatcaccgaggacagcgccagactgtcttggacagctcctgatgccgccttcgacagcttccccatccggtacatcgagacactgatctggggcgaagccatctggctggatgtgcctggaagcgagagaagctacgacctgaccggactgaagcctggcacagagtatgccgtggtcatcaccggcgtgaaaggcggcagattctctagccctctggtggcctctttcaccaccggtaccggcggaggcggatctggcggcggaggtagcggtggcggaggatctgaattcgacatccagatgacacagagccctagcagcctgtctgccagcgtgggagacagagtgaccatcacatgcaaggccagcgaccacatcaacaactggctggcctggtatcagcagaagcctggacaggcccctaagctgctgatctacggcgctaccacactggaaacaggcgtgcccagcagattttctggcagcggctctggcaccgactacaccctgacaatatccagcctccagcctgaggacttcgccacctactactgtcagcagagctggaacaccccttggacattcggccagggcaccaagctggaaatcaagagactcgagggacagcctaaggccaatcctaccgtgacactgttccctccaagcagcgaagaactccaggccaacaaggccacacttgtgtgcctgatctccgacttctaccctggggctgtgacagtggcttggaaggccgatggatctcctgtgaaagccggcgtggaaaccaccaagccatccaagcagagcaacaacaaatacgccgccagctcctacctgagcctgacacctgagcagtggaagtcccacagatcctacagctgccaagtgacccacgaaggcagcaccgtggaaaagacagtggcccctacagagtgcagcggatcccccatcaagaccgatgtgattacaatggaccccaaggacaactgctccaaggacgccaacgataccctgctgctccagctgaccaacaccagcgcctactacatgtacttgttgctgctgctgaagtccgtggtgtacttcgccatcatcacatgctgcctgctgcggagaaccgccttctgctgcaacggcgagaagtctagggccaagcgatctggatctggagcaacaaacttctcactactcaaacaagcaggtgacgtggaggagaatcccgggcctactagtatggactggatttggcgcatccttttccttgtcggcgctgctaccggcgcgcattccttcgaacaagttcagcttcaacagcctggcgctgagctggtcaaacctggcgcttctgtgaagatgagctgcaaagccagcggctacgccttcagcagctactggatcaactggatgaagcagaaacccggccagggactcgaatggatcggccaaatctatcccggcgacggcgacaccaactacaacggcaagttcaagggcagagccacactgaccgccgatacctctagcagcacagcctacatgcagctgagcagcctgaccagcgaagatagcgccgtgtacttctgtgcccggtccatcacaacagtcgtgggctgcgctatggactattggggccagggaacaagcgtgaccgtgtctagtacgcgtgcgtccactaagggtccgtcagtcttcccgctggcgccctgttcccgcagcacgagtgaatctaccgccgcccttgggtgcttggtaaaagactattttcctgagcccgttacagtatcatggaacagcggggctctgactagcggggtgcatacgttccctgcggttctgcaatctagcggactgtattctctctccagtgttgtgaccgtgccaagctccagcctcggtactaaaacttatacatgtaatgtggatcataaaccttcaaataccaaggttgacaaaagggtagagagtaagtacggtggtaccgaagtgaaaaccgactccaccgaccacgtgaagcccaaagagacagagaacaccaagcagcccagcaagagctgccacaagcccaaggccatcgtgcacaccgagaaagtgaacatgatgagcctgaccgtgctgggcctgcggatgctgttcgccaaaaccgtggccgtgaacttcctgctgaccgccaagctgttcttcctccgcgccaagagaagcggatctggcgtgaagcagaccctgaatttcgacctgctgaagctggctggcgacgtggaatccaacccaggcccttctagataa

SEQ ID NO: 32819 - DNA, 2382 bp, synthetic construct
  source 1..2382: mol_type = other DNA
atggccttaccagtgaccgccttgctcctgccgctggccttgctgctccacgccgccaggccgatgctgcccgctcctaagaatctggtggtgtccagaatcaccgaggacagcgccagactgtcttggacagctcctgatgccgccttcgacagcttccccatccggtacatcgagacactgatctggggcgaagccatctggctggatgtgcctggaagcgagagaagctacgacctgaccggactgaagcctggcacagagtatgccgtggtcatcaccggcgtgaaaggcggcagattctctagccctctggtggcctctttcaccaccggtaccggcggaggcggatctggcggcggaggtagcggtggcggaggatctgaattcgacatccagatgacacagagccctagcagcctgtctgccagcgtgggagacagagtgaccatcacatgcaaggccagcgaccacatcaacaactggctggcctggtatcagcagaagcctggacaggcccctaagctgctgatctacggcgctaccacactggaaacaggcgtgcccagcagattttctggcagcggctctggcaccgactacaccctgacaatatccagcctccagcctgaggacttcgccacctactactgtcagcagagctggaacaccccttggacattcggccagggcaccaagctggaaatcaagagactcgaggacctgaagaacgtgttcccacctgaggtggccgtgttcgagcctagcgaggccgagatcagccacacccagaaagccaccctcgtgtgcctggctaccggcttctaccccgaccatgtggaactgtcttggtgggtcaacggcaaagaggtgcacagcggcgtgtctaccgacccccagccactgaaagaacagcccgccctgaacgacagccggtactgcctgagcagcagactgagagtgtccgccaccttctggcagaacccccggaaccacttcagatgccaggtgcagttctacggcctgagcgagaacgacgagtggacccaggacagagccaagcccgtgacccagatcgtgtctgccgaagcctggggcagagccgattgcggatcctccaaggacgccaacgataccctgctgctccagctgaccaacaccagcgcctactacatgtacttgttgctgctgctgaagtccgtggtgtacttcgccatcatcacatgctgcctgctgcggagaaccgccttctgctgcaacggcgagaagtctagggccaagcgatctggatctggagcaacaaacttctcactactcaaacaagcaggtgacgtggaggagaatcccgggcctactagtatggactggatttggcgcatccttttccttgtcggcgctgctaccggcgcgcattccttcgaacaagttcagcttcaacagcctggcgctgagctggtcaaacctggcgcttctgtgaagatgagctgcaaagccagcggctacgccttcagcagctactggatcaactggatgaagcagaaacccggccagggactcgaatggatcggccaaatctatcccggcgacggcgacaccaactacaacggcaagttcaagggcagagccacactgaccgccgatacctctagcagcacagcctacatgcagctgagcagcctgaccagcgaagatagcgccgtgtacttctgtgcccggtccatcacaacagtcgtgggctgcgctatggactattggggccagggaacaagcgtgaccgtgtctagtacgcgtatccagaaccctgatcctgccgtgtaccagctgcgggatagcaagagcagcgacaagagcgtgtgtctgttcaccgacttcgacagccagaccaacgtgtcccagagcaaggactccgacgtgtacatcaccgataagaccgtgctggacatgcggagcatggacttcaagagcaactccgccgtggcctggtccaacaagtccgatttcgcctgcgccaacgccttcaacaacagcattatccccgaggacacattcttcccaagccccgagagcagctgcggtaccgaagtgaaaaccgactccaccgaccacgtgaagcccaaagagacagagaacaccaagcagcccagcaagagctgccacaagcccaaggccatcgtgcacaccgagaaagtgaacatgatgagcctgaccgtgctgggcctgcggatgctgttcgccaaaaccgtggccgtgaacttcctgctgaccgccaagctgttcttcctccgcgccaagagaagcggatctggcgtgaagcagaccctgaatttcgacctgctgaagctggctggcgacgtggaatccaacccaggcccttctagataa

SEQ ID NO: 32820 - DNA, 2427 bp, synthetic construct
  source 1..2427: mol_type = other DNA
atggccttaccagtgaccgccttgctcctgccgctggccttgctgctccacgccgccaggccgatgctgcccgctcctaagaatctggtggtgtccagaatcaccgaggacagcgccagactgtcttggacagctcctgatgccgccttcgacagcttccccatccggtacatcgagacactgatctggggcgaagccatctggctggatgtgcctggaagcgagagaagctacgacctgaccggactgaagcctggcacagagtatgccgtggtcatcaccggcgtgaaaggcggcagattctctagccctctggtggcctctttcaccaccggtaccggcggaggcggatctggcggcggaggtagcggtggcggaggatctgaattcgacatccagatgacacagagccctagcagcctgtctgccagcgtgggagacagagtgaccatcacatgcaaggccagcgaccacatcaacaactggctggcctggtatcagcagaagcctggacaggcccctaagctgctgatctacggcgctaccacactggaaacaggcgtgcccagcagattttctggcagcggctctggcaccgactacaccctgacaatatccagcctccagcctgaggacttcgccacctactactgtcagcagagctggaacaccccttggacattcggccagggcaccaagctggaaatcaagagactcgaggacctgaagaacgtgttcccacctgaggtggccgtgttcgagcctagcgaggccgagatcagccacacccagaaagccaccctcgtgtgcctggctaccggcttctaccccgaccatgtggaactgtcttggtgggtcaacggcaaagaggtgcacagcggcgtgtctaccgacccccagccactgaaagaacagcccgccctgaacgacagccggtactgcctgagcagcagactgagagtgtccgccaccttctggcagaacccccggaaccacttcagatgccaggtgcagttctacggcctgagcgagaacgacgagtggacccaggacagagccaagcccgtgacccagatcgtgtctgccgaagcctggggcagagccgattgcggatcccccatcaagaccgatgtgattacaatggaccccaaggacaactgctccaaggacgccaacgataccctgctgctccagctgaccaacaccagcgcctactacatgtacttgttgctgctgctgaagtccgtggtgtacttcgccatcatcacatgctgcctgctgcggagaaccgccttctgctgcaacggcgagaagtctagggccaagcgatctggatctggagcaacaaacttctcactactcaaacaagcaggtgacgtggaggagaatcccgggcctactagtatggactggatttggcgcatccttttccttgtcggcgctgctaccggcgcgcattccttcgaacaagttcagcttcaacagcctggcgctgagctggtcaaacctggcgcttctgtgaagatgagctgcaaagccagcggctacgccttcagcagctactggatcaactggatgaagcagaaacccggccagggactcgaatggatcggccaaatctatcccggcgacggcgacaccaactacaacggcaagttcaagggcagagccacactgaccgccgatacctctagcagcacagcctacatgcagctgagcagcctgaccagcgaagatagcgccgtgtacttctgtgcccggtccatcacaacagtcgtgggctgcgctatggactattggggccagggaacaagcgtgaccgtgtctagtacgcgtatccagaaccctgatcctgccgtgtaccagctgcgggatagcaagagcagcgacaagagcgtgtgtctgttcaccgacttcgacagccagaccaacgtgtcccagagcaaggactccgacgtgtacatcaccgataagaccgtgctggacatgcggagcatggacttcaagagcaactccgccgtggcctggtccaacaagtccgatttcgcctgcgccaacgccttcaacaacagcattatccccgaggacacattcttcccaagccccgagagcagctgcggtaccgaagtgaaaaccgactccaccgaccacgtgaagcccaaagagacagagaacaccaagcagcccagcaagagctgccacaagcccaaggccatcgtgcacaccgagaaagtgaacatgatgagcctgaccgtgctgggcctgcggatgctgttcgccaaaaccgtggccgtgaacttcctgctgaccgccaagctgttcttcctccgcgccaagagaagcggatctggcgtgaagcagaccctgaatttcgacctgctgaagctggctggcgacgtggaatccaacccaggcccttctagataa

SEQ ID NO: 32821 - DNA, 2337 bp, synthetic construct
  source 1..2337: mol_type = other DNA
atggccttaccagtgaccgccttgctcctgccgctggccttgctgctccacgccgccaggccgatgctgcccgctcctaagaatctggtggtgtccagaatcaccgaggacagcgccagactgtcttggacagctcctgatgccgccttcgacagcttccccatccggtacatcgagacactgatctggggcgaagccatctggctggatgtgcctggaagcgagagaagctacgacctgaccggactgaagcctggcacagagtatgccgtggtcatcaccggcgtgaaaggcggcagattctctagccctctggtggcctctttcaccaccggtaccggcggaggcggatctggcggcggaggtagcggtggcggaggatctgaattcgacatccagatgacacagagccctagcagcctgtctgccagcgtgggagacagagtgaccatcacatgcaaggccagcgaccacatcaacaactggctggcctggtatcagcagaagcctggacaggcccctaagctgctgatctacggcgctaccacactggaaacaggcgtgcccagcagattttctggcagcggctctggcaccgactacaccctgacaatatccagcctccagcctgaggacttcgccacctactactgtcagcagagctggaacaccccttggacattcggccagggcaccaagctggaaatcaagagactcgagggacagcctaaggccaatcctaccgtgacactgttccctccaagcagcgaagaactccaggccaacaaggccacacttgtgtgcctgatctccgacttctaccctggggctgtgacagtggcttggaaggccgatggatctcctgtgaaagccggcgtggaaaccaccaagccatccaagcagagcaacaacaaatacgccgccagctcctacctgagcctgacacctgagcagtggaagtcccacagatcctacagctgccaagtgacccacgaaggcagcaccgtggaaaagacagtggcccctacagagtgcagcggatcctccaaggacgccaacgataccctgctgctccagctgaccaacaccagcgcctactacatgtacttgttgctgctgctgaagtccgtggtgtacttcgccatcatcacatgctgcctgctgcggagaaccgccttctgctgcaacggcgagaagtctagggccaagcgatctggatctggagcaacaaacttctcactactcaaacaagcaggtgacgtggaggagaatcccgggcctactagtatggactggatttggcgcatccttttccttgtcggcgctgctaccggcgcgcattccttcgaacaagttcagcttcaacagcctggcgctgagctggtcaaacctggcgcttctgtgaagatgagctgcaaagccagcggctacgccttcagcagctactggatcaactggatgaagcagaaacccggccagggactcgaatggatcggccaaatctatcccggcgacggcgacaccaactacaacggcaagttcaagggcagagccacactgaccgccgatacctctagcagcacagcctacatgcagctgagcagcctgaccagcgaagatagcgccgtgtacttctgtgcccggtccatcacaacagtcgtgggctgcgctatggactattggggccagggaacaagcgtgaccgtgtctagtacgcgtgcgtccactaagggtccgtcagtcttcccgctggcgccctgttcccgcagcacgagtgaatctaccgccgcccttgggtgcttggtaaaagactattttcctgagcccgttacagtatcatggaacagcggggctctgactagcggggtgcatacgttccctgcggttctgcaatctagcggactgtattctctctccagtgttgtgaccgtgccaagctccagcctcggtactaaaacttatacatgtaatgtggatcataaaccttcaaataccaaggttgacaaaagggtagagagtaagtacggtggtaccgaagtgaaaaccgactccaccgaccacgtgaagcccaaagagacagagaacaccaagcagcccagcaagagctgccacaagcccaaggccatcgtgcacaccgagaaagtgaacatgatgagcctgaccgtgctgggcctgcggatgctgttcgccaaaaccgtggccgtgaacttcctgctgaccgccaagctgttcttcctccgcgccaagagaagcggatctggcgtgaagcagaccctgaatttcgacctgctgaagctggctggcgacgtggaatccaacccaggcccttctagataa

SEQ ID NO: 32822 - DNA, 2466 bp, synthetic construct
  source 1..2466: mol_type = other DNA
atggccttaccagtgaccgccttgctcctgccgctggccttgctgctccacgccgccaggccggaagtgcagctggttgaatctggcggaggactggttcaggctggcggatctctgagactgtcttgtgccgccagcggcagaacctttagcatgggctggtttagacaggcccctggcaaagagagagagttcgtcgccgccatcacatactctggcggcagcccttactacgccgactctgtgaagggcagattcaccatcagccgggacaacgccaagaacaccgtgtacctccagatgaacagcctgaagcctgaggacaccgccgtgtactactgcgccgccaatccaacatacggcagcgactggaacgccgagaattggggccagggaacccaagtgacagtgtctagcggtaccggcggaggcggatctggcggcggaggtagcggtggcggaggatctgaattcgacatccagatgacacagagccctagcagcctgtctgccagcgtgggagacagagtgaccatcacatgcaaggccagcgaccacatcaacaactggctggcctggtatcagcagaagcctggacaggcccctaagctgctgatctacggcgctaccacactggaaacaggcgtgcccagcagattttctggcagcggctctggcaccgactacaccctgacaatatccagcctccagcctgaggacttcgccacctactactgtcagcagagctggaacaccccttggacattcggccagggcaccaagctggaaatcaagagactcgaggacctgaagaacgtgttcccacctgaggtggccgtgttcgagcctagcgaggccgagatcagccacacccagaaagccaccctcgtgtgcctggctaccggcttctaccccgaccatgtggaactgtcttggtgggtcaacggcaaagaggtgcacagcggcgtgtctaccgacccccagccactgaaagaacagcccgccctgaacgacagccggtactgcctgagcagcagactgagagtgtccgccaccttctggcagaacccccggaaccacttcagatgccaggtgcagttctacggcctgagcgagaacgacgagtggacccaggacagagccaagcccgtgacccagatcgtgtctgccgaagcctggggcagagccgattgcggatcctccaaggacgccaacgataccctgctgctccagctgaccaacaccagcgcctactacatgtacttgttgctgctgctgaagtccgtggtgtacttcgccatcatcacatgctgcctgctgcggagaaccgccttctgctgcaacggcgagaagtctagggccaagcgatctggatctggagcaacaaacttctcactactcaaacaagcaggtgacgtggaggagaatcccgggcctactagtatggactggatttggcgcatccttttccttgtcggcgctgctaccggcgcgcattccttcgaacaagttcagcttcaacagcctggcgctgagctggtcaaacctggcgcttctgtgaagatgagctgcaaagccagcggctacgccttcagcagctactggatcaactggatgaagcagaaacccggccagggactcgaatggatcggccaaatctatcccggcgacggcgacaccaactacaacggcaagttcaagggcagagccacactgaccgccgatacctctagcagcacagcctacatgcagctgagcagcctgaccagcgaagatagcgccgtgtacttctgtgcccggtccatcacaacagtcgtgggctgcgctatggactattggggccagggaacaagcgtgaccgtgtctagtacgcgtatccagaaccctgatcctgccgtgtaccagctgcgggatagcaagagcagcgacaagagcgtgtgtctgttcaccgacttcgacagccagaccaacgtgtcccagagcaaggactccgacgtgtacatcaccgataagaccgtgctggacatgcggagcatggacttcaagagcaactccgccgtggcctggtccaacaagtccgatttcgcctgcgccaacgccttcaacaacagcattatccccgaggacacattcttcccaagccccgagagcagctgcggtaccgaagtgaaaaccgactccaccgaccacgtgaagcccaaagagacagagaacaccaagcagcccagcaagagctgccacaagcccaaggccatcgtgcacaccgagaaagtgaacatgatgagcctgaccgtgctgggcctgcggatgctgttcgccaaaaccgtggccgtgaacttcctgctgaccgccaagctgttcttcctccgcgccaagagaagcggatctggcgtgaagcagaccctgaatttcgacctgctgaagctggctggcgacgtggaatccaacccaggcccttctagataa

SEQ ID NO: 32823 - DNA, 2466 bp, synthetic construct; identical to SEQ ID NO: 32822
  source 1..2466: mol_type = other DNA

SEQ ID NO: 32824 - DNA, 2562 bp, synthetic construct
  source 1..2562: mol_type = other DNA
atggccttaccagtgaccgccttgctcctgccgctggccttgctgctccacgccgccaggccggacatcgtgatgacccagacccccctgaccctgagcgtgacaatcggacagcctgccagcatctcctgcaagagcagccagagcctgctggacagcgacggcaagacctacctgaactggctgctgcagaggccaggccagagccccgagagactgatctacctggtgtccaagctggactccggcgtgcccgatagattcacaggcagcggctccggcaccgacttcaccctgaagatcagccgggtggaagccgaggacctgggcgtgtactgttgttggcagggcacccacttcccttacaccttcggcggagggaccaaggtggaaatcaagctcgaggacctgaagaacgtgttcccacctgaggtggccgtgttcgagcctagcgaggccgagatcagccacacccagaaagccaccctcgtgtgcctggctaccggcttctaccccgaccatgtggaactgtcttggtgggtcaacggcaaagaggtgcacagcggcgtgtctaccgacccccagccactgaaagaacagcccgccctgaacgacagccggtactgcctgagcagcagactgagagtgtccgccaccttctggcagaacccccggaaccacttcagatgccaggtgcagttctacggcctgagcgagaacgacgagtggacccaggacagagccaagcccgtgacccagatcgtgtctgccgaagcctggggcagagccgattgcggatcccagagcttcggcctgctggaccccaagctgtgctacctgctggatggcatcctgttcatctacggcgtgatcctgaccgccctgttcctgagagtgaagttcagcagaagcgccgacgcccctgcctaccagcagggacagaaccaactgtacaacgagctgaacctgggcagacgggaagagtacgacgtgctggacaagcggagaggcagggaccctgagatgggcggaaagccccggagaaagaacccccaggaaggactgtataacgaactccagaaagacaagatggccgaagcctacagcgagatcggcatgaagggcgagcggagaagaggcaagggccacgatggcctgtaccagggcctgagcaccgccaccaaggacacctatgacgccctgcacatgcaggccctgcctccaagaagggccaagcgatctggatctggagcaacaaacttctcactactcaaacaagcaggtgacgtggaggagaatcccgggcctactagtgccaccatggactggatttggcgcatccttttccttgtcggcgctgctaccggcgcccattccgggcccgaagtgcagctggttgaatctggcggaggactggttcaggctggcggatctctgagactgtcttgtgccgccagcggcagaacctttagcatgggctggtttagacaggcccctggcaaagagagagagttcgtcgccgccatcacatactctggcggcagcccttactacgccgactctgtgaagggcagattcaccatcagccgggacaacgccaagaacaccgtgtacctccagatgaacagcctgaagcctgaggacaccgccgtgtactactgcgccgccaatccaacatacggcagcgactggaacgccgagaattggggccagggaacccaagtgacagtgtctagcggatccggcggcggaggatctggcggaggcggatctgggggcggaggctctttcgaacaggtgcaactgcagcagcctggcgctgaacttgtgcggccaggcgcctctgtgaagctgagctgtaaagccagcggctacaccttcaccagctactggatgaactgggtcaagcagcgcccaggccagggcctggaatggatcggaatgatcgaccccagcgacagcgagacacactacaaccacatcttcaaggacaaggccaccctgaccgtggacaagtccagcagcacagcctacctgcaactgtccagcctgaccagcgaggacagcgccgtgtactactgcgcccggaacctgtatctgtggggccagggaacaagcgtgaccgtgtctagcacgcgtatccagaaccctgatcctgccgtgtaccagctgcgggatagcaagagcagcgacaagagcgtgtgtctgttcaccgacttcgacagccagaccaacgtgtcccagagcaaggactccgacgtgtacatcaccgataagtgcgtgctggacatgcggagcatggacttcaagagcaactccgccgtggcctggtccaacaagtccgatttcgcctgcgccaacgccttcaacaacagcattatccccgaggacacattcttcccaagccccgagagcagctgcgacgtgaagctggtggaaaagagcttcgagacagacaccaacctgaacttccagaacctgagcgtgatcggcttcagaatcctgctgctgaaagtggccggctttaacctgctgatgaccctgcggctgtggtccagctaa

SEQ ID NO: 32825 - DNA, 2274 bp, synthetic construct; identical to SEQ ID NO: 32282
  source 1..2274: mol_type = other DNA

SEQ ID NO: 32826 - DNA, 2274 bp, synthetic construct; identical to SEQ ID NO: 32283
  source 1..2274: mol_type = other DNA

SEQ ID NO: 32827 - DNA, 2997 bp, synthetic construct
  source 1..2997: mol_type = other DNA
atggccttaccagtgaccgccttgctcctgccgctggccttgctgctccacgccgccaggccggcatgccaggttcagctgcaagagtctggccctggcctggtcaagcctagccaaacactgagcctgacctgtaccgtgtctggcggctctatcaccaccggcgagttctactggaactggttcagacagcctcctggcaaaggactggaatggatgggagccattgccgccagcggcagcacaacatacagccctagcttcgagagccggaccagcatcagcagagacaccagcaagaatcagttcagcctgaagctgagcagcgtgacagccgccgatacagccgtgtattactgcggcagatcctttggagtggccgccgtgacaaccggccagaatagaggacagggcaccctggtcacagtgtctagcggtaccggcggaggcggatctggcggcggaggtagcggtggcggaggatctgaattcgagatcgtgctgacacagagccctgccaccctgtctctgagccctggcgaaagagccaccctgagctgtagagccagccagagcgtgtccagctacctggcctggtatcagcagaagcccggccaggctccccggctgctgatctacgatgccagcaatagagccaccggcatccccgccagattttccggctctggcagcggcaccgacttcaccctgaccatcagctccctggaacccgaggacttcgccgtgtactactgccagcagcggagcaactggcccatcacattcggccagggcacccggctggaaatcaaactcgaggacctgaagaacgtgttcccacctgaggtggccgtgttcgagcctagcgaggccgagatcagccacacccagaaagccaccctcgtgtgcctggctaccggcttctaccccgaccatgtggaactgtcttggtgggtcaacggcaaagaggtgcacagcggcgtgtgtaccgacccccagccactgaaagaacagcccgccctgaacgacagccggtactgcctgagcagcagactgagagtgtccgccaccttctggcagaacccccggaaccacttcagatgccaggtgcagttctacggcctgagcgagaacgacgagtggacccaggacagagccaagcccgtgacccagatcgtgtctgccgaagcctggggcagagccgattgcggctttaccagcgagagctaccagcagggcgtgctgagcgccaccatcctgtacgagatcctgctgggcaaggccaccctgtacgccgtgctggtgtctgccctggtgctgatggctatggtcaagcggaaggacagccggggaagggccaagcgatctggatctggagcaacaaacttctcactactcaaacaagcaggtgacgtggaggagaatcccgggcctactagtatggactggatttggcgcatccttttccttgtcggcgctgctaccggcgcgcattccttcgaagaagtgcagctggtggaatcaggcggcggactggtgcagcctggcagaagcctgagactgagctgtgccgccagcggcttcaccttcaacgactacgccatgcactgggtgcgccaggcccctggaaaaggactggaatgggtgtccacaatcagctggaacagcggcagcatcggctacgccgatagcgtgaagggccggttcaccatcagccgggacaacgccaagaagtccctgtacctccagatgaacagcctgcgggccgaggacacagccctgtactattgcgccaaggacatccagtacggcaactactactacggcatggacgtgtggggccagggaaccaccgtgaccgtgtcatctacgcgtatccagaaccctgatcctgccgtgtaccagctgcgggatagcaagagcagcgacaagagcgtgtgtctgttcaccgacttcgacagccagaccaacgtgtcccagagcaaggactccgacgtgtacatcaccgataagtgcgtgctggacatgcggagcatggacttcaagagcaactccgccgtggcctggtccaacaagtccgatttcgcctgcgccaacgccttcaacaacagcattatccccgaggacacattcttcccaagccccgagagcagctgcgacgtgaagctggtggaaaagagcttcgagacagacaccaacctgaacttccagaacctgagcgtgatcggcttcagaatcctgctgctgaaagtggccggctttaacctgctgatgaccctgcggctgtggtccagccgcgccaagagaagcggatctggcgtgaagcagaccctgaatttcgacctgctgaagctggctggcgacgtggaatccaacccaggcccttctagaggccatatgaccgagtacaagcccacggtgcgcctcgccacccgcgacgacgtccccagggccgtacgcaccctcgccgccgcgttcgccgactaccccgccacgcgccacaccgtcgatccggaccgccacatcgagcgggtcaccgagctgcaagaactcttcctcacgcgcgtcgggctcgacatcggcaaggtgtgggtcgcggacgacggcgccgcggtggcggtctggaccacgccggagagcgtcgaagcgggggcggtgttcgccgagatcggcccgcgcatggccgagttgagcggttcccggctggccgcgcagcaacagatggaaggcctcctggcgccgcaccggcccaaggagcccgcgtggttcctggccaccgtcggcgtctcgcccgaccaccagggcaagggtctgggcagcgccgtcgtgctccccggagtggaggcggccgagcgcgccggggtgcccgccttcctggagacctccgcgccccgcaacctccccttctacgagcggctcggcttcaccgtcaccgccgacgtcgaggtgcccgaaggaccgcgcacctggtgcatgacccgcaagcccggtgcctga

SEQ ID NO: 32828 - DNA, 2286 bp, synthetic construct
  source 1..2286: mol_type = other DNA
atggccttaccagtgaccgccttgctcctgccgctggccttgctgctccacgccgccaggccggacatccagatgacacagagccctagcagcctgtctgccagcgtgggagacagagtgaccatcacatgcaaggccagcgaccacatcaacaactggctggcctggtatcagcagaagcctggacaggcccctaagctgctgatctacggcgctaccacactggaaacaggcgtgcccagcagattttctggcagcggctctggcaccgactacaccctgacaatatccagcctccagcctgaggacttcgccacctactactgtcagcagagctggaacaccccttggacattcggccagggcaccaagctggaaatcaagagactcgaggacctgaagaacgtgttcccacctgaggtggccgtgttcgagcctagcgaggccgagatcagccacacccagaaagccaccctcgtgtgcctggctaccggcttctaccccgaccatgtggaactgtcttggtgggtcaacggcaaagaggtgcacagcggcgtgtgtaccgacccccagccactgaaagaacagcccgccctgaacgacagccggtactgcctgagcagcagactgagagtgtccgccaccttctggcagaacccccggaaccacttcagatgccaggtgcagttctacggcctgagcgagaacgacgagtggacccaggacagagccaagcccgtgacccagatcgtgtctgccgaagcctggggcagagccgattgcggctttaccagcgagagctaccagcagggcgtgctgagcgccaccatcctgtacgagatcctgctgggcaaggccaccctgtacgccgtgctggtgtctgccctggtgctgatggctatggtcaagcggaaggacagccggggaagggccaagcgatctggatctggagcaacaaacttctcactactcaaacaagcaggtgacgtggaggagaatcccgggcctactagtgccaccatggactggatttggcgcatccttttccttgtcggcgctgctaccggcgcccattccgggcccgaagtgcaactggttgaatccggtggcggcctggtgcaagcaggcggatctctcagacttagctgtgccgcctccggcagaaccttcacaatgggatggtttaggcaggctccagggaaagagagagagttcgtcgccgccatctctctgtctcccacactggcctactacgccgactctgtgaaaggccggttcaccatctccagagataatgccaagaacaccgtggtgctgcaaatgaactctctgaaacccgaggatacagccctgtactattgtgccgctgaccggaagtccgtgatgagcatcagacccgattactggggacagggcacacaagtcacagtgtcctctggatccggcggcggaggatctggcggaggcggatctgggggcggaggctctttcgaacaagttcagcttcaacagcctggcgctgagctggtcaaacctggcgcttctgtgaagatgagctgcaaagccagcggctacgccttcaacagctactggatcaactggatgaagcagaaacccggccagggactcgaatggatcggccaaatctatcccggcgacggcgacaccaactacaacggcaagttcaagggcagagccacactgaccgccgatacctctagcagcacagcctacatgcagctgagcagcctgaccagcgaagatagcgccgtgtacttctgtgcccggtccatcacaacagtcgtgggctgcgctatggactattggggccagggaacaagcgtgaccgtgtctagtacgcgtatccagaaccctgatcctgccgtgtaccagctgcgggatagcaagagcagcgacaagagcgtgtgtctgttcaccgacttcgacagccagaccaacgtgtcccagagcaaggactccgacgtgtacatcaccgataagtgcgtgctggacatgcggagcatggacttcaagagcaactccgccgtggcctggtccaacaagtccgatttcgcctgcgccaacgccttcaacaacagcattatccccgaggacacattcttcccaagccccgagagcagctgcgacgtgaagctggtggaaaagagcttcgagacagacaccaacctgaacttccagaacctgagcgtgatcggcttcagaatcctgctgctgaaagtggccggctttaacctgctgatgaccctgcggctgtggtccagctaa

SEQ ID NO: 32829 - DNA, 2574 bp, synthetic construct
  source 1..2574: mol_type = other DNA
atggccttaccagtgaccgccttgctcctgccgctggccttgctgctccacgccgccaggccggacatccagatgacacagagccctagcagcctgtctgccagcgtgggagacagagtgaccatcacatgcaaggccagcgaccacatcaacaactggctggcctggtatcagcagaagcctggacaggcccctaagctgctgatctacggcgctaccacactggaaacaggcgtgcccagcagattttctggcagcggctctggcaccgactacaccctgacaatatccagcctccagcctgaggacttcgccacctactactgtcagcagagctggaacaccccttggacattcggccagggcaccaagctggaaatcaagagactcgaggacctgaagaacgtgttcccacctgaggtggccgtgttcgagcctagcgaggccgagatcagccacacccagaaagccaccctcgtgtgcctggctaccggcttctaccccgaccatgtggaactgtcttggtgggtcaacggcaaagaggtgcacagcggcgtgtctaccgacccccagccactgaaagaacagcccgccctgaacgacagccggtactgcctgagcagcagactgagagtgtccgccaccttctggcagaacccccggaaccacttcagatgccaggtgcagttctacggcctgagcgagaacgacgagtggacccaggacagagccaagcccgtgacccagatcgtgtctgccgaagcctggggcagagccgattgcggatcccagagcttcggcctgctggaccccaagctgtgctacctgctggatggcatcctgttcatctacggcgtgatcctgaccgccctgttcctgagagtgaagttcagcagaagcgccgacgcccctgcctaccagcagggacagaaccaactgtacaacgagctgaacctgggcagacgggaagagtacgacgtgctggacaagcggagaggcagggaccctgagatgggcggaaagccccggagaaagaacccccaggaaggactgtataacgaactccagaaagacaagatggccgaagcctacagcgagatcggcatgaagggcgagcggagaagaggcaagggccacgatggcctgtaccagggcctgagcaccgccaccaaggacacctatgacgccctgcacatgcaggccctgcctccaagaagggccaagcgatctggatctggagcaacaaacttctcactactcaaacaagcaggtgacgtggaggagaatcccgggcctactagtgccaccatggactggatttggcgcatccttttccttgtcggcgctgctaccggcgcccattccgggcccgaagtgcagctggttgaatctggcggaggactggttcaggctggcggatctctgagactgtcttgtgccgccagcggcagaacctttagcatgggctggtttagacaggcccctggcaaagagagagagttcgtcgccgccatcacatactctggcggcagcccttactacgccgactctgtgaagggcagattcaccatcagccgggacaacgccaagaacaccgtgtacctccagatgaacagcctgaagcctgaggacaccgccgtgtactactgcgccgccaatccaacatacggcagcgactggaacgccgagaattggggccagggaacccaagtgacagtgtctagcggatccggcggcggaggatctggcggaggcggatctgggggcggaggctctttcgaacaagttcagcttcaacagcctggcgctgagctggtcaaacctggcgcttctgtgaagatgagctgcaaagccagcggctacgccttcagcagctactggatcaactggatgaagcagaaacccggccagggactcgaatggatcggccaaatctatcccggcgacggcgacaccaactacaacggcaagttcaagggcagagccacactgaccgccgatacctctagcagcacagcctacatgcagctgagcagcctgaccagcgaagatagcgccgtgtacttctgtgcccggtccatcacaacagtcgtgggctgcgctatggactattggggccagggaacaagcgtgaccgtgtctagtacgcgtatccagaaccctgatcctgccgtgtaccagctgcgggatagcaagagcagcgacaagagcgtgtgtctgttcaccgacttcgacagccagaccaacgtgtcccagagcaaggactccgacgtgtacatcaccgataagtgcgtgctggacatgcggagcatggacttcaagagcaactccgccgtggcctggtccaacaagtccgatttcgcctgcgccaacgccttcaacaacagcattatccccgaggacacattcttcccaagccccgagagcagctgcgacgtgaagctggtggaaaagagcttcgagacagacaccaacctgaacttccagaacctgagcgtgatcggcttcagaatcctgctgctgaaagtggccggctttaacctgctgatgaccctgcggctgtggtccagctaa

SEQ ID NO: 32830 - DNA, 3567 bp, synthetic construct
  source 1..3567: mol_type = other DNA
atggccttaccagtgaccgccttgctcctgccgctggccttgctgctccacgccgccaggccggacatccagatgacacagagccctagcagcctgtctgccagcgtgggagacagagtgaccatcacatgcaaggccagcgaccacatcaacaactggctggcctggtatcagcagaagcctggacaggcccctaagctgctgatctacggcgctaccacactggaaacaggcgtgcccagcagattttctggcagcggctctggcaccgactacaccctgacaatatccagcctccagcctgaggacttcgccacctactactgtcagcagagctggaacaccccttggacattcggccagggcaccaagctggaaatcaagagactcgaggacctgaagaacgtgttcccacctgaggtggccgtgttcgagcctagcgaggccgagatcagccacacccagaaagccaccctcgtgtgcctggctaccggcttctaccccgaccatgtggaactgtcttggtgggtcaacggcaaagaggtgcacagcggcgtgtctaccgacccccagccactgaaagaacagcccgccctgaacgacagccggtactgcctgagcagcagactgagagtgtccgccaccttctggcagaacccccggaaccacttcagatgccaggtgcagttctacggcctgagcgagaacgacgagtggacccaggacagagccaagcccgtgacccagatcgtgtctgccgaagcctggggcagagccgattgcggatcccagagcttcggcctgctggaccccaagctgtgctacctgctggatggcatcctgttcatctacggcgtgatcctgaccgccctgttcctgagagtgaagttcagcagaagcgccgacgcccctgcctaccagcagggacagaaccaactgtacaacgagctgaacctgggcagacgggaagagtacgacgtgctggacaagcggagaggcagggaccctgagatgggcggaaagccccggagaaagaacccccaggaaggactgtataacgaactccagaaagacaagatggccgaagcctacagcgagatcggcatgaagggcgagcggagaagaggcaagggccacgatggcctgtaccagggcctgagcaccgccaccaaggacacctatgacgccctgcacatgcaggccctgcctccaagaagggccaagcgatctggatctggagcaacaaacttctcactactcaaacaagcaggtgacgtggaggagaatcccgggcctactagtgccaccatggactggatttggcgcatccttttccttgtcggcgctgctaccggcgcccattccgggcccgaagtgcagctggttgaatctggcggaggactggttcaggctggcggatctctgagactgtcttgtgccgccagcggcagaacctttagcatgggctggtttagacaggcccctggcaaagagagagagttcgtcgccgccatcacatactctggcggcagcccttactacgccgactctgtgaagggcagattcaccatcagccgggacaacgccaagaacaccgtgtacctccagatgaacagcctgaagcctgaggacaccgccgtgtactactgcgccgccaatccaacatacggcagcgactggaacgccgagaattggggccagggaacccaagtgacagtgtctagcggatccggcggcggaggatctggcggaggcggatctgggggcggaggctctttcgaacaagttcagcttcaacagcctggcgctgagctggtcaaacctggcgcttctgtgaagatgagctgcaaagccagcggctacgccttcagcagctactggatcaactggatgaagcagaaacccggccagggactcgaatggatcggccaaatctatcccggcgacggcgacaccaactacaacggcaagttcaagggcagagccacactgaccgccgatacctctagcagcacagcctacatgcagctgagcagcctgaccagcgaagatagcgccgtgtacttctgtgcccggtccatcacaacagtcgtgggctgcgctatggactattggggccagggaacaagcgtgaccgtgtctagtacgcgtatccagaaccctgatcctgccgtgtaccagctgcgggatagcaagagcagcgacaagagcgtgtgtctgttcaccgacttcgacagccagaccaacgtgtcccagagcaaggactccgacgtgtacatcaccgataagaccgtgctggacatgcggagcatggacttcaagagcaactccgccgtggcctggtccaacaagtccgatttcgcctgcgccaacgccttcaacaacagcattatccccgaggacacattcttcccaagccccgagagcagctgcggtacccagagttttgggttgttggaccctaaattgtgctatctgttggacggaatcctgttcatttacggagtgatcctgaccgcattgttcctgcgggttaagttttccagatccgcagacgcacccgcttaccaacaagggcagaaccaactctacaatgaacttaatttggggcggagggaagagtacgacgttctggacaaaaggaggggacgagatcccgagatgggcggaaagcctcgaaggaagaatccgcaagaggggctttataacgaactccagaaagataaaatggcagaagcctatagtgagattgggatgaagggagaaaggaggaggggtaaaggtcacgatgggttgtaccaaggattgagcacagccactaaagatacctatgatgcgctccacatgcaggccctgccgccaagacgcgccaagagaagcggatctggcgtgaagcagaccctgaatttcgacctgctgaagctggctggcgacgtggaatccaacccaggcccttctagaggccatatgaccgagtacaagcccacggtgcgcctcgccacccgcgacgacgtccccagggccgtacgcaccctcgccgccgcgttcgccgactaccccgccacgcgccacaccgtcgatccggaccgccacatcgagcgggtcaccgagctgcaagaactcttcctcacgcgcgtcgggctcgacatcggcaaggtgtgggtcgcggacgacggcgccgcggtggcggtctggaccacgccggagagcgtcgaagcgggggcggtgttcgccgagatcggcccgcgcatggccgagttgagcggttcccggctggccgcgcagcaacagatggaaggcctcctggcgccgcaccggcccaaggagcccgcgtggttcctggccaccgtcggcgtctcgcccgaccaccagggcaagggtctgggcagcgccgtcgtgctccccggagtggaggcggccgagcgcgccggggtgcccgccttcctggagacctccgcgccccgcaacctccccttctacgagcggctcggcttcaccgtcaccgccgacgtcgaggtgcccgaaggaccgcgcacctggtgcatgacccgcaagcccggtgcctga

SEQ ID NO: 32831 - DNA, 2868 bp, synthetic construct
  source 1..2868: mol_type = other DNA
atggccttaccagtgaccgccttgctcctgccgctggccttgctgctccacgccgccaggccggagatcgtgctgacacagagccctggcacactgtcactgtctccaggcgaaagagccacactgagctgcaaagccagccagagcgtgtccatcagcggcatcaacctgatgaactggtatcagcagaagcccggccagcagccaagactgctgatctaccacgccagcatcctggcctctggcatccccgatagattttctggcagcggctccggcaccgacttcaccctgacaatcagcagactggaacccgaggacttcgccgtgtactactgccagcagaccagagagagccctctgacattcggccagggcacaagactggaaatcaaactcgaggacctgaagaacgtgttcccacctgaggtggccgtgttcgagcctagcgaggccgagatcagccacacccagaaagccaccctcgtgtgcctggctaccggcttctaccccgaccatgtggaactgtcttggtgggtcaacggcaaagaggtgcacagcggcgtgtctaccgacccccagccactgaaagaacagcccgccctgaacgacagccggtactgcctgagcagcagactgagagtgtccgccaccttctggcagaacccccggaaccacttcagatgccaggtgcagttctacggcctgagcgagaacgacgagtggacccaggacagagccaagcccgtgacccagatcgtgtctgccgaagcctggggcagagccgattgcggatcccagagcttcggcctgctggaccccaagctgtgctacctgctggatggcatcctgttcatctacggcgtgatcctgaccgccctgttcctgagagtgaagttcagcagaagcgccgacgcccctgcctaccagcagggacagaaccaactgtacaacgagctgaacctgggcagacgggaagagtacgacgtgctggacaagcggagaggcagggaccctgagatgggcggaaagccccagcggagaaagaacccccaggaaggactgtataacgaactccagaaagacaagatggccgaagcctacagcgagatcggcatgaagggcgagcggagaagaggcaagggccacgatggcctgtaccagggcctgagcaccgccaccaaggacacctatgacgccctgcacatgcaggccctgcctccaagaagggccaagcgatctggatctggagcaacaaacttctcactactcaaacaagcaggtgacgtggaggagaatcccgggcctactagtgccaccatggactggatttggcgcatccttttccttgtcggcgctgctaccggcgcccattccgggcccgaagtgcaactggttgaatccggtggcggcctggtgcaagcaggcggatctctcagacttagctgtgccgcctccggcagaaccttcacaatgggatggtttaggcaggctccagggaaagagagagagttcgtcgccgccatctctctgtctcccacactggcctactacgccgactctgtgaaaggccggttcaccatctccagagataatgccaagaacaccgtggtgctgcaaatgaactctctgaaacccgaggatacagccctgtactattgtgccgctgaccggaagtccgtgatgagcatcagacccgattactggggacagggcacacaagtcacagtgtcctctggatccggcggcggaggatctggcggaggcggatctgggggcggaggctctttcgaacaagttcagctggttgaatccggtggcggagtggtgcaacctggcagaagtctgagactgagctgtgccgccagcggcttcagcttcagcaattatggcatggcctgggtccgacaggcccctggaaaaggacttgagtgggtcgccagcatctctaccggcggaggcaatacctactacgccgacagcgtgaaggacagattcaccatcagccgggacaacagcaagaacaccctgtacctccagatgaacagcctgagagccgaggataccgccgtgtactactgcaccagacacgatagaggcggcctgtattggggccagggaacaatggtcaccgtgtcctctacgcgtatccagaaccctgatcctgccgtgtaccagctgcgggatagcaagagcagcgacaagagcgtgtgtctgttcaccgacttcgacagccagaccaacgtgtcccagagcaaggactccgacgtgtacatcaccgataagaccgtgctggacatgcggagcatggacttcaagagcaactccgccgtggcctggtccaacaagtccgatttcgcctgcgccaacgccttcaacaacagcattatccccgaggacacattcttcccaagccccgagagcagctgcggtacccagagttttgggttgttggaccctaaattgtgctatctgttggacggaatcctgttcatttacggagtgatcctgaccgcattgttcctgcgggttaagttttccagatccgcagacgcacccgcttaccaacaagggcagaaccaactctacaatgaacttaatttggggcggagggaagagtacgacgttctggacaaaaggaggggacgagatcccgagatgggcggaaagcctcagcgaaggaagaatccgcaagaggggctttataacgaactccagaaagataaaatggcagaagcctatagtgagattgggatgaagggagaaaggaggaggggtaaaggtcacgatgggttgtaccaaggattgagcacagccactaaagatacctatgatgcgctccacatgcaggccctgccgccaagataa

SEQ ID NO: 32832 - DNA, 2883 bp, synthetic construct; identical to SEQ ID NO: 32702
  source 1..2883: mol_type = other DNA

SEQ ID NO: 32833 - DNA, 2868 bp, synthetic construct
  source 1..2868: mol_type = other DNA
atggccttaccagtgaccgccttgctcctgccgctggccttgctgctccacgccgccaggccggagatcgtgctgacacagagccctggcacactgtcactgtctccaggcgaaagagccacactgagctgcaaagccagccagagcgtgtccatcagcggcatcaacctgatgaactggtatcagcagaagcccggccagcagccaagactgctgatctaccacgccagcatcctggcctctggcatccccgatagattttctggcagcggctccggcaccgacttcaccctgacaatcagcagactggaacccgaggacttcgccgtgtactactgccagcagaccagagagagccctctgacattcggccagggcacaagactggaaatcaaactcgaggacctgaagaacgtgttcccacctgaggtggccgtgttcgagcctagcgaggccgagatcagccacacccagaaagccaccctcgtgtgcctggctaccggcttctaccccgaccatgtggaactgtcttggtgggtcaacggcaaagaggtgcacagcggcgtgtctaccgacccccagccactgaaagaacagcccgccctgaacgacagccggtactgcctgagcagcagactgagagtgtccgccaccttctggcagaacccccggaaccacttcagatgccaggtgcagttctacggcctgagcgagaacgacgagtggacccaggacagagccaagcccgtgacccagatcgtgtctgccgaagcctggggcagagccgattgcggatcccagagcttcggcctgctggaccccaagctgtgctacctgctggatggcatcctgttcatctacggcgtgatcctgaccgccctgttcctgagagtgaagttcagcagaagcgccgacgcccctgcctaccagcagggacagaaccaactgtacaacgagctgaacctgggcagacgggaagagtacgacgtgctggacaagcggagaggcagggaccctgagatgggcggaaagccccagcggagaaagaacccccaggaaggactgtataacgaactccagaaagacaagatggccgaagcctacagcgagatcggcatgaagggcgagcggagaagaggcaagggccacgatggcctgtaccagggcctgagcaccgccaccaaggacacctatgacgccctgcacatgcaggccctgcctccaagaagggccaagcgatctggatctggagcaacaaacttctcactactcaaacaagcaggtgacgtggaggagaatcccgggcctactagtgccaccatggactggatttggcgcatccttttccttgtcggcgctgctaccggcgcccattccgggcccgaagtgcaactggttgaatccggtggcggcctggtgcaagcaggcggatctctcagacttagctgtgccgcctccggcagaaccttcacaatgggatggtttaggcaggctccagggaaagagagagagttcgtcgccgccatctctctgtctcccacactggcctactacgccgactctgtgaaaggccggttcaccatctccagagataatgccaagaacaccgtggtgctgcaaatgaactctctgaaacccgaggatacagccctgtactattgtgccgctgaccggaagtccgtgatgagcatcagacccgattactggggacagggcacacaagtcacagtgtcctctggatccggcggcggaggatctggcggaggcggatctgggggcggaggctctttcgaactgcaactgcttgaatcaggtggcggcctggttcagcctggcggatctctgagactgagctgtgccgccagcggcttcaccttctctaagtacgctatggcctgggtccgacaggcccctggaaaaggacttgagtgggtcgcctctatcagcacaggcggcgtgaacacctactacgccgacagcgtgaaggacagattcaccatcagccgggacaacgccaagaacaccctgtacctccagatgaacagcctgagagccgaggacacagccgtgtattattgcgccacacacaccggcgactacttcgactattggggccagggaacaatggtcaccgtgtcctctacgcgtatccagaaccctgatcctgccgtgtaccagctgcgggatagcaagagcagcgacaagagcgtgtgtctgttcaccgacttcgacagccagaccaacgtgtcccagagcaaggactccgacgtgtacatcaccgataagaccgtgctggacatgcggagcatggacttcaagagcaactccgccgtggcctggtccaacaagtccgatttcgcctgcgccaacgccttcaacaacagcattatccccgaggacacattcttcccaagccccgagagcagctgcggtacccagagttttgggttgttggaccctaaattgtgctatctgttggacggaatcctgttcatttacggagtgatcctgaccgcattgttcctgcgggttaagttttccagatccgcagacgcacccgcttaccaacaagggcagaaccaactctacaatgaacttaatttggggcggagggaagagtacgacgttctggacaaaaggaggggacgagatcccgagatgggcggaaagcctcagcgaaggaagaatccgcaagaggggctttataacgaactccagaaagataaaatggcagaagcctatagtgagattgggatgaagggagaaaggaggaggggtaaaggtcacgatgggttgtaccaaggattgagcacagccactaaagatacctatgatgcgctccacatgcaggccctgccgccaagataa

SEQ ID NO: 32834 - DNA, 2868 bp, synthetic construct; identical to SEQ ID NO: 32831
  source 1..2868: mol_type = other DNA

SEQ ID NO: 32835 - DNA, 3576 bp, synthetic construct
  source 1..3576: mol_type = other DNA
atggccttaccagtgaccgccttgctcctgccgctggccttgctgctccacgccgccaggccggagatcgtgctgacacagtctcccgccacactgtcactgtctccaggcgaaagagccacactgagctgtagagccagccagagcgtgtcctcttacctggcctggtatcagcagaagcctggacaggctccccggctgctgatctacgatgccagcaatagagccacaggcatccccgccagattttctggctctggcagcggcaccgatttcaccctgaccataagcagcctggaacctgaggacttcgccgtgtactactgccagcagagaagcaactggcctcctacattcggccagggcaccaaggtggaaatcaaactcgaggacctgaagaacgtgttcccacctgaggtggccgtgttcgagcctagcgaggccgagatcagccacacccagaaagccaccctcgtgtgcctggctaccggcttctaccccgaccatgtggaactgtcttggtgggtcaacggcaaagaggtgcacagcggcgtgtctaccgacccccagccactgaaagaacagcccgccctgaacgacagccggtactgcctgagcagcagactgagagtgtccgccaccttctggcagaacccccggaaccacttcagatgccaggtgcagttctacggcctgagcgagaacgacgagtggacccaggacagagccaagcccgtgacccagatcgtgtctgccgaagcctggggcagagccgattgcggatcccagagcttcggcctgctggaccccaagctgtgctacctgctggatggcatcctgttcatctacggcgtgatcctgaccgccctgttcctgagagtgaagttcagcagaagcgccgacgcccctgcctaccagcagggacagaaccaactgtacaacgagctgaacctgggcagacgggaagagtacgacgtgctggacaagcggagaggcagggaccctgagatgggcggaaagccccggagaaagaacccccaggaaggactgtataacgaactccagaaagacaagatggccgaagcctacagcgagatcggcatgaagggcgagcggagaagaggcaagggccacgatggcctgtaccagggcctgagcaccgccaccaaggacacctatgacgccctgcacatgcaggccctgcctccaagaagggccaagcgatctggatctggagcaacaaacttctcactactcaaacaagcaggtgacgtggaggagaatcccgggcctactagtgccaccatggactggatttggcgcatccttttccttgtcggcgctgctaccggcgcccattccgggcccgaagtgcaactggttgaatccggtggcggcctggtgcaagcaggcggatctctcagacttagctgtgccgcctccggcagaaccttcacaatgggatggtttaggcaggctccagggaaagagagagagttcgtcgccgccatctctctgtctcccacactggcctactacgccgactctgtgaaaggccggttcaccatctccagagataatgccaagaacaccgtggtgctgcaaatgaactctctgaaacccgaggatacagccctgtactattgtgccgctgaccggaagtccgtgatgagcatcagacccgattactggggacagggcacacaagtcacagtgtcctctggatccggcggcggaggatctggcggaggcggatctgggggcggaggctctttcgaacaactccagctgcaagagtctggccccggactggtcaagcctagcgaaacactgagcctgacctgtaccgtgtctggcggcagcatcagcagcagctcttattggtggggctggaccagacagcctcctggcagaggactggaatggatcggcaccatgtactacagcggcaacatctactacaaccccagcctccagagccgggccaccatctctgtggacaccagcaagaaccagttcagcctgaagctgagcagcgtgacagccgccgataccgccgtgtattattgcgccagacatgtgggctacagctacggcagacggttctggtacttcgacctgtggggcagaggcaccctggtcacagtttcttctacgcgtatccagaaccctgatcctgccgtgtaccagctgcgggatagcaagagcagcgacaagagcgtgtgtctgttcaccgacttcgacagccagaccaacgtgtcccagagcaaggactccgacgtgtacatcaccgataagaccgtgctggacatgcggagcatggacttcaagagcaactccgccgtggcctggtccaacaagtccgatttcgcctgcgccaacgccttcaacaacagcattatccccgaggacacattcttcccaagccccgagagcagctgcggtacccagagttttgggttgttggaccctaaattgtgctatctgttggacggaatcctgttcatttacggagtgatcctgaccgcattgttcctgcgggttaagttttccagatccgcagacgcacccgcttaccaacaagggcagaaccaactctacaatgaacttaatttggggcggagggaagagtacgacgttctggacaaaaggaggggacgagatcccgagatgggcggaaagcctcgaaggaagaatccgcaagaggggctttataacgaactccagaaagataaaatggcagaagcctatagtgagattgggatgaagggagaaaggaggaggggtaaaggtcacgatgggttgtaccaaggattgagcacagccactaaagatacctatgatgcgctccacatgcaggccctgccgccaagacgcgccaagagaagcggatctggcgtgaagcagaccctgaatttcgacctgctgaagctggctggcgacgtggaatccaacccaggcccttctagaggccatatgaccgagtacaagcccacggtgcgcctcgccacccgcgacgacgtccccagggccgtacgcaccctcgccgccgcgttcgccgactaccccgccacgcgccacaccgtcgatccggaccgccacatcgagcgggtcaccgagctgcaagaactcttcctcacgcgcgtcgggctcgacatcggcaaggtgtgggtcgcggacgacggcgccgcggtggcggtctggaccacgccggagagcgtcgaagcgggggcggtgttcgccgagatcggcccgcgcatggccgagttgagcggttcccggctggccgcgcagcaacagatggaaggcctcctggcgccgcaccggcccaaggagcccgcgtggttcctggccaccgtcggcgtctcgcccgaccaccagggcaagggtctgggcagcgccgtcgtgctccccggagtggaggcggccgagcgcgccggggtgcccgccttcctggagacctccgcgccccgcaacctccccttctacgagcggctcggcttcaccgtcaccgccgacgtcgaggtgcccgaaggaccgcgcacctggtgcatgacccgcaagcccggtgcctga

SEQ ID NO: 32836 - DNA, 3573 bp, synthetic construct
  source 1..3573: mol_type = other DNA
atggccttaccagtgaccgccttgctcctgccgctggccttgctgctccacgccgccaggccggagatcgtgctgacacagtctcccgccacactgtcactgtctccaggcgaaagagccacactgagctgtagagccagccagagcgtgtcctcttacctggcctggtatcagcagaagcctggacaggctccccggctgctgatctacgatgccagcaatagagccacaggcatccccgccagattttctggctctggcagcggcaccgatttcaccctgaccataagcagcctggaacctgaggacttcgccgtgtactactgccagcagagaagcaactggcctcctacattcggccagggcaccaaggtggaaatcaaactcgaggacctgaagaacgtgttcccacctgaggtggccgtgttcgagcctagcgaggccgagatcagccacacccagaaagccaccctcgtgtgcctggctaccggcttctaccccgaccatgtggaactgtcttggtgggtcaacggcaaagaggtgcacagcggcgtgtctaccgacccccagccactgaaagaacagcccgccctgaacgacagccggtactgcctgagcagcagactgagagtgtccgccaccttctggcagaacccccggaaccacttcagatgccaggtgcagttctacggcctgagcgagaacgacgagtggacccaggacagagccaagcccgtgacccagatcgtgtctgccgaagcctggggcagagccgattgcggatcccagagcttcggcctgctggaccccaagctgtgctacctgctggatggcatcctgttcatctacggcgtgatcctgaccgccctgttcctgagagtgaagttcagcagaagcgccgacgcccctgcctaccagcagggacagaaccaactgtacaacgagctgaacctgggcagacgggaagagtacgacgtgctggacaagcggagaggcagggaccctgagatgggcggaaagccccggagaaagaacccccaggaaggactgtataacgaactccagaaagacaagatggccgaagcctacagcgagatcggcatgaagggcgagcggagaagaggcaagggccacgatggcctgtaccagggcctgagcaccgccaccaaggacacctatgacgccctgcacatgcaggccctgcctccaagaagggccaagcgatctggatctggagcaacaaacttctcactactcaaacaagcaggtgacgtggaggagaatcccgggcctactagtaccatggactggatttggcgcatccttttccttgtcggcgctgctaccggcgcccattccgggcccgaagtgcaactggttgaatccggtggcggcctggtgcaacccggcggatctctcagacttagctgtgccgcctccggcagaaccttcacaatgggatggtacaggcaggctccagggaaagagagagagttcgtcgccgccatctctctgtctcccacactggcctactacgccgactctgtgaaaggccggttcaccatctccagagataatagcaagaacaccgtggtgctgcaaatgaactctctgagagccgaggatacagccctgtactattgtgccgctgaccggaagtccgtgatgagcatcagacccgattactggggacagggcacactggtcacagtgtctagtggatccggcggcggaggatctggcggaggcggatctgggggcggaggctctttcgaacaactccagctgcaagagtctggccccggactggtcaagcctagcgaaacactgagcctgacctgtaccgtgtctggcggcagcatcagcagcagctcttattggtggggctggaccagacagcctcctggcagaggactggaatggatcggcaccatgtactacagcggcaacatctactacaaccccagcctccagagccgggccaccatctctgtggacaccagcaagaaccagttcagcctgaagctgagcagcgtgacagccgccgataccgccgtgtattattgcgccagacatgtgggctacagctacggcagacggttctggtacttcgacctgtggggcagaggcaccctggtcacagtttcttctacgcgtatccagaaccctgatcctgccgtgtaccagctgcgggatagcaagagcagcgacaagagcgtgtgtctgttcaccgacttcgacagccagaccaacgtgtcccagagcaaggactccgacgtgtacatcaccgataagaccgtgctggacatgcggagcatggacttcaagagcaactccgccgtggcctggtccaacaagtccgatttcgcctgcgccaacgccttcaacaacagcattatccccgaggacacattcttcccaagccccgagagcagctgcggtacccagagttttgggttgttggaccctaaattgtgctatctgttggacggaatcctgttcatttacggagtgatcctgaccgcattgttcctgcgggttaagttttccagatccgcagacgcacccgcttaccaacaagggcagaaccaactctacaatgaacttaatttggggcggagggaagagtacgacgttctggacaaaaggaggggacgagatcccgagatgggcggaaagcctcgaaggaagaatccgcaagaggggctttataacgaactccagaaagataaaatggcagaagcctatagtgagattgggatgaagggagaaaggaggaggggtaaaggtcacgatgggttgtaccaaggattgagcacagccactaaagatacctatgatgcgctccacatgcaggccctgccgccaagacgcgccaagagaagcggatctggcgtgaagcagaccctgaatttcgacctgctgaagctggctggcgacgtggaatccaacccaggcccttctagaggccatatgaccgagtacaagcccacggtgcgcctcgccacccgcgacgacgtccccagggccgtacgcaccctcgccgccgcgttcgccgactaccccgccacgcgccacaccgtcgatccggaccgccacatcgagcgggtcaccgagctgcaagaactcttcctcacgcgcgtcgggctcgacatcggcaaggtgtgggtcgcggacgacggcgccgcggtggcggtctggaccacgccggagagcgtcgaagcgggggcggtgttcgccgagatcggcccgcgcatggccgagttgagcggttcccggctggccgcgcagcaacagatggaaggcctcctggcgccgcaccggcccaaggagcccgcgtggttcctggccaccgtcggcgtctcgcccgaccaccagggcaagggtctgggcagcgccgtcgtgctccccggagtggaggcggccgagcgcgccggggtgcccgccttcctggagacctccgcgccccgcaacctccccttctacgagcggctcggcttcaccgtcaccgccgacgtcgaggtgcccgaaggaccgcgcacctggtgcatgacccgcaagcccggtgcctga

SEQ ID NO: 32837 - DNA, 3579 bp, synthetic construct
  source 1..3579: mol_type = other DNA
atggccttaccagtgaccgccttgctcctgccgctggccttgctgctccacgccgccaggccggagatcgtgctgacacagtctcccgccacactgtcactgtctccaggcgaaagagccacactgagctgtagagccagccagagcgtgtcctcttacctggcctggtatcagcagaagcctggacaggctccccggctgctgatctacgatgccagcaatagagccacaggcatccccgccagattttctggctctggcagcggcaccgatttcaccctgaccataagcagcctggaacctgaggacttcgccgtgtactactgccagcagagaagcaactggcctcctacattcggccagggcaccaaggtggaaatcaaactcgaggacctgaagaacgtgttcccacctgaggtggccgtgttcgagcctagcgaggccgagatcagccacacccagaaagccaccctcgtgtgcctggctaccggcttctaccccgaccatgtggaactgtcttggtgggtcaacggcaaagaggtgcacagcggcgtgtctaccgacccccagccactgaaagaacagcccgccctgaacgacagccggtactgcctgagcagcagactgagagtgtccgccaccttctggcagaacccccggaaccacttcagatgccaggtgcagttctacggcctgagcgagaacgacgagtggacccaggacagagccaagcccgtgacccagatcgtgtctgccgaagcctggggcagagccgattgcggatcccagagcttcggcctgctggaccccaagctgtgctacctgctggatggcatcctgttcatctacggcgtgatcctgaccgccctgttcctgagagtgaagttcagcagaagcgccgacgcccctgcctaccagcagggacagaaccaactgtacaacgagctgaacctgggcagacgggaagagtacgacgtgctggacaagcggagaggcagggaccctgagatgggcggaaagccccagcggagaaagaacccccaggaaggactgtataacgaactccagaaagacaagatggccgaagcctacagcgagatcggcatgaagggcgagcggagaagaggcaagggccacgatggcctgtaccagggcctgagcaccgccaccaaggacacctatgacgccctgcacatgcaggccctgcctccaagaagggccaagcgatctggatctggagcaacaaacttctcactactcaaacaagcaggtgacgtggaggagaatcccgggcctactagtgccaccatggactggatttggcgcatccttttccttgtcggcgctgctaccggcgcccattccgggcccgaagtgcaactggttgaatccggtggcggcctggtgcaagcaggcggatctctcagacttagctgtgccgcctccggcagaaccttcacaatgggatggtttaggcaggctccagggaaagagagagagttcgtcgccgccatctctctgtctcccacactggcctactacgccgactctgtgaaaggccggttcaccatctccagagataatgccaagaacaccgtggtgctgcaaatgaactctctgaaacccgaggatacagccctgtactattgtgccgctgaccggaagtccgtgatgagcatcagacccgattactggggacagggcacacaagtcacagtgtcctctggatccggcggcggaggatctggcggaggcggatctgggggcggaggctctttcgaacaactccagctgcaagagtctggccccggactggtcaagcctagcgaaacactgagcctgacctgtaccgtgtctggcggcagcatcagcagcagctcttattggtggggctggaccagacagcctcctggcagaggactggaatggatcggcaccatgtactacagcggcaacatctactacaaccccagcctccagagccgggccaccatctctgtggacaccagcaagaaccagttcagcctgaagctgagcagcgtgacagccgccgataccgccgtgtattattgcgccagacatgtgggctacagctacggcagacggttctggtacttcgacctgtggggcagaggcaccctggtcacagtttcttctacgcgtatccagaaccctgatcctgccgtgtaccagctgcgggatagcaagagcagcgacaagagcgtgtgtctgttcaccgacttcgacagccagaccaacgtgtcccagagcaaggactccgacgtgtacatcaccgataagaccgtgctggacatgcggagcatggacttcaagagcaactccgccgtggcctggtccaacaagtccgatttcgcctgcgccaacgccttcaacaacagcattatccccgaggacacattcttcccaagccccgagagcagctgcggtacccagagttttgggttgttggaccctaaattgtgctatctgttggacggaatcctgttcatttacggagtgatcctgaccgcattgttcctgcgggttaagttttccagatccgcagacgcacccgcttaccaacaagggcagaaccaactctacaatgaacttaatttggggcggagggaagagtacgacgttctggacaaaaggaggggacgagatcccgagatgggcggaaagcctcgaaggaagaatccgcaagaggggctttataacgaactccagaaagataaaatggcagaagcctatagtgagattgggatgaagggagaaaggaggaggggtaaaggtcacgatgggttgtaccaaggattgagcacagccactaaagatacctatgatgcgctccacatgcaggccctgccgccaagacgcgccaagagaagcggatctggcgtgaagcagaccctgaatttcgacctgctgaagctggctggcgacgtggaatccaacccaggcccttctagaggccatatgaccgagtacaagcccacggtgcgcctcgccacccgcgacgacgtccccagggccgtacgcaccctcgccgccgcgttcgccgactaccccgccacgcgccacaccgtcgatccggaccgccacatcgagcgggtcaccgagctgcaagaactcttcctcacgcgcgtcgggctcgacatcggcaaggtgtgggtcgcggacgacggcgccgcggtggcggtctggaccacgccggagagcgtcgaagcgggggcggtgttcgccgagatcggcccgcgcatggccgagttgagcggttcccggctggccgcgcagcaacagatggaaggcctcctggcgccgcaccggcccaaggagcccgcgtggttcctggccaccgtcggcgtctcgcccgaccaccagggcaagggtctgggcagcgccgtcgtgctccccggagtggaggcggccgagcgcgccggggtgcccgccttcctggagacctccgcgccccgcaacctccccttctacgagcggctcggcttcaccgtcaccgccgacgtcgaggtgcccgaaggaccgcgcacctggtgcatgacccgcaagcccggtgcctga

SEQ ID NO: 32838 - DNA, 3564 bp, synthetic construct
  source 1..3564: mol_type = other DNA
atggccttaccagtgaccgccttgctcctgccgctggccttgctgctccacgccgccaggccggagatcgtgctgacacagagccctggcacactgtcactgtctccaggcgaaagagccacactgagctgcaaagccagccagagcgtgtccatcagcggcatcaacctgatgaactggtatcagcagaagcccggccagcagccaagactgctgatctaccacgccagcatcctggcctctggcatccccgatagattttctggcagcggctccggcaccgacttcaccctgacaatcagcagactggaacccgaggacttcgccgtgtactactgccagcagaccagagagagccctctgacattcggccagggcacaagactggaaatcaaactcgaggacctgaagaacgtgttcccacctgaggtggccgtgttcgagcctagcgaggccgagatcagccacacccagaaagccaccctcgtgtgcctggctaccggcttctaccccgaccatgtggaactgtcttggtgggtcaacggcaaagaggtgcacagcggcgtgtctaccgacccccagccactgaaagaacagcccgccctgaacgacagccggtactgcctgagcagcagactgagagtgtccgccaccttctggcagaacccccggaaccacttcagatgccaggtgcagttctacggcctgagcgagaacgacgagtggacccaggacagagccaagcccgtgacccagatcgtgtctgccgaagcctggggcagagccgattgcggatcccagagcttcggcctgctggaccccaagctgtgctacctgctggatggcatcctgttcatctacggcgtgatcctgaccgccctgttcctgagagtgaagttcagcagaagcgccgacgcccctgcctaccagcagggacagaaccaactgtacaacgagctgaacctgggcagacgggaagagtacgacgtgctggacaagcggagaggcagggaccctgagatgggcggaaagccccagcggagaaagaacccccaggaaggactgtataacgaactccagaaagacaagatggccgaagcctacagcgagatcggcatgaagggcgagcggagaagaggcaagggccacgatggcctgtaccagggcctgagcaccgccaccaaggacacctatgacgccctgcacatgcaggccctgcctccaagaagggccaagcgatctggatctggagcaacaaacttctcactactcaaacaagcaggtgacgtggaggagaatcccgggcctactagtgccaccatggactggatttggcgcatccttttccttgtcggcgctgctaccggcgcccattccgggcccgaagtgcaactggttgaatccggtggcggcctggtgcaagcaggcggatctctcagacttagctgtgccgcctccggcagaaccttcacaatgggatggtttaggcaggctccagggaaagagagagagttcgtcgccgccatctctctgtctcccacactggcctactacgccgactctgtgaaaggccggttcaccatctccagagataatgccaagaacaccgtggtgctgcaaatgaactctctgaaacccgaggatacagccctgtactattgtgccgctgaccggaagtccgtgatgagcatcagacccgattactggggacagggcacacaagtcacagtgtcctctggatccggcggcggaggatctggcggaggcggatctgggggcggaggctctttcgaacaagttcagctggttgaatccggtggcggagtggtgcaacctggcagaagtctgagactgagctgtgccgccagcggcttcagcttcagcaattatggcatggcctgggtccgacaggcccctggaaaaggacttgagtgggtcgccagcatctctaccggcggaggcaatacctactacgccgacagcgtgaaggacagattcaccatcagccgggacaacagcaagaacaccctgtacctccagatgaacagcctgagagccgaggataccgccgtgtactactgcaccagacacgatagaggcggcctgtattggggccagggaacaatggtcaccgtgtcctctacgcgtatccagaaccctgatcctgccgtgtaccagctgcgggatagcaagagcagcgacaagagcgtgtgtctgttcaccgacttcgacagccagaccaacgtgtcccagagcaaggactccgacgtgtacatcaccgataagaccgtgctggacatgcggagcatggacttcaagagcaactccgccgtggcctggtccaacaagtccgatttcgcctgcgccaacgccttcaacaacagcattatccccgaggacacattcttcccaagccccgagagcagctgcggtacccagagttttgggttgttggaccctaaattgtgctatctgttggacggaatcctgttcatttacggagtgatcctgaccgcattgttcctgcgggttaagttttccagatccgcagacgcacccgcttaccaacaagggcagaaccaactctacaatgaacttaatttggggcggagggaagagtacgacgttctggacaaaaggaggggacgagatcccgagatgggcggaaagcctcgaaggaagaatccgcaagaggggctttataacgaactccagaaagataaaatggcagaagcctatagtgagattgggatgaagggagaaaggaggaggggtaaaggtcacgatgggttgtaccaaggattgagcacagccactaaagatacctatgatgcgctccacatgcaggccctgccgccaagacgcgccaagagaagcggatctggcgtgaagcagaccctgaatttcgacctgctgaagctggctggcgacgtggaatccaacccaggcccttctagaggccatatgaccgagtacaagcccacggtgcgcctcgccacccgcgacgacgtccccagggccgtacgcaccctcgccgccgcgttcgccgactaccccgccacgcgccacaccgtcgatccggaccgccacatcgagcgggtcaccgagctgcaagaactcttcctcacgcgcgtcgggctcgacatcggcaaggtgtgggtcgcggacgacggcgccgcggtggcggtctggaccacgccggagagcgtcgaagcgggggcggtgttcgccgagatcggcccgcgcatggccgagttgagcggttcccggctggccgcgcagcaacagatggaaggcctcctggcgccgcaccggcccaaggagcccgcgtggttcctggccaccgtcggcgtctcgcccgaccaccagggcaagggtctgggcagcgccgtcgtgctccccggagtggaggcggccgagcgcgccggggtgcccgccttcctggagacctccgcgccccgcaacctccccttctacgagcggctcggcttcaccgtcaccgccgacgtcgaggtgcccgaaggaccgcgcacctggtgcatgacccgcaagcccggtgcctga

SEQ ID NO: 32839 - DNA, 3579 bp, synthetic construct; identical to SEQ ID NO: 32837
  source 1..3579: mol_type = other DNA

SEQ ID NO: 32840 - DNA, 3642 bp, synthetic construct
  source 1..3642: mol_type = other DNA
atggccttaccagtgaccgccttgctcctgccgctggccttgctgctccacgccgccaggccggaagtgcagctggttgaatctggcggaggactggttcaggctggcggatctctgagactgtcttgtgccgccagcggcagaacctttagcatgggctggtttagacaggcccctggcaaagagagagagttcgtcgccgccatcacatactctggcggcagcccttactacgccgactctgtgaagggcagattcaccatcagccgggacaacgccaagaacaccgtgtacctccagatgaacagcctgaagcctgaggacaccgccgtgtactactgcgccgccaatccaacatacggcagcgactggaacgccgagaattggggccagggaacccaagtgacagtgtctagcggtaccggcggaggcggatctggcggcggaggtagcggtggcggaggatctgaattcgacatccagatgacacagagccctagcagcctgtctgccagcgtgggagacagagtgaccatcacatgcaaggccagcgaccacatcaacaactggctggcctggtatcagcagaagcctggacaggcccctaagctgctgatctacggcgctaccacactggaaacaggcgtgcccagcagattttctggcagcggctctggcaccgactacaccctgacaatatccagcctccagcctgaggacttcgccacctactactgtcagcagagctggaacaccccttggacattcggccagggcaccaagctggaaatcaagagactcgaggacctgaagaacgtgttcccacctgaggtggccgtgttcgagcctagcgaggccgagatcagccacacccagaaagccaccctcgtgtgcctggctaccggcttctaccccgaccatgtggaactgtcttggtgggtcaacggcaaagaggtgcacagcggcgtgtgtaccgacccccagccactgaaagaacagcccgccctgaacgacagccggtactgcctgagcagcagactgagagtgtccgccaccttctggcagaacccccggaaccacttcagatgccaggtgcagttctacggcctgagcgagaacgacgagtggacccaggacagagccaagcccgtgacccagatcgtgtctgccgaagcctggggcagagccgattgcggctttaccagcgagagctaccagcagggcgtgctgagcgccggatcccagagcttcggcctgctggaccccaagctgtgctacctgctggatggcatcctgttcatctacggcgtgatcctgaccgccctgttcctgagagtgaagttcagcagaagcgccgacgcccctgcctaccagcagggacagaaccaactgtacaacgagctgaacctgggcagacgggaagagtacgacgtgctggacaagcggagaggcagggaccctgagatgggcggaaagccccggagaaagaacccccaggaaggactgtataacgaactccagaaagacaagatggccgaagcctacagcgagatcggcatgaagggcgagcggagaagaggcaagggccacgatggcctgtaccagggcctgagcaccgccaccaaggacacctatgacgccctgcacatgcaggccctgcctccaagaagggccaagcgatctggatctggagcaacaaacttctcactactcaaacaagcaggtgacgtggaggagaatcccgggcctactagtatggactggatttggcgcatccttttccttgtcggcgctgctaccggcgcgcattccttcgaacaagttcagcttcaacagcctggcgctgagctggtcaaacctggcgcttctgtgaagatgagctgcaaagccagcggctacgccttcagcagctactggatcaactggatgaagcagaaacccggccagggactcgaatggatcggccaaatctatcccggcgacggcgacaccaactacaacggcaagttcaagggcagagccacactgaccgccgatacctctagcagcacagcctacatgcagctgagcagcctgaccagcgaagatagcgccgtgtacttctgtgcccggtccatcacaacagtcgtgggctgcgctatggactattggggccagggaacaagcgtgaccgtgtctagtacgcgtatccagaaccctgatcctgccgtgtaccagctgcgggatagcaagagcagcgacaagagcgtgtgtctgttcaccgacttcgacagccagaccaacgtgtcccagagcaaggactccgacgtgtacatcaccgataagtgcgtgctggacatgcggagcatggacttcaagagcaactccgccgtggcctggtccaacaagtccgatttcgcctgcgccaacgccttcaacaacagcattatccccgaggacacattcttcccaagccccgagagcagctgcgacgtgaagctggtggaaaagagcttcgagacagacggtacccagagttttgggttgttggaccctaaattgtgctatctgttggacggaatcctgttcatttacggagtgatcctgaccgcattgttcctgcgggttaagttttccagatccgcagacgcacccgcttaccaacaagggcagaaccaactctacaatgaacttaatttggggcggagggaagagtacgacgttctggacaaaaggaggggacgagatcccgagatgggcggaaagcctcagcgaaggaagaatccgcaagaggggctttataacgaactccagaaagataaaatggcagaagcctatagtgagattgggatgaagggagaaaggaggaggggtaaaggtcacgatgggttgtaccaaggattgagcacagccactaaagatacctatgatgcgctccacatgcaggccctgccgccaagacgcgccaagagaagcggatctggcgtgaagcagaccctgaatttcgacctgctgaagctggctggcgacgtggaatccaacccaggcccttctagaggccatatgaccgagtacaagcccacggtgcgcctcgccacccgcgacgacgtccccagggccgtacgcaccctcgccgccgcgttcgccgactaccccgccacgcgccacaccgtcgatccggaccgccacatcgagcgggtcaccgagctgcaagaactcttcctcacgcgcgtcgggctcgacatcggcaaggtgtgggtcgcggacgacggcgccgcggtggcggtctggaccacgccggagagcgtcgaagcgggggcggtgttcgccgagatcggcccgcgcatggccgagttgagcggttcccggctggccgcgcagcaacagatggaaggcctcctggcgccgcaccggcccaaggagcccgcgtggttcctggccaccgtcggcgtctcgcccgaccaccagggcaagggtctgggcagcgccgtcgtgctccccggagtggaggcggccgagcgcgccggggtgcccgccttcctggagacctccgcgccccgcaacctccccttctacgagcggctcggcttcaccgtcaccgccgacgtcgaggtgcccgaaggaccgcgcacctggtgcatgacccgcaagcccggtgcctga

SEQ ID NO: 32841 - DNA, 3558 bp, synthetic construct
  source 1..3558: mol_type = other DNA
atggccttaccagtgaccgccttgctcctgccgctggccttgctgctccacgccgccaggccgatgctgcccgctcctaagaatctggtggtgtccagaatcaccgaggacagcgccagactgtcttggacagctcctgatgccgccttcgacagcttccccatccggtacatcgagacactgatctggggcgaagccatctggctggatgtgcctggaagcgagagaagctacgacctgaccggactgaagcctggcacagagtatgccgtggtcatcaccggcgtgaaaggcggcagattctctagccctctggtggcctctttcaccaccggtaccggcggaggcggatctggcggcggaggtagcggtggcggaggatctgaattcgacatccagatgacacagagccctagcagcctgtctgccagcgtgggagacagagtgaccatcacatgcaaggccagcgaccacatcaacaactggctggcctggtatcagcagaagcctggacaggcccctaagctgctgatctacggcgctaccacactggaaacaggcgtgcccagcagattttctggcagcggctctggcaccgactacaccctgacaatatccagcctccagcctgaggacttcgccacctactactgtcagcagagctggaacaccccttggacattcggccagggcaccaagctggaaatcaagagactcgaggacctgaagaacgtgttcccacctgaggtggccgtgttcgagcctagcgaggccgagatcagccacacccagaaagccaccctcgtgtgcctggctaccggcttctaccccgaccatgtggaactgtcttggtgggtcaacggcaaagaggtgcacagcggcgtgtgtaccgacccccagccactgaaagaacagcccgccctgaacgacagccggtactgcctgagcagcagactgagagtgtccgccaccttctggcagaacccccggaaccacttcagatgccaggtgcagttctacggcctgagcgagaacgacgagtggacccaggacagagccaagcccgtgacccagatcgtgtctgccgaagcctggggcagagccgattgcggctttaccagcgagagctaccagcagggcgtgctgagcgccggatcccagagcttcggcctgctggaccccaagctgtgctacctgctggatggcatcctgttcatctacggcgtgatcctgaccgccctgttcctgagagtgaagttcagcagaagcgccgacgcccctgcctaccagcagggacagaaccaactgtacaacgagctgaacctgggcagacgggaagagtacgacgtgctggacaagcggagaggcagggaccctgagatgggcggaaagccccggagaaagaacccccaggaaggactgtataacgaactccagaaagacaagatggccgaagcctacagcgagatcggcatgaagggcgagcggagaagaggcaagggccacgatggcctgtaccagggcctgagcaccgccaccaaggacacctatgacgccctgcacatgcaggccctgcctccaagaagggccaagcgatctggatctggagcaacaaacttctcactactcaaacaagcaggtgacgtggaggagaatcccgggcctactagtatggactggatttggcgcatccttttccttgtcggcgctgctaccggcgcgcattccttcgaacaagttcagcttcaacagcctggcgctgagctggtcaaacctggcgcttctgtgaagatgagctgcaaagccagcggctacgccttcagcagctactggatcaactggatgaagcagaaacccggccagggactcgaatggatcggccaaatctatcccggcgacggcgacaccaactacaacggcaagttcaagggcagagccacactgaccgccgatacctctagcagcacagcctacatgcagctgagcagcctgaccagcgaagatagcgccgtgtacttctgtgcccggtccatcacaacagtcgtgggctgcgctatggactattggggccagggaacaagcgtgaccgtgtctagtacgcgtatccagaaccctgatcctgccgtgtaccagctgcgggatagcaagagcagcgacaagagcgtgtgtctgttcaccgacttcgacagccagaccaacgtgtcccagagcaaggactccgacgtgtacatcaccgataagtgcgtgctggacatgcggagcatggacttcaagagcaactccgccgtggcctggtccaacaagtccgatttcgcctgcgccaacgccttcaacaacagcattatccccgaggacacattcttcccaagccccgagagcagctgcgacgtgaagctggtggaaaagagcttcgagacagacggtacccagagttttgggttgttggaccctaaattgtgctatctgttggacggaatcctgttcatttacggagtgatcctgaccgcattgttcctgcgggttaagttttccagatccgcagacgcacccgcttaccaacaagggcagaaccaactctacaatgaacttaatttggggcggagggaagagtacgacgttctggacaaaaggaggggacgagatcccgagatgggcggaaagcctcagcgaaggaagaatccgcaagaggggctttataacgaactccagaaagataaaatggcagaagcctatagtgagattgggatgaagggagaaaggaggaggggtaaaggtcacgatgggttgtaccaaggattgagcacagccactaaagatacctatgatgcgctccacatgcaggccctgccgccaagacgcgccaagagaagcggatctggcgtgaagcagaccctgaatttcgacctgctgaagctggctggcgacgtggaatccaacccaggcccttctagaggccatatgaccgagtacaagcccacggtgcgcctcgccacccgcgacgacgtccccagggccgtacgcaccctcgccgccgcgttcgccgactaccccgccacgcgccacaccgtcgatccggaccgccacatcgagcgggtcaccgagctgcaagaactcttcctcacgcgcgtcgggctcgacatcggcaaggtgtgggtcgcggacgacggcgccgcggtggcggtctggaccacgccggagagcgtcgaagcgggggcggtgttcgccgagatcggcccgcgcatggccgagttgagcggttcccggctggccgcgcagcaacagatggaaggcctcctggcgccgcaccggcccaaggagcccgcgtggttcctggccaccgtcggcgtctcgcccgaccaccagggcaagggtctgggcagcgccgtcgtgctccccggagtggaggcggccgagcgcgccggggtgcccgccttcctggagacctccgcgccccgcaacctccccttctacgagcggctcggcttcaccgtcaccgccgacgtcgaggtgcccgaaggaccgcgcacctggtgcatgacccgcaagcccggtgcctga

SEQ ID NO: 32842 - DNA, 3492 bp, synthetic construct
  source 1..3492: mol_type = other DNA
atggccttaccagtgaccgccttgctcctgccgctggccttgctgctccacgccgccaggccggacatccagatgacacagagccctagcagcctgtctgccagcgtgggagacagagtgaccatcacatgcaaggccagcgaccacatcaacaactggctggcctggtatcagcagaagcctggacaggcccctaagctgctgatctacggcgctaccacactggaaacaggcgtgcccagcagattttctggcagcggctctggcaccgactacaccctgacaatatccagcctccagcctgaggacttcgccacctactactgtcagcagagctggaacaccccttggacattcggccagggcaccaagctggaaatcaagagactcgaggccgacgtgtcccccaagcctaccatcttcctgccctctatcgccgagacaaagctccagaaggccggcacctacctgtgcctgctggaaaagttcttcccagatgtgattaagatccactggcaggaaaagaagtccaacaccatcctgggcagccaggaaggcaacaccatgaagaccaacgacacctacatgaagttcagctggctgaccgtgcccgagaagtccctggacaaagaacacagatgcatcgtgcggcacgaaaacaacaagaacggcgtggaccaggaaatcatcttcccacccatcaagaccgatgtgattacaatggaccccaaggacggatcccagagcttcggcctgctggaccccaagctgtgctacctgctggatggcatcctgttcatctacggcgtgatcctgaccgccctgttcctgagagtgaagttcagcagaagcgccgacgcccctgcctaccagcagggacagaaccaactgtacaacgagctgaacctgggcagacgggaagagtacgacgtgctggacaagcggagaggcagggaccctgagatgggcggaaagccccagcggagaaagaacccccaggaaggactgtataacgaactccagaaagacaagatggccgaagcctacagcgagatcggcatgaagggcgagcggagaagaggcaagggccacgatggcctgtaccagggcctgagcaccgccaccaaggacacctatgacgccctgcacatgcaggccctgcctccaagaagggccaagcgatctggatctggagcaacaaacttctcactactcaaacaagcaggtgacgtggaggagaatcccgggcctactagtgccaccatggactggatttggcgcatccttttccttgtcggcgctgctaccggcgcccattccgggcccgaagtgcagctggttgaatctggcggaggactggttcaggctggcggatctctgagactgtcttgtgccgccagcggcagaacctttagcatgggctggtttagacaggcccctggcaaagagagagagttcgtcgccgccatcacatactctggcggcagcccttactacgccgactctgtgaagggcagattcaccatcagccgggacaacgccaagaacaccgtgtacctccagatgaacagcctgaagcctgaggacaccgccgtgtactactgcgccgccaatccaacatacggcagcgactggaacgccgagaattggggccagggaacccaagtgacagtgtctagcggatccggcggcggaggatctggcggaggcggatctgggggcggaggctctttcgaacaagttcagcttcaacagcctggcgctgagctggtcaaacctggcgcttctgtgaagatgagctgcaaagccagcggctacgccttcagcagctactggatcaactggatgaagcagaaacccggccagggactcgaatggatcggccaaatctatcccggcgacggcgacaccaactacaacggcaagttcaagggcagagccacactgaccgccgatacctctagcagcacagcctacatgcagctgagcagcctgaccagcgaagatagcgccgtgtacttctgtgcccggtccatcacaacagtcgtgggctgcgctatggactattggggccagggaacaagcgtgaccgtgtctagtacgcgtcctcacaccaagcccagcgtgttcgtgatgaagaacggcaccaacgtggcctgcctcgtgaaagagttctaccccaaggacatcaggatcaacctggtgtccagcaagaagatcaccgagttcgaccccgccatcgtgatctcccccagcggcaagtacaacgccgtgaagctggggaagtacgaggacagcaacagcgtgacctgctccgtgcagcacgacaacaagaccgtgcacagcaccgactttggtacccagagttttgggttgttggaccctaaattgtgctatctgttggacggaatcctgttcatttacggagtgatcctgaccgcattgttcctgcgggttaagttttccagatccgcagacgcacccgcttaccaacaagggcagaaccaactctacaatgaacttaatttggggcggagggaagagtacgacgttctggacaaaaggaggggacgagatcccgagatgggcggaaagcctcagcgaaggaagaatccgcaagaggggctttataacgaactccagaaagataaaatggcagaagcctatagtgagattgggatgaagggagaaaggaggaggggtaaaggtcacgatgggttgtaccaaggattgagcacagccactaaagatacctatgatgcgctccacatgcaggccctgccgccaagacgcgccaagagaagcggatctggcgtgaagcagaccctgaatttcgacctgctgaagctggctggcgacgtggaatccaacccaggcccttctagaggccatatgaccgagtacaagcccacggtgcgcctcgccacccgcgacgacgtccccagggccgtacgcaccctcgccgccgcgttcgccgactaccccgccacgcgccacaccgtcgatccggaccgccacatcgagcgggtcaccgagctgcaagaactcttcctcacgcgcgtcgggctcgacatcggcaaggtgtgggtcgcggacgacggcgccgcggtggcggtctggaccacgccggagagcgtcgaagcgggggcggtgttcgccgagatcggcccgcgcatggccgagttgagcggttcccggctggccgcgcagcaacagatggaaggcctcctggcgccgcaccggcccaaggagcccgcgtggttcctggccaccgtcggcgtctcgcccgaccaccagggcaagggtctgggcagcgccgtcgtgctccccggagtggaggcggccgagcgcgccggggtgcccgccttcctggagacctccgcgccccgcaacctccccttctacgagcggctcggcttcaccgtcaccgccgacgtcgaggtgcccgaaggaccgcgcacctggtgcatgacccgcaagcccggtgcctga

SEQ ID NO: 32843 - DNA, 3642 bp, synthetic construct; identical to SEQ ID NO: 32840
  source 1..3642: mol_type = other DNA

SEQ ID NO: 32844 - DNA, 2520 bp, synthetic construct
  source 1..2520: mol_type = other DNA
atggccttaccagtgaccgccttgctcctgccgctggccttgctgctccacgccgccaggccggaagtgcagctggttgaatctggcggaggactggttcaggctggcggatctctgagactgtcttgtgccgccagcggcagaacctttagcatgggctggtttagacaggcccctggcaaagagagagagttcgtcgccgccatcacatactctggcggcagcccttactacgccgactctgtgaagggcagattcaccatcagccgggacaacgccaagaacaccgtgtacctccagatgaacagcctgaagcctgaggacaccgccgtgtactactgcgccgccaatccaacatacggcagcgactggaacgccgagaattggggccagggaacccaagtgacagtgtctagcggtaccggcggaggcggatctggcggcggaggtagcggtggcggaggatctgaattcgacatccagatgacacagagccctagcagcctgtctgccagcgtgggagacagagtgaccatcacatgcaaggccagcgaccacatcaacaactggctggcctggtatcagcagaagcctggacaggcccctaagctgctgatctacggcgctaccacactggaaacaggcgtgcccagcagattttctggcagcggctctggcaccgactacaccctgacaatatccagcctccagcctgaggacttcgccacctactactgtcagcagagctggaacaccccttggacattcggccagggcaccaagctggaaatcaagagactcgaggccgacgtgtcccccaagcctaccatcttcctgccctctatcgccgagacaaagctccagaaggccggcacctacctgtgcctgctggaaaagttcttcccagatgtgattaagatccactggcaggaaaagaagtccaacaccatcctgggcagccaggaaggcaacaccatgaagaccaacgacacctacatgaagttcagctggctgaccgtgcccgagaagtccctggacaaagaacacagatgcatcgtgcggcacgaaaacaacaagaacggcgtggaccaggaaatcatcttcccacccatcaagaccgatgtgattacaatggaccccaaggacggatcccagagcttcggcctgctggaccccaagctgtgctacctgctggatggcatcctgttcatctacggcgtgatcctgaccgccctgttcctgagagtgaagttcagcagaagcgccgacgcccctgcctaccagcagggacagaaccaactgtacaacgagctgaacctgggcagacgggaagagtacgacgtgctggacaagcggagaggcagggaccctgagatgggcggaaagccccggagaaagaacccccaggaaggactgtataacgaactccagaaagacaagatggccgaagcctacagcgagatcggcatgaagggcgagcggagaagaggcaagggccacgatggcctgtaccagggcctgagcaccgccaccaaggacacctatgacgccctgcacatgcaggccctgcctccaagaagggccaagcgatctggatctggagcaacaaacttctcactactcaaacaagcaggtgacgtggaggagaatcccgggcctactagtatggactggatttggcgcatccttttccttgtcggcgctgctaccggcgcgcattccttcgaacaagttcagcttcaacagcctggcgctgagctggtcaaacctggcgcttctgtgaagatgagctgcaaagccagcggctacgccttcagcagctactggatcaactggatgaagcagaaacccggccagggactcgaatggatcggccaaatctatcccggcgacggcgacaccaactacaacggcaagttcaagggcagagccacactgaccgccgatacctctagcagcacagcctacatgcagctgagcagcctgaccagcgaagatagcgccgtgtacttctgtgcccggtccatcacaacagtcgtgggctgcgctatggactattggggccagggaacaagcgtgaccgtgtctagtacgcgtatccagaaccctgatcctgccgtgtaccagctgcgggatagcaagagcagcgacaagagcgtgtgtctgttcaccgacttcgacagccagaccaacgtgtcccagagcaaggactccgacgtgtacatcaccgataagtgcgtgctggacatgcggagcatggacttcaagagcaactccgccgtggcctggtccaacaagtccgatttcgcctgcgccaacgccttcaacaacagcattatccccgaggacacattcttcccaagccccgagagcagctgcgacgtgaagctggtggaaaagagcttcgagacagacaccaacctgaacttccagaacctgagcgtgatcggcttcagaatcctgctgctgaaagtggccggctttaacctgctgatgaccctgcggctgtggtccagctaa

SEQ ID NO: 32845 - DNA, 3648 bp, synthetic construct
  source 1..3648: mol_type = other DNA
atggccttaccagtgaccgccttgctcctgccgctggccttgctgctccacgccgccaggccggacatccagatgacacagagccctagcagcctgtctgccagcgtgggagacagagtgaccatcacatgcaaggccagcgaccacatcaacaactggctggcctggtatcagcagaagcctggacaggcccctaagctgctgatctacggcgctaccacactggaaacaggcgtgcccagcagattttctggcagcggctctggcaccgactacaccctgacaatatccagcctccagcctgaggacttcgccacctactactgtcagcagagctggaacaccccttggacattcggccagggcaccaagctggaaatcaagagactcgaggacctgaagaacgtgttcccacctgaggtggccgtgttcgagcctagcgaggccgagatcagccacacccagaaagccaccctcgtgtgcctggctaccggcttctaccccgaccatgtggaactgtcttggtgggtcaacggcaaagaggtgcacagcggcgtgtgtaccgacccccagccactgaaagaacagcccgccctgaacgacagccggtactgcctgagcagcagactgagagtgtccgccaccttctggcagaacccccggaaccacttcagatgccaggtgcagttctacggcctgagcgagaacgacgagtggacccaggacagagccaagcccgtgacccagatcgtgtctgccgaagcctggggcagagccgattgcggctttaccagcgagagctaccagcagggcgtgctgagcgccggatcccagagcttcggcctgctggaccccaagctgtgctacctgctggatggcatcctgttcatctacggcgtgatcctgaccgccctgttcctgagagtgaagttcagcagaagcgccgacgcccctgcctaccagcagggacagaaccaactgtacaacgagctgaacctgggcagacgggaagagtacgacgtgctggacaagcggagaggcagggaccctgagatgggcggaaagccccggagaaagaacccccaggaaggactgtataacgaactccagaaagacaagatggccgaagcctacagcgagatcggcatgaagggcgagcggagaagaggcaagggccacgatggcctgtaccagggcctgagcaccgccaccaaggacacctatgacgccctgcacatgcaggccctgcctccaagaagggccaagcgatctggatctggagcaacaaacttctcactactcaaacaagcaggtgacgtggaggagaatcccgggcctactagtgccaccatggactggatttggcgcatccttttccttgtcggcgctgctaccggcgcccattccgggcccgaagtgcagctggttgaatctggcggaggactggttcaggctggcggatctctgagactgtcttgtgccgccagcggcagaacctttagcatgggctggtttagacaggcccctggcaaagagagagagttcgtcgccgccatcacatactctggcggcagcccttactacgccgactctgtgaagggcagattcaccatcagccgggacaacgccaagaacaccgtgtacctccagatgaacagcctgaagcctgaggacaccgccgtgtattactgcgccgccaatccaacatacggcagcgactggaacgccgagaattggggccagggaacccaagtgacagtgtctagcggatccggcggcggaggatctggcggaggcggatctgggggcggaggctctttcgaacaagttcagcttcaacagcctggcgctgagctggtcaaacctggcgcttctgtgaagatgagctgcaaagccagcggctacgccttcagcagctactggatcaactggatgaagcagaaacccggccagggactcgaatggatcggccaaatctatcccggcgacggcgacaccaactacaacggcaagttcaagggcagagccacactgaccgccgatacctctagcagcacagcctacatgcagctgagcagcctgaccagcgaagatagcgccgtgtacttctgtgcccggtccatcacaacagtcgtgggctgcgctatggactattggggccagggaacaagcgtgaccgtgtctagtacgcgtatccagaaccctgatcctgccgtgtaccagctgcgggatagcaagagcagcgacaagagcgtgtgtctgttcaccgacttcgacagccagaccaacgtgtcccagagcaaggactccgacgtgtacatcaccgataagtgcgtgctggacatgcggagcatggacttcaagagcaactccgccgtggcctggtccaacaagtccgatttcgcctgcgccaacgccttcaacaacagcattatccccgaggacacattcttcccaagccccgagagcagctgcgacgtgaagctggtggaaaagagcttcgagacagacggtacccagagttttgggttgttggaccctaaattgtgctatctgttggacggaatcctgttcatttacggagtgatcctgaccgcattgttcctgcgggttaagttttccagatccgcagacgcacccgcttaccaacaagggcagaaccaactctacaatgaacttaatttggggcggagggaagagtacgacgttctggacaaaaggaggggacgagatcccgagatgggcggaaagcctcagcgaaggaagaatccgcaagaggggctttataacgaactccagaaagataaaatggcagaagcctatagtgagattgggatgaagggagaaaggaggaggggtaaaggtcacgatgggttgtaccaaggattgagcacagccactaaagatacctatgatgcgctccacatgcaggccctgccgccaagacgcgccaagagaagcggatctggcgtgaagcagaccctgaatttcgacctgctgaagctggctggcgacgtggaatccaacccaggcccttctagaggccatatgaccgagtacaagcccacggtgcgcctcgccacccgcgacgacgtccccagggccgtacgcaccctcgccgccgcgttcgccgactaccccgccacgcgccacaccgtcgatccggaccgccacatcgagcgggtcaccgagctgcaagaactcttcctcacgcgcgtcgggctcgacatcggcaaggtgtgggtcgcggacgacggcgccgcggtggcggtctggaccacgccggagagcgtcgaagcgggggcggtgttcgccgagatcggcccgcgcatggccgagttgagcggttcccggctggccgcgcagcaacagatggaaggcctcctggcgccgcaccggcccaaggagcccgcgtggttcctggccaccgtcggcgtctcgcccgaccaccagggcaagggtctgggcagcgccgtcgtgctccccggagtggaggcggccgagcgcgccggggtgcccgccttcctggagacctccgcgccccgcaacctccccttctacgagcggctcggcttcaccgtcaccgccgacgtcgaggtgcccgaaggaccgcgcacctggtgcatgacccgcaagcccggtgcctga

SEQ ID NO: 32846 - DNA, 3513 bp, synthetic construct
  source 1..3513: mol_type = other DNA
atggccttaccagtgaccgccttgctcctgccgctggccttgctgctccacgccgccaggccggacatccagatgacacagagccctagcagcctgtctgccagcgtgggagacagagtgaccatcacatgcaaggccagcgaccacatcaacaactggctggcctggtatcagcagaagcctggacaggcccctaagctgctgatctacggcgctaccacactggaaacaggcgtgcccagcagattttctggcagcggctctggcaccgactacaccctgacaatatccagcctccagcctgaggacttcgccacctactactgtcagcagagctggaacaccccttggacattcggccagggcaccaagctggaaatcaagagactcgaggacctgaagaacgtgttcccacctgaggtggccgtgttcgagcctagcgaggccgagatcagccacacccagaaagccaccctcgtgtgcctggctaccggcttctaccccgaccatgtggaactgtcttggtgggtcaacggcaaagaggtgcacagcggcgtgtgtaccgacccccagccactgaaagaacagcccgccctgaacgacagccggtactgcctgagcagcagactgagagtgtccgccaccttctggcagaacccccggaaccacttcagatgccaggtgcagttctacggcctgagcgagaacgacgagtggacccaggacagagccaagcccgtgacccagatcgtgtctgccgaagcctggggcagagccgattgcggctttaccagcgagagctaccagcagggcgtgctgagcgccggatcccagagcttcggcctgctggaccccaagctgtgctacctgctggatggcatcctgttcatctacggcgtgatcctgaccgccctgttcctgagagtgaagttcagcagaagcgccgacgcccctgcctaccagcagggacagaaccaactgtacaacgagctgaacctgggcagacgggaagagtacgacgtgctggacaagcggagaggcagggaccctgagatgggcggaaagccccggagaaagaacccccaggaaggactgtataacgaactccagaaagacaagatggccgaagcctacagcgagatcggcatgaagggcgagcggagaagaggcaagggccacgatggcctgtaccagggcctgagcaccgccaccaaggacacctatgacgccctgcacatgcaggccctgcctccaagaagggccaagcgatctggatctggagcaacaaacttctcactactcaaacaagcaggtgacgtggaggagaatcccgggcctactagtgccaccatggactggatttggcgcatccttttccttgtcggcgctgctaccggcgcccattccgggcccatgggatcttggagcgagttttacgatcggctgcacgccattcaccaccggctgtatgctctcggaggaagcgaagctgagctggccgcttttgaaaaagaaattgccgctttcgagtccgagcttcaggcttacaaaggcaaagggaatcctgaggtcgaggccctgagagataccgccgccttcatcagaacccggttgcaggcataccggcacaacggatccggcggcggaggatctggcggaggcggatctgggggcggaggctctttcgaacaagttcagcttcaacagcctggcgctgagctggtcaaacctggcgcttctgtgaagatgagctgcaaagccagcggctacgccttcagcagctactggatcaactggatgaagcagaaacccggccagggactcgaatggatcggccaaatctatcccggcgacggcgacaccaactacaacggcaagttcaagggcagagccacactgaccgccgatacctctagcagcacagcctacatgcagctgagcagcctgaccagcgaagatagcgccgtgtacttctgtgcccggtccatcacaacagtcgtgggctgcgctatggactattggggccagggaacaagcgtgaccgtgtctagtacgcgtatccagaaccctgatcctgccgtgtaccagctgcgggatagcaagagcagcgacaagagcgtgtgtctgttcaccgacttcgacagccagaccaacgtgtcccagagcaaggactccgacgtgtacatcaccgataagtgcgtgctggacatgcggagcatggacttcaagagcaactccgccgtggcctggtccaacaagtccgatttcgcctgcgccaacgccttcaacaacagcattatccccgaggacacattcttcccaagccccgagagcagctgcgacgtgaagctggtggaaaagagcttcgagacagacggtacccagagttttgggttgttggaccctaaattgtgctatctgttggacggaatcctgttcatttacggagtgatcctgaccgcattgttcctgcgggttaagttttccagatccgcagacgcacccgcttaccaacaagggcagaaccaactctacaatgaacttaatttggggcggagggaagagtacgacgttctggacaaaaggaggggacgagatcccgagatgggcggaaagcctcagcgaaggaagaatccgcaagaggggctttataacgaactccagaaagataaaatggcagaagcctatagtgagattgggatgaagggagaaaggaggaggggtaaaggtcacgatgggttgtaccaaggattgagcacagccactaaagatacctatgatgcgctccacatgcaggccctgccgccaagacgcgccaagagaagcggatctggcgtgaagcagaccctgaatttcgacctgctgaagctggctggcgacgtggaatccaacccaggcccttctagaggccatatgaccgagtacaagcccacggtgcgcctcgccacccgcgacgacgtccccagggccgtacgcaccctcgccgccgcgttcgccgactaccccgccacgcgccacaccgtcgatccggaccgccacatcgagcgggtcaccgagctgcaagaactcttcctcacgcgcgtcgggctcgacatcggcaaggtgtgggtcgcggacgacggcgccgcggtggcggtctggaccacgccggagagcgtcgaagcgggggcggtgttcgccgagatcggcccgcgcatggccgagttgagcggttcccggctggccgcgcagcaacagatggaaggcctcctggcgccgcaccggcccaaggagcccgcgtggttcctggccaccgtcggcgtctcgcccgaccaccagggcaagggtctgggcagcgccgtcgtgctccccggagtggaggcggccgagcgcgccggggtgcccgccttcctggagacctccgcgccccgcaacctccccttctacgagcggctcggcttcaccgtcaccgccgacgtcgaggtgcccgaaggaccgcgcacctggtgcatgacccgcaagcccggtgcctga

SEQ ID NO: 32847 - DNA, 3489 bp, synthetic construct
  source 1..3489: mol_type = other DNA
atggccttaccagtgaccgccttgctcctgccgctggccttgctgctccacgccgccaggccggacatccagatgacacagagccctagcagcctgtctgccagcgtgggagacagagtgaccatcacatgcaaggccagcgaccacatcaacaactggctggcctggtatcagcagaagcctggacaggcccctaagctgctgatctacggcgctaccacactggaaacaggcgtgcccagcagattttctggcagcggctctggcaccgactacaccctgacaatatccagcctccagcctgaggacttcgccacctactactgtcagcagagctggaacaccccttggacattcggccagggcaccaagctggaaatcaagagactcgaggccgacgtgtcccccaagcctaccatcttcctgccctctatcgccgagacaaagctccagaaggccggcacctacctgtgcctgctggaaaagttcttcccagatgtgattaagatccactggcaggaaaagaagtccaacaccatcctgggcagccaggaaggcaacaccatgaagaccaacgacacctacatgaagttcagctggctgaccgtgcccgagaagtccctggacaaagaacacagatgcatcgtgcggcacgaaaacaacaagaacggcgtggaccaggaaatcatcttcccacccatcaagaccgatgtgattacaatggaccccaaggacggatcccagagcttcggcctgctggaccccaagctgtgctacctgctggatggcatcctgttcatctacggcgtgatcctgaccgccctgttcctgagagtgaagttcagcagaagcgccgacgcccctgcctaccagcagggacagaaccaactgtacaacgagctgaacctgggcagacgggaagagtacgacgtgctggacaagcggagaggcagggaccctgagatgggcggaaagccccggagaaagaacccccaggaaggactgtataacgaactccagaaagacaagatggccgaagcctacagcgagatcggcatgaagggcgagcggagaagaggcaagggccacgatggcctgtaccagggcctgagcaccgccaccaaggacacctatgacgccctgcacatgcaggccctgcctccaagaagggccaagcgatctggatctggagcaacaaacttctcactactcaaacaagcaggtgacgtggaggagaatcccgggcctactagtgccaccatggactggatttggcgcatccttttccttgtcggcgctgctaccggcgcccattccgggcccgaagtgcaactggttgaatccggtggcggcctggtgcaagcaggcggatctctcagacttagctgtgccgcctccggcagaaccttcacaatgggatggtttaggcaggctccagggaaagagagagagttcgtcgccgccatctctctgtctcccacactggcctactacgccgactctgtgaaaggccggttcaccatctccagagataatgccaagaacaccgtggtgctgcaaatgaactctctgaaacccgaggatacagccctgtactattgtgccgctgaccggaagtccgtgatgagcatcagacccgattactggggacagggcacacaagtcacagtgtcctctggatccggcggcggaggatctggcggaggcggatctgggggcggaggctctttcgaacaagttcagcttcaacagcctggcgctgagctggtcaaacctggcgcttctgtgaagatgagctgcaaagccagcggctacgccttcagcagctactggatcaactggatgaagcagaaacccggccagggactcgaatggatcggccaaatctatcccggcgacggcgacaccaactacaacggcaagttcaagggcagagccacactgaccgccgatacctctagcagcacagcctacatgcagctgagcagcctgaccagcgaagatagcgccgtgtacttctgtgcccggtccatcacaacagtcgtgggctgcgctatggactattggggccagggaacaagcgtgaccgtgtctagtacgcgtcctcacaccaagcccagcgtgttcgtgatgaagaacggcaccaacgtggcctgcctcgtgaaagagttctaccccaaggacatcaggatcaacctggtgtccagcaagaagatcaccgagttcgaccccgccatcgtgatctcccccagcggcaagtacaacgccgtgaagctggggaagtacgaggacagcaacagcgtgacctgctccgtgcagcacgacaacaagaccgtgcacagcaccgactttggtacccagagttttgggttgttggaccctaaattgtgctatctgttggacggaatcctgttcatttacggagtgatcctgaccgcattgttcctgcgggttaagttttccagatccgcagacgcacccgcttaccaacaagggcagaaccaactctacaatgaacttaatttggggcggagggaagagtacgacgttctggacaaaaggaggggacgagatcccgagatgggcggaaagcctcagcgaaggaagaatccgcaagaggggctttataacgaactccagaaagataaaatggcagaagcctatagtgagattgggatgaagggagaaaggaggaggggtaaaggtcacgatgggttgtaccaaggattgagcacagccactaaagatacctatgatgcgctccacatgcaggccctgccgccaagacgcgccaagagaagcggatctggcgtgaagcagaccctgaatttcgacctgctgaagctggctggcgacgtggaatccaacccaggcccttctagaggccatatgaccgagtacaagcccacggtgcgcctcgccacccgcgacgacgtccccagggccgtacgcaccctcgccgccgcgttcgccgactaccccgccacgcgccacaccgtcgatccggaccgccacatcgagcgggtcaccgagctgcaagaactcttcctcacgcgcgtcgggctcgacatcggcaaggtgtgggtcgcggacgacggcgccgcggtggcggtctggaccacgccggagagcgtcgaagcgggggcggtgttcgccgagatcggcccgcgcatggccgagttgagcggttcccggctggccgcgcagcaacagatggaaggcctcctggcgccgcaccggcccaaggagcccgcgtggttcctggccaccgtcggcgtctcgcccgaccaccagggcaagggtctgggcagcgccgtcgtgctccccggagtggaggcggccgagcgcgccggggtgcccgccttcctggagacctccgcgccccgcaacctccccttctacgagcggctcggcttcaccgtcaccgccgacgtcgaggtgcccgaaggaccgcgcacctggtgcatgacccgcaagcccggtgcctga

SEQ ID NO: 32848 - DNA, 3648 bp, synthetic construct
  source 1..3648: mol_type = other DNA
atggccttaccagtgaccgccttgctcctgccgctggccttgctgctccacgccgccaggccggacatccagatgacacagagccctagcagcctgtctgccagcgtgggagacagagtgaccatcacatgcaaggccagcgaccacatcaacaactggctggcctggtatcagcagaagcctggacaggcccctaagctgctgatctacggcgctaccacactggaaacaggcgtgcccagcagattttctggcagcggctctggcaccgactacaccctgacaatatccagcctccagcctgaggacttcgccacctactactgtcagcagagctggaacaccccttggacattcggccagggcaccaagctggaaatcaagagactcgaggacctgaagaacgtgttcccacctgaggtggccgtgttcgagcctagcgaggccgagatcagccacacccagaaagccaccctcgtgtgcctggctaccggcttctaccccgaccatgtggaactgtcttggtgggtcaacggcaaagaggtgcacagcggcgtgtgtaccgacccccagccactgaaagaacagcccgccctgaacgacagccggtactgcctgagcagcagactgagagtgtccgccaccttctggcagaacccccggaaccacttcagatgccaggtgcagttctacggcctgagcgagaacgacgagtggacccaggacagagccaagcccgtgacccagatcgtgtctgccgaagcctggggcagagccgattgcggctttaccagcgagagctaccagcagggcgtgctgagcgccggatcccagagcttcggcctgctggaccccaagctgtgctacctgctggatggcatcctgttcatctacggcgtgatcctgaccgccctgttcctgagagtgaagttcagcagaagcgccgacgcccctgcctaccagcagggacagaaccaactgtacaacgagctgaacctgggcagacgggaagagtacgacgtgctggacaagcggagaggcagggaccctgagatgggcggaaagccccggagaaagaacccccaggaaggactgtataacgaactccagaaagacaagatggccgaagcctacagcgagatcggcatgaagggcgagcggagaagaggcaagggccacgatggcctgtaccagggcctgagcaccgccaccaaggacacctatgacgccctgcacatgcaggccctgcctccaagaagggccaagcgatctggatctggagcaacaaacttctcactactcaaacaagcaggtgacgtggaggagaatcccgggcctactagtgccaccatggactggatttggcgcatccttttccttgtcggcgctgctaccggcgcccattccgggcccgaagtgcaactggttgaatccggtggcggcctggtgcaagcaggcggatctctcagacttagctgtgccgcctccggcagaaccttcacaatgggatggtttaggcaggctccagggaaagagagagagttcgtcgccgccatctctctgtctcccacactggcctactacgccgactctgtgaaaggccggttcaccatctccagagataatgccaagaacaccgtggtgctgcaaatgaactctctgaaacccgaggatacagccctgtactattgtgccgctgaccggaagtccgtgatgagcatcagacccgattactggggacagggcacacaagtcacagtgtcctctggatccggcggcggaggatctggcggaggcggatctgggggcggaggctctttcgaacaagttcagcttcaacagcctggcgctgagctggtcaaacctggcgcttctgtgaagatgagctgcaaagccagcggctacgccttcagcagctactggatcaactggatgaagcagaaacccggccagggactcgaatggatcggccaaatctatcccggcgacggcgacaccaactacaacggcaagttcaagggcagagccacactgaccgccgatacctctagcagcacagcctacatgcagctgagcagcctgaccagcgaagatagcgccgtgtacttctgtgcccggtccatcacaacagtcgtgggctgcgctatggactattggggccagggaacaagcgtgaccgtgtctagtacgcgtatccagaaccctgatcctgccgtgtaccagctgcgggatagcaagagcagcgacaagagcgtgtgtctgttcaccgacttcgacagccagaccaacgtgtcccagagcaaggactccgacgtgtacatcaccgataagtgcgtgctggacatgcggagcatggacttcaagagcaactccgccgtggcctggtccaacaagtccgatttcgcctgcgccaacgccttcaacaacagcattatccccgaggacacattcttcccaagccccgagagcagctgcgacgtgaagctggtggaaaagagcttcgagacagacggtacccagagttttgggttgttggaccctaaattgtgctatctgttggacggaatcctgttcatttacggagtgatcctgaccgcattgttcctgcgggttaagttttccagatccgcagacgcacccgcttaccaacaagggcagaaccaactctacaatgaacttaatttggggcggagggaagagtacgacgttctggacaaaaggaggggacgagatcccgagatgggcggaaagcctcagcgaaggaagaatccgcaagaggggctttataacgaactccagaaagataaaatggcagaagcctatagtgagattgggatgaagggagaaaggaggaggggtaaaggtcacgatgggttgtaccaaggattgagcacagccactaaagatacctatgatgcgctccacatgcaggccctgccgccaagacgcgccaagagaagcggatctggcgtgaagcagaccctgaatttcgacctgctgaagctggctggcgacgtggaatccaacccaggcccttctagaggccatatgaccgagtacaagcccacggtgcgcctcgccacccgcgacgacgtccccagggccgtacgcaccctcgccgccgcgttcgccgactaccccgccacgcgccacaccgtcgatccggaccgccacatcgagcgggtcaccgagctgcaagaactcttcctcacgcgcgtcgggctcgacatcggcaaggtgtgggtcgcggacgacggcgccgcggtggcggtctggaccacgccggagagcgtcgaagcgggggcggtgttcgccgagatcggcccgcgcatggccgagttgagcggttcccggctggccgcgcagcaacagatggaaggcctcctggcgccgcaccggcccaaggagcccgcgtggttcctggccaccgtcggcgtctcgcccgaccaccagggcaagggtctgggcagcgccgtcgtgctccccggagtggaggcggccgagcgcgccggggtgcccgccttcctggagacctccgcgccccgcaacctccccttctacgagcggctcggcttcaccgtcaccgccgacgtcgaggtgcccgaaggaccgcgcacctggtgcatgacccgcaagcccggtgcctga

SEQ ID NO: 32849 - DNA, 3696 bp, synthetic construct
  source 1..3696: mol_type = other DNA
atggccttaccagtgaccgccttgctcctgccgctggccttgctgctccacgccgccaggccggacatccagatgacacagagccctagcagcctgtctgccagcgtgggagacagagtgaccatcacatgcaaggccagcgaccacatcaacaactggctggcctggtatcagcagaagcctggacaggcccctaagctgctgatctacggcgctaccacactggaaacaggcgtgcccagcagattttctggcagcggctctggcaccgactacaccctgacaatatccagcctccagcctgaggacttcgccacctactactgtcagcagagctggaacaccccttggacattcggccagggcaccaagctggaaatcaagagactcgaggacctgaagaacgtgttcccacctgaggtggccgtgttcgagcctagcgaggccgagatcagccacacccagaaagccaccctcgtgtgcctggctaccggcttctaccccgaccatgtggaactgtcttggtgggtcaacggcaaagaggtgcacagcggcgtgtctaccgacccccagccactgaaagaacagcccgccctgaacgacagccggtactgcctgagcagcagactgagagtgtccgccaccttctggcagaacccccggaaccacttcagatgccaggtgcagttctacggcctgagcgagaacgacgagtggacccaggacagagccaagcccgtgacccagatcgtgtctgccgaagcctggggcagagccgattgcggatcccagagcttcggcctgctggaccccaagctgtgctacctgctggatggcatcctgttcatctacggcgtgatcctgaccgccctgttcctgagagtgaagttcagcagaagcgccgacgcccctgcctaccagcagggacagaaccaactgtacaacgagctgaacctgggcagacgggaagagtacgacgtgctggacaagcggagaggcagggaccctgagatgggcggaaagccccggagaaagaacccccaggaaggactgtataacgaactccagaaagacaagatggccgaagcctacagcgagatcggcatgaagggcgagcggagaagaggcaagggccacgatggcctgtaccagggcctgagcaccgccaccaaggacacctatgacgccctgcacatgcaggccctgcctccaagaagggccaagcgatctggatctggagcaacaaacttctcactactcaaacaagcaggtgacgtggaggagaatcccgggcctactagtgccaccatggactggatttggcgcatccttttccttgtcggcgctgctaccggcgcccattccgggcccgaagtgcagctggttgaatctggcggaggactggttcaggctggcggatctctgagactgtcttgtgccgccagcggcagaacctttagcatgggctggtttagacaggcccctggcaaagagagagagttcgtcgccgccatcacatactctggcggcagcccttactacgccgactctgtgaagggcagattcaccatcagccgggacaacgccaagaacaccgtgtacctccagatgaacagcctgaagcctgaggacaccgccgtgtactactgcgccgccaatccaacatacggcagcgactggaacgccgagaattggggccagggaacccaagtgacagtgtctagcggatccggcggcggaggatctggcggaggcggatctgggggcggaggctctttcgaacaagttcagcttcaacagcctggcgctgagctggtcaaacctggcgcttctgtgaagatgagctgcaaagccagcggctacgccttcagcagctactggatcaactggatgaagcagaaacccggccagggactcgaatggatcggccaaatctatcccggcgacggcgacaccaactacaacggcaagttcaagggcagagccacactgaccgccgatacctctagcagcacagcctacatgcagctgagcagcctgaccagcgaagatagcgccgtgtacttctgtgcccggtccatcacaacagtcgtgggctgcgctatggactattggggccagggaacaagcgtgaccgtgtctagtacgcgtatccagaaccctgatcctgccgtgtaccagctgcgggatagcaagagcagcgacaagagcgtgtgtctgttcaccgacttcgacagccagaccaacgtgtcccagagcaaggactccgacgtgtacatcaccgataagaccgtgctggacatgcggagcatggacttcaagagcaactccgccgtggcctggtccaacaagtccgatttcgcctgcgccaacgccttcaacaacagcattatccccgaggacacattcttcccaagccccgagagcagctgcggtaccatcactcaaggtttggcagtgtcaaccatctcatcattctttccacctggctaccaagtgtccttctgcctggtcatggtgctgctgttcgccgtggataccggcctgtacttcagcgtcaagaccaacatccggtccagcaccagagactggaaggaccacaagttcaagtggcggaaggaccctcaggacaagtggcgacgcaagcgcaaagaaaagcaaagcgagacaagcccaaaagaatttctcactatatacgaggacgtgaaagatttgaagacgaggcggaatcatgagcaagagcagacctttcctggcgggggctctactatctactcaatgattcaatcccaaagctccgctccgacttcccaagagcccgcttacactctctactcactgatacagccttcaagaaaatcaggctctcggaaacggaatcattccccatccttcaatagtaccatctatgaagtaatcggtaagagtcaacctaaagctcaaaaccccgctcgcttgagccgcaaggagctggaaaacttcgatgtatatagccgcgccaagagaagcggatctggcgtgaagcagaccctgaatttcgacctgctgaagctggctggcgacgtggaatccaacccaggcccttctagaggccatatgaccgagtacaagcccacggtgcgcctcgccacccgcgacgacgtccccagggccgtacgcaccctcgccgccgcgttcgccgactaccccgccacgcgccacaccgtcgatccggaccgccacatcgagcgggtcaccgagctgcaagaactcttcctcacgcgcgtcgggctcgacatcggcaaggtgtgggtcgcggacgacggcgccgcggtggcggtctggaccacgccggagagcgtcgaagcgggggcggtgttcgccgagatcggcccgcgcatggccgagttgagcggttcccggctggccgcgcagcaacagatggaaggcctcctggcgccgcaccggcccaaggagcccgcgtggttcctggccaccgtcggcgtctcgcccgaccaccagggcaagggtctgggcagcgccgtcgtgctccccggagtggaggcggccgagcgcgccggggtgcccgccttcctggagacctccgcgccccgcaacctccccttctacgagcggctcggcttcaccgtcaccgccgacgtcgaggtgcccgaaggaccgcgcacctggtgcatgacccgcaagcccggtgcctga

SEQ ID NO: 32850 - DNA, 3387 bp, synthetic construct
  source 1..3387: mol_type = other DNA
atggccttaccagtgaccgccttgctcctgccgctggccttgctgctccacgccgccaggccggacatccagatgacacagagccctagcagcctgtctgccagcgtgggagacagagtgaccatcacatgcaaggccagcgaccacatcaacaactggctggcctggtatcagcagaagcctggacaggcccctaagctgctgatctacggcgctaccacactggaaacaggcgtgcccagcagattttctggcagcggctctggcaccgactacaccctgacaatatccagcctccagcctgaggacttcgccacctactactgtcagcagagctggaacaccccttggacattcggccagggcaccaagctggaaatcaagagactcgaggacctgaagaacgtgttcccacctgaggtggccgtgttcgagcctagcgaggccgagatcagccacacccagaaagccaccctcgtgtgcctggctaccggcttctaccccgaccatgtggaactgtcttggtgggtcaacggcaaagaggtgcacagcggcgtgtctaccgacccccagccactgaaagaacagcccgccctgaacgacagccggtactgcctgagcagcagactgagagtgtccgccaccttctggcagaacccccggaaccacttcagatgccaggtgcagttctacggcctgagcgagaacgacgagtggacccaggacagagccaagcccgtgacccagatcgtgtctgccgaagcctggggcagagccgattgcggatcccagagcttcggcctgctggaccccaagctgtgctacctgctggatggcatcctgttcatctacggcgtgatcctgaccgccctgttcctgagagtgaagttcagcagaagcgccgacgcccctgcctaccagcagggacagaaccaactgtacaacgagctgaacctgggcagacgggaagagtacgacgtgctggacaagcggagaggcagggaccctgagatgggcggaaagccccggagaaagaacccccaggaaggactgtataacgaactccagaaagacaagatggccgaagcctacagcgagatcggcatgaagggcgagcggagaagaggcaagggccacgatggcctgtaccagggcctgagcaccgccaccaaggacacctatgacgccctgcacatgcaggccctgcctccaagaagggccaagcgatctggatctggagcaacaaacttctcactactcaaacaagcaggtgacgtggaggagaatcccgggcctactagtgccaccatggactggatttggcgcatccttttccttgtcggcgctgctaccggcgcccattccgggcccgaagtgcagctggttgaatctggcggaggactggttcaggctggcggatctctgagactgtcttgtgccgccagcggcagaacctttagcatgggctggtttagacaggcccctggcaaagagagagagttcgtcgccgccatcacatactctggcggcagcccttactacgccgactctgtgaagggcagattcaccatcagccgggacaacgccaagaacaccgtgtacctccagatgaacagcctgaagcctgaggacaccgccgtgtactactgcgccgccaatccaacatacggcagcgactggaacgccgagaattggggccagggaacccaagtgacagtgtctagcggatccggcggcggaggatctggcggaggcggatctgggggcggaggctctttcgaacaagttcagcttcaacagcctggcgctgagctggtcaaacctggcgcttctgtgaagatgagctgcaaagccagcggctacgccttcagcagctactggatcaactggatgaagcagaaacccggccagggactcgaatggatcggccaaatctatcccggcgacggcgacaccaactacaacggcaagttcaagggcagagccacactgaccgccgatacctctagcagcacagcctacatgcagctgagcagcctgaccagcgaagatagcgccgtgtacttctgtgcccggtccatcacaacagtcgtgggctgcgctatggactattggggccagggaacaagcgtgaccgtgtctagtacgcgtatccagaaccctgatcctgccgtgtaccagctgcgggatagcaagagcagcgacaagagcgtgtgtctgttcaccgacttcgacagccagaccaacgtgtcccagagcaaggactccgacgtgtacatcaccgataagaccgtgctggacatgcggagcatggacttcaagagcaactccgccgtggcctggtccaacaagtccgatttcgcctgcgccaacgccttcaacaacagcattatccccgaggacacattcttcccaagccccgagagcagctgcggtaccatcactcaaggtttggcagtgtcaaccatctcatcattctttccacctggctaccaagtgtccttctgcctggtcatggtgctgctgttcgccgtggataccggcctgtacttcagcgtcaagagaggccggaagaagctgctgtacatcttcaagcagcctttcatgcggcccgtgcagaccacccaggaagaggacggctgctcctgccggttccccgaggaagaagaaggcggctgcgagctgcgcgccaagagaagcggatctggcgtgaagcagaccctgaatttcgacctgctgaagctggctggcgacgtggaatccaacccaggcccttctagaggccatatgaccgagtacaagcccacggtgcgcctcgccacccgcgacgacgtccccagggccgtacgcaccctcgccgccgcgttcgccgactaccccgccacgcgccacaccgtcgatccggaccgccacatcgagcgggtcaccgagctgcaagaactcttcctcacgcgcgtcgggctcgacatcggcaaggtgtgggtcgcggacgacggcgccgcggtggcggtctggaccacgccggagagcgtcgaagcgggggcggtgttcgccgagatcggcccgcgcatggccgagttgagcggttcccggctggccgcgcagcaacagatggaaggcctcctggcgccgcaccggcccaaggagcccgcgtggttcctggccaccgtcggcgtctcgcccgaccaccagggcaagggtctgggcagcgccgtcgtgctccccggagtggaggcggccgagcgcgccggggtgcccgccttcctggagacctccgcgccccgcaacctccccttctacgagcggctcggcttcaccgtcaccgccgacgtcgaggtgcccgaaggaccgcgcacctggtgcatgacccgcaagcccggtgcctga

SEQ ID NO: 32851 - DNA, 3015 bp, synthetic construct
  source 1..3015: mol_type = other DNA
atggccttaccagtgaccgccttgctcctgccgctggccttgctgctccacgccgccaggccggaagtgcagctggttgaatctggcggaggactggttcaggctggcggatctctgagactgtcttgtgccgccagcggcagaacctttagcatgggctggtttagacaggcccctggcaaagagagagagttcgtcgccgccatcacatactctggcggcagcccttactacgccgactctgtgaagggcagattcaccatcagccgggacaacgccaagaacaccgtgtacctccagatgaacagcctgaagcctgaggacaccgccgtgtactactgcgccgccaatccaacatacggcagcgactggaacgccgagaattggggccagggaacccaagtgacagtgtctagcggtaccggcggaggcggatctggcggcggaggtagcggtggcggaggatctgaattcgacatccagatgacacagagccctagcagcctgtctgccagcgtgggagacagagtgaccatcacatgcaaggccagcgaccacatcaacaactggctggcctggtatcagcagaagcctggacaggcccctaagctgctgatctacggcgctaccacactggaaacaggcgtgcccagcagattttctggcagcggctctggcaccgactacaccctgacaatatccagcctccagcctgaggacttcgccacctactactgtcagcagagctggaacaccccttggacattcggccagggcaccaagctggaaatcaagagactcgaggacctgaagaacgtgttcccacctgaggtggccgtgttcgagcctagcgaggccgagatcagccacacccagaaagccaccctcgtgtgcctggctaccggcttctaccccgaccatgtggaactgtcttggtgggtcaacggcaaagaggtgcacagcggcgtgtgtaccgacccccagccactgaaagaacagcccgccctgaacgacagccggtactgcctgagcagcagactgagagtgtccgccaccttctggcagaacccccggaaccacttcagatgccaggtgcagttctacggcctgagcgagaacgacgagtggacccaggacagagccaagcccgtgacccagatcgtgtctgccgaagcctggggcagagccgattgcggctttaccagcgagagctaccagcagggcgtgctgagcgccaccatcctgtacttgttgctgctgctgaagtccgtggtgtacttcgccatcatcacatgctgcctgctgcggagaaccgccttctgctgcaacggcgagaagtctagggccaagcgatctggatctggagcaacaaacttctcactactcaaacaagcaggtgacgtggaggagaatcccgggcctactagtatggactggatttggcgcatccttttccttgtcggcgctgctaccggcgcgcattccttcgaacaagttcagcttcaacagcctggcgctgagctggtcaaacctggcgcttctgtgaagatgagctgcaaagccagcggctacgccttcagcagctactggatcaactggatgaagcagaaacccggccagggactcgaatggatcggccaaatctatcccggcgacggcgacaccaactacaacggcaagttcaagggcagagccacactgaccgccgatacctctagcagcacagcctacatgcagctgagcagcctgaccagcgaagatagcgccgtgtacttctgtgcccggtccatcacaacagtcgtgggctgcgctatggactattggggccagggaacaagcgtgaccgtgtctagtacgcgtcctcacaccaagcccagcgtgttcgtgatgaagaacggcaccaacgtggcctgcctcgtgaaagagttctaccccaaggacatcaggatcaacctggtgtccagcaagaagatcaccgagttcgaccccgccatcgtgatctcccccagcggcaagtacaacgccgtgaagctggggaagtacgaggacagcaacagcgtgacctgctccgtgcagcacgacaacaagaccgtgcacagcaccgactttgaagtgaaaaccgactccaccgaccacgtgaagcccaaagagacagagaacaccaagcagcccagcaagagctgccacaagcccaaggccatcgtgcacaccgagaaagtgaacatgatgagcctgaccgtgctgggcctgcggatgctgttcgccaaaaccgtggccgtgaacttcctgctgaccgccaagctgttcttcctccgcgccaagagaagcggatctggcgtgaagcagaccctgaatttcgacctgctgaagctggctggcgacgtggaatccaacccaggcccttctagaggccatatgaccgagtacaagcccacggtgcgcctcgccacccgcgacgacgtccccagggccgtacgcaccctcgccgccgcgttcgccgactaccccgccacgcgccacaccgtcgatccggaccgccacatcgagcgggtcaccgagctgcaagaactcttcctcacgcgcgtcgggctcgacatcggcaaggtgtgggtcgcggacgacggcgccgcggtggcggtctggaccacgccggagagcgtcgaagcgggggcggtgttcgccgagatcggcccgcgcatggccgagttgagcggttcccggctggccgcgcagcaacagatggaaggcctcctggcgccgcaccggcccaaggagcccgcgtggttcctggccaccgtcggcgtctcgcccgaccaccagggcaagggtctgggcagcgccgtcgtgctccccggagtggaggcggccgagcgcgccggggtgcccgccttcctggagacctccgcgccccgcaacctccccttctacgagcggctcggcttcaccgtcaccgccgacgtcgaggtgcccgaaggaccgcgcacctggtgcatgacccgcaagcccggtgcctga

SEQ ID NO: 32852 - DNA, 2979 bp, synthetic construct
  source 1..2979: mol_type = other DNA
atggccttaccagtgaccgccttgctcctgccgctggccttgctgctccacgccgccaggccggaagtgcagctggttgaatctggcggaggactggttcaggctggcggatctctgagactgtcttgtgccgccagcggcagaacctttagcatgggctggtttagacaggcccctggcaaagagagagagttcgtcgccgccatcacatactctggcggcagcccttactacgccgactctgtgaagggcagattcaccatcagccgggacaacgccaagaacaccgtgtacctccagatgaacagcctgaagcctgaggacaccgccgtgtactactgcgccgccaatccaacatacggcagcgactggaacgccgagaattggggccagggaacccaagtgacagtgtctagcggtaccggcggaggcggatctggcggcggaggtagcggtggcggaggatctgaattcgacatccagatgacacagagccctagcagcctgtctgccagcgtgggagacagagtgaccatcacatgcaaggccagcgaccacatcaacaactggctggcctggtatcagcagaagcctggacaggcccctaagctgctgatctacggcgctaccacactggaaacaggcgtgcccagcagattttctggcagcggctctggcaccgactacaccctgacaatatccagcctccagcctgaggacttcgccacctactactgtcagcagagctggaacaccccttggacattcggccagggcaccaagctggaaatcaagagactcgaggacctgaagaacgtgttcccacctgaggtggccgtgttcgagcctagcgaggccgagatcagccacacccagaaagccaccctcgtgtgcctggctaccggcttctaccccgaccgtgtggaactgtcttggtgggtcaacggcaaagaggtgcacagcggcgtgtgtaccgacccccagccactgaaagaacagcccgccctgaacgacagccggtactgcctgagcagcagactgagagtgtccgccaccttctggcagaacccccggaaccacttcagatgccaggtgcagttctacggcctgagcgagaacgacgagtggacccaggacagagccaagcccgtgacccagatcgtgtctgccgaagcctggggcagagccgattgcggctttaccagcgagagctaccagcagggcgtgctgagcgcctactacatgtacttgttgctgctgctgaagtccgtggtgtacttcgccatcatcacatgctgcctgctgcggagaaccgccttctgctgcaacggcgagaagtctagggccaagcgatctggatctggagcaacaaacttctcactactcaaacaagcaggtgacgtggaggagaatcccgggcctactagtatggactggatttggcgcatccttttccttgtcggcgctgctaccggcgcgcattccttcgaacaagttcagctggttcagagcggagccgaagtgaagaaacctggcagcagcgtgaaggtgtcctgcaaagcaagcggcggcacctttagcacctacgccatccactgggttcgacaggcaccaggacaaggactggaatggatgggcagaatcatccccatcgagggcagagcctactacgcccagaaattccagggcagagtgaccatcaccgccgacgagtctacaagcaccgcctacatggaactgagcagcctgagaagcgaggataccgctgtgtactattgcgccagaggccggtacagctacagatattggttcgactactggggccagggcaccctggttacagtctcttctacgcgtatccagaaccctgatcctgccgtgtaccagctgcgggatagcaagagcagcgacaagagcgtgtgtctgttcaccgacttcgacagccagaccaacgtgtcccagagcaaggactccgacgtgtacatcaccgataagtgcgtgctggacatgcggagcatggacttcaagagcaactccgccgtggcctggtccaacaagtccgatttcgcctgcgccaacgccttcaacaacagcattatccccgaggacacattcttcccaagccccgagagcagctgcgacgtgaagctggtggaaaagagcttcgagacagacaccaacctgaacttccagaacctgagcgtgatcggcttcagaatcctgctgctgaaagtggccggctttaacctgctgatgaccctgcggctgtggtccagccgcgccaagagaagcggatctggcgtgaagcagaccctgaatttcgacctgctgaagctggctggcgacgtggaatccaacccaggcccttctagaggccatatgaccgagtacaagcccacggtgcgcctcgccacccgcgacgacgtccccagggccgtacgcaccctcgccgccgcgttcgccgactaccccgccacgcgccacaccgtcgatccggaccgccacatcgagcgggtcaccgagctgcaagaactcttcctcacgcgcgtcgggctcgacatcggcaaggtgtgggtcgcggacgacggcgccgcggtggcggtctggaccacgccggagagcgtcgaagcgggggcggtgttcgccgagatcggcccgcgcatggccgagttgagcggttcccggctggccgcgcagcaacagatggaaggcctcctggcgccgcaccggcccaaggagcccgcgtggttcctggccaccgtcggcgtctcgcccgaccaccagggcaagggtctgggcagcgccgtcgtgctccccggagtggaggcggccgagcgcgccggggtgcccgccttcctggagacctccgcgccccgcaacctccccttctacgagcggctcggcttcaccgtcaccgccgacgtcgaggtgcccgaaggaccgcgcacctggtgcatgacccgcaagcccggtgcctga

SEQ ID NO: 32853 - DNA, 3015 bp, synthetic construct
  source 1..3015: mol_type = other DNA
atggccttaccagtgaccgccttgctcctgccgctggccttgctgctccacgccgccaggccggaagtgcagctggttgaatctggcggaggactggttcaggctggcggatctctgagactgtcttgtgccgccagcggcagaacctttagcatgggctggtttagacaggcccctggcaaagagagagagttcgtcgccgccatcacatactctggcggcagcccttactacgccgactctgtgaagggcagattcaccatcagccgggacaacgccaagaacaccgtgtacctccagatgaacagcctgaagcctgaggacaccgccgtgtactactgcgccgccaatccaacatacggcagcgactggaacgccgagaattggggccagggaacccaagtgacagtgtctagcggtaccggcggaggcggatctggcggcggaggtagcggtggcggaggatctgaattcgacatccagatgacacagagccctagcagcctgtctgccagcgtgggagacagagtgaccatcacatgcaaggccagcgaccacatcaacaactggctggcctggtatcagcagaagcctggacaggcccctaagctgctgatctacggcgctaccacactggaaacaggcgtgcccagcagattttctggcagcggctctggcaccgactacaccctgacaatatccagcctccagcctgaggacttcgccacctactactgtcagcagagctggaacaccccttggacattcggccagggcaccaagctggaaatcaagagactcgaggacctgaagaacgtgttcccacctgaggtggccgtgttcgagcctagcgaggccgagatcagccacacccagaaagccaccctcgtgtgcctggctaccggcttctaccccgaccgtgtggaactgtcttggtgggtcaacggcaaagaggtgcacagcggcgtgtgtaccgacccccagccactgaaagaacagcccgccctgaacgacagccggtactgcctgagcagcagactgagagtgtccgccaccttctggcagaacccccggaaccacttcagatgccaggtgcagttctacggcctgagcgagaacgacgagtggacccaggacagagccaagcccgtgacccagatcgtgtctgccgaagcctggggcagagccgattgcggctttaccagcgagagctaccagcagggcgtgctgagcgcctactacatgtacttgttgctgctgctgaagtccgtggtgtacttcgccatcatcacatgctgcctgctgcggagaaccgccttctgctgcaacggcgagaagtctagggccaagcgatctggatctggagcaacaaacttctcactactcaaacaagcaggtgacgtggaggagaatcccgggcctactagtatggactggatttggcgcatccttttccttgtcggcgctgctaccggcgcgcattccttcgaacaagttcagcttcaacagcctggcgctgagctggtcaaacctggcgcttctgtgaagatgagctgcaaagccagcggctacgccttcagcagctactggatcaactggatgaagcagaaacccggccagggactcgaatggatcggccaaatctatcccggcgacggcgacaccaactacaacggcaagttcaagggcagagccacactgaccgccgatacctctagcagcacagcctacatgcagctgagcagcctgaccagcgaagatagcgccgtgtacttctgtgcccggtccatcacaacagtcgtgggctgcgctatggactattggggccagggaacaagcgtgaccgtgtctagtacgcgtcctcacaccaagcccagcgtgttcgtgatgaagaacggcaccaacgtggcctgcctcgtgaaagagttctaccccaaggacatcaggatcaacctggtgtccagcaagaagatcaccgagttcgaccccgccatcgtgatctcccccagcggcaagtacaacgccgtgaagctggggaagtacgaggacagcaacagcgtgacctgctccgtgcagcacgacaacaagaccgtgcacagcaccgactttgaagtgaaaaccgactccaccgaccacgtgaagcccaaagagacagagaacaccaagcagcccagcaagagctgccacaagcccaaggccatcgtgcacaccgagaaagtgaacatgatgagcctgaccgtgctgggcctgcggatgctgttcgccaaaaccgtggccgtgaacttcctgctgaccgccaagctgttcttcctccgcgccaagagaagcggatctggcgtgaagcagaccctgaatttcgacctgctgaagctggctggcgacgtggaatccaacccaggcccttctagaggccatatgaccgagtacaagcccacggtgcgcctcgccacccgcgacgacgtccccagggccgtacgcaccctcgccgccgcgttcgccgactaccccgccacgcgccacaccgtcgatccggaccgccacatcgagcgggtcaccgagctgcaagaactcttcctcacgcgcgtcgggctcgacatcggcaaggtgtgggtcgcggacgacggcgccgcggtggcggtctggaccacgccggagagcgtcgaagcgggggcggtgttcgccgagatcggcccgcgcatggccgagttgagcggttcccggctggccgcgcagcaacagatggaaggcctcctggcgccgcaccggcccaaggagcccgcgtggttcctggccaccgtcggcgtctcgcccgaccaccagggcaagggtctgggcagcgccgtcgtgctccccggagtggaggcggccgagcgcgccggggtgcccgccttcctggagacctccgcgccccgcaacctccccttctacgagcggctcggcttcaccgtcaccgccgacgtcgaggtgcccgaaggaccgcgcacctggtgcatgacccgcaagcccggtgcctga

SEQ ID NO: 32854 - DNA, 2844 bp, synthetic construct
  source 1..2844: mol_type = other DNA
atggccttaccagtgaccgccttgctcctgccgctggccttgctgctccacgccgccaggccgatgggcagctgggaagagttcgagctgagactgaacgccatcgaggaacggctgtatgccctcggaggatctgaagccgagctggcctacttcgagtacgtgatcgccgacttcgagggcaacctgcagcggtacaaaggcaagggcaaccctgaagtggaagccctgtacttcgaggccgacgccatcttcgaggaactggtggcctacagacacaacggtaccggcggaggcggatctggcggcggaggtagcggtggcggaggatctgaattcagctacgtgctgacacagcctccatccgtgtctgtggctccaggacagaccgccagaatcacatgcggcggcaacaacatcggcggcaagagcgtgcactggtatcagcagccacctggacaggctccagtggtggtggtgtacgacgacagcgatagacctagcggcatccccgagagattcagcggcagcaattccggcaataccgccacactgaccatcagcagagtggaagctggcgacgaggccgtgtactactgccaagtgtgggacagcagcagcgatcacgtggtgtttggcggcggaacaaagctgacagtgcttctcgaggacctgaagaacgtgttcccacctgaggtggccgtgttcgagcctagcgaggccgagatcagccacacccagaaagccaccctcgtgtgcctggctaccggcttctaccccgaccgtgtggaactgtcttggtgggtcaacggcaaagaggtgcacagcggcgtgtgtaccgacccccagccactgaaagaacagcccgccctgaacgacagccggtactgcctgagcagcagactgagagtgtccgccaccttctggcagaacccccggaaccacttcagatgccaggtgcagttctacggcctgagcgagaacgacgagtggacccaggacagagccaagcccgtgacccagatcgtgtctgccgaagcctggggcagagccgattgcggctttaccagcgagagctaccagcagggcgtgctgagcgcctactacatgtacttgttgctgctgctgaagtccgtggtgtacttcgccatcatcacatgctgcctgctgcggagaaccgccttctgctgcaacggcgagaagtctagggccaagcgatctggatctggagcaacaaacttctcactactcaaacaagcaggtgacgtggaggagaatcccgggcctactagtatggactggatttggcgcatccttttccttgtcggcgctgctaccggcgcgcattccttcgaacaagttcagctggttcagagcggagccgaagtgaagaaacctggcagcagcgtgaaggtgtcctgcaaagcaagcggcggcacctttagcacctacgccatccactgggttcgacaggcaccaggacaaggactggaatggatgggcagaatcatccccatcgagggcagagcctactacgcccagaaattccagggcagagtgaccatcaccgccgacgagtctacaagcaccgcctacatggaactgagcagcctgagaagcgaggataccgctgtgtactattgcgccagaggccggtacagctacagatattggttcgactactggggccagggcaccctggttacagtctcttctacgcgtatccagaaccctgatcctgccgtgtaccagctgcgggatagcaagagcagcgacaagagcgtgtgtctgttcaccgacttcgacagccagaccaacgtgtcccagagcaaggactccgacgtgtacatcaccgataagtgcgtgctggacatgcggagcatggacttcaagagcaactccgccgtggcctggtccaacaagtccgatttcgcctgcgccaacgccttcaacaacagcattatccccgaggacacattcttcccaagccccgagagcagctgcgacgtgaagctggtggaaaagagcttcgagacagacaccaacctgaacttccagaacctgagcgtgatcggcttcagaatcctgctgctgaaagtggccggctttaacctgctgatgaccctgcggctgtggtccagccgcgccaagagaagcggatctggcgtgaagcagaccctgaatttcgacctgctgaagctggctggcgacgtggaatccaacccaggcccttctagaggccatatgaccgagtacaagcccacggtgcgcctcgccacccgcgacgacgtccccagggccgtacgcaccctcgccgccgcgttcgccgactaccccgccacgcgccacaccgtcgatccggaccgccacatcgagcgggtcaccgagctgcaagaactcttcctcacgcgcgtcgggctcgacatcggcaaggtgtgggtcgcggacgacggcgccgcggtggcggtctggaccacgccggagagcgtcgaagcgggggcggtgttcgccgagatcggcccgcgcatggccgagttgagcggttcccggctggccgcgcagcaacagatggaaggcctcctggcgccgcaccggcccaaggagcccgcgtggttcctggccaccgtcggcgtctcgcccgaccaccagggcaagggtctgggcagcgccgtcgtgctccccggagtggaggcggccgagcgcgccggggtgcccgccttcctggagacctccgcgccccgcaacctccccttctacgagcggctcggcttcaccgtcaccgccgacgtcgaggtgcccgaaggaccgcgcacctggtgcatgacccgcaagcccggtgcctga

SEQ ID NO: 32855 - DNA, 2853 bp, synthetic construct
  source 1..2853: mol_type = other DNA
atggccttaccagtgaccgccttgctcctgccgctggccttgctgctccacgccgccaggccggacatccagatgacacagagccctagcagcctgtctgccagcgtgggagacagagtgaccatcacatgcaaggccagcgaccacatcaacaactggctggcctggtatcagcagaagcctggacaggcccctaagctgctgatctacggcgctaccacactggaaacaggcgtgcccagcagattttctggcagcggctctggcaccgactacaccctgacaatatccagcctccagcctgaggacttcgccacctactactgtcagcagagctggaacaccccttggacattcggccagggcaccaagctggaaatcaagagactcgaggacctgaagaacgtgttcccacctgaggtggccgtgttcgagcctagcgaggccgagatcagccacacccagaaagccaccctcgtgtgcctggctaccggcttctaccccgaccgtgtggaactgtcttggtgggtcaacggcaaagaggtgcacagcggcgtgtgtaccgacccccagccactgaaagaacagcccgccctgaacgacagccggtactgcctgagcagcagactgagagtgtccgccaccttctggcagaacccccggaaccacttcagatgccaggtgcagttctacggcctgagcgagaacgacgagtggacccaggacagagccaagcccgtgacccagatcgtgtctgccgaagcctggggcagagccgattgcggctttaccagcgagagctaccagcagggcgtgctgagcgcctactacatgtacttgttgctgctgctgaagtccgtggtgtacttcgccatcatcacatgctgcctgctgcggagaaccgccttctgctgcaacggcgagaagtctagggccaagcgatctggatctggagcaacaaacttctcactactcaaacaagcaggtgacgtggaggagaatcccgggcctactagtgccaccatggactggatttggcgcatccttttccttgtcggcgctgctaccggcgcccattccgggcccatgggatcttggagcgagttttacgatcggctgcacgccattcaccaccggctgtatgctctcggaggaagcgaagctgagctggccgcttttgaaaaagaaattgccgctttcgagtccgagcttcaggcttacaaaggcaaagggaatcctgaggtcgaggccctgagagataccgccgccttcatcagaacccggttgcaggcataccggcacaacggatccggcggcggaggatctggcggaggcggatctgggggcggaggctctttcgaacaagttcagcttcaacagcctggcgctgagctggtcaaacctggcgcttctgtgaagatgagctgcaaagccagcggctacgccttcagcagctactggatcaactggatgaagcagaaacccggccagggactcgaatggatcggccaaatctatcccggcgacggcgacaccaactacaacggcaagttcaagggcagagccacactgaccgccgatacctctagcagcacagcctacatgcagctgagcagcctgaccagcgaagatagcgccgtgtacttctgtgcccggtccatcacaacagtcgtgggctgcgctatggactattggggccagggaacaagcgtgaccgtgtctagtacgcgtatccagaaccctgatcctgccgtgtaccagctgcgggatagcaagagcagcgacaagagcgtgtgtctgttcaccgacttcgacagccagaccaacgtgtcccagagcaaggactccgacgtgtacatcaccgataagtgcgtgctggacatgcggagcatggacttcaagagcaactccgccgtggcctggtccaacaagtccgatttcgcctgcgccaacgccttcaacaacagcattatccccgaggacacattcttcccaagccccgagagcagctgcgacgtgaagctggtggaaaagagcttcgagacagacaccaacctgaacttccagaacctgagcgtgatcggcttcagaatcctgctgctgaaagtggccggctttaacctgctgatgaccctgcggctgtggtccagccgcgccaagagaagcggatctggcgtgaagcagaccctgaatttcgacctgctgaagctggctggcgacgtggaatccaacccaggcccttctagaggccatatgaccgagtacaagcccacggtgcgcctcgccacccgcgacgacgtccccagggccgtacgcaccctcgccgccgcgttcgccgactaccccgccacgcgccacaccgtcgatccggaccgccacatcgagcgggtcaccgagctgcaagaactcttcctcacgcgcgtcgggctcgacatcggcaaggtgtgggtcgcggacgacggcgccgcggtggcggtctggaccacgccggagagcgtcgaagcgggggcggtgttcgccgagatcggcccgcgcatggccgagttgagcggttcccggctggccgcgcagcaacagatggaaggcctcctggcgccgcaccggcccaaggagcccgcgtggttcctggccaccgtcggcgtctcgcccgaccaccagggcaagggtctgggcagcgccgtcgtgctccccggagtggaggcggccgagcgcgccggggtgcccgccttcctggagacctccgcgccccgcaacctccccttctacgagcggctcggcttcaccgtcaccgccgacgtcgaggtgcccgaaggaccgcgcacctggtgcatgacccgcaagcccggtgcctga

SEQ ID NO: 32856 - DNA, 2886 bp, synthetic construct
  source 1..2886: mol_type = other DNA
atggccttaccagtgaccgccttgctcctgccgctggccttgctgctccacgccgccaggccggacatccagatgacacagagccctagcagcctgtctgccagcgtgggagacagagtgaccatcacatgcaaggccagcgaccacatcaacaactggctggcctggtatcagcagaagcctggacaggcccctaagctgctgatctacggcgctaccacactggaaacaggcgtgcccagcagattttctggcagcggctctggcaccgactacaccctgacaatatccagcctccagcctgaggacttcgccacctactactgtcagcagagctggaacaccccttggacattcggccagggcaccaagctggaaatcaagagactcgaggacctgaagaacgtgttcccacctgaggtggccgtgttcgagcctagcgaggccgagatcagccacacccagaaagccaccctcgtgtgcctggctaccggcttctaccccgaccatgtggaactgtcttggtgggtcaacggcaaagaggtgcacagcggcgtgtgtaccgacccccagccactgaaagaacagcccgccctgaacgacagccggtactgcctgagcagcagactgagagtgtccgccaccttctggcagaacccccggaaccacttcagatgccaggtgcagttctacggcctgagcgagaacgacgagtggacccaggacagagccaagcccgtgacccagatcgtgtctgccgaagcctggggcagagccgattgcggctttaccagcgagagctaccagcagggcgtgctgagcgccaccatcctgtacttgttgctgctgctgaagtccgtggtgtacttcgccatcatcacatgctgcctgctgcggagaaccgccttctgctgcaacggcgagaagtctagggccaagcgatctggatctggagcaacaaacttctcactactcaaacaagcaggtgacgtggaggagaatcccgggcctactagtgccaccatggactggatttggcgcatccttttccttgtcggcgctgctaccggcgcccattccgggcccatgggatcttggagcgagttttacgatcggctgcacgccattcaccaccggctgtatgctctcggaggaagcgaagctgagctggccgcttttgaaaaagaaattgccgctttcgagtccgagcttcaggcttacaaaggcaaagggaatcctgaggtcgaggccctgagagataccgccgccttcatcagaacccggttgcaggcataccggcacaacggatccggcggcggaggatctggcggaggcggatctgggggcggaggctctttcgaacaagttcagcttcaacagcctggcgctgagctggtcaaacctggcgcttctgtgaagatgagctgcaaagccagcggctacgccttcagcagctactggatcaactggatgaagcagaaacccggccagggactcgaatggatcggccaaatctatcccggcgacggcgacaccaactacaacggcaagttcaagggcagagccacactgaccgccgatacctctagcagcacagcctacatgcagctgagcagcctgaccagcgaagatagcgccgtgtacttctgtgcccggtccatcacaacagtcgtgggctgcgctatggactattggggccagggaacaagcgtgaccgtgtctagtacgcgtcctcacaccaagcccagcgtgttcgtgatgaagaacggcaccaacgtggcctgcctcgtgaaagagttctaccccaaggacatcaggatcaacctggtgtccagcaagaagatcaccgagttcgaccccgccatcgtgatctcccccagcggcaagtacaacgccgtgaagctggggaagtacgaggacagcaacagcgtgacctgctccgtgcagcacgacaacaagaccgtgcacagcaccgactttgaagtgaaaaccgactccaccgaccacgtgaagcccaaagagacagagaacaccaagcagcccagcaagagctgccacaagcccaaggccatcgtgcacaccgagaaagtgaacatgatgagcctgaccgtgctgggcctgcggatgctgttcgccaaaaccgtggccgtgaacttcctgctgaccgccaagctgttcttcctccgcgccaagagaagcggatctggcgtgaagcagaccctgaatttcgacctgctgaagctggctggcgacgtggaatccaacccaggcccttctagaggccatatgaccgagtacaagcccacggtgcgcctcgccacccgcgacgacgtccccagggccgtacgcaccctcgccgccgcgttcgccgactaccccgccacgcgccacaccgtcgatccggaccgccacatcgagcgggtcaccgagctgcaagaactcttcctcacgcgcgtcgggctcgacatcggcaaggtgtgggtcgcggacgacggcgccgcggtggcggtctggaccacgccggagagcgtcgaagcgggggcggtgttcgccgagatcggcccgcgcatggccgagttgagcggttcccggctggccgcgcagcaacagatggaaggcctcctggcgccgcaccggcccaaggagcccgcgtggttcctggccaccgtcggcgtctcgcccgaccaccagggcaagggtctgggcagcgccgtcgtgctccccggagtggaggcggccgagcgcgccggggtgcccgccttcctggagacctccgcgccccgcaacctccccttctacgagcggctcggcttcaccgtcaccgccgacgtcgaggtgcccgaaggaccgcgcacctggtgcatgacccgcaagcccggtgcctga

SEQ ID NO: 32857 - DNA, 2337 bp, synthetic construct
  source 1..2337: mol_type = other DNA
atggccttaccagtgaccgccttgctcctgccgctggccttgctgctccacgccgccaggccggacatccagatgacacagagccctagcagcctgtctgccagcgtgggagacagagtgaccatcacatgcaaggccagcgaccacatcaacaactggctggcctggtatcagcagaagcctggacaggcccctaagctgctgatctacggcgctaccacactggaaacaggcgtgcccagcagattttctggcagcggctctggcaccgactacaccctgacaatatccagcctccagcctgaggacttcgccacctactactgtcagcagagctggaacaccccttggacattcggccagggcaccaagctggaaatcaagagactcgagggacagcctaaggccaatcctaccgtgacactgttccctccaagcagcgaagaactccaggccaacaaggccacacttgtgtgcctgatctccgacttctaccctggggctgtgacagtggcttggaaggccgatggatctcctgtgaaagccggcgtggaaaccaccaagccatccaagcagagcaacaacaaatacgccgccagctcctacctgagcctgacacctgagcagtggaagtcccacagatcctacagctgccaagtgacccacgaaggcagcaccgtggaaaagacagtggcccctacagagtgcagcggatcccccatcaagaccgatgtgattacaatggaccccaaggacaactgctccaaggacgccaacgataccctgctgctccagctgaccaacaccagcgcctactacatgtacttgttgctgctgctgaagtccgtggtgtacttcgccatcatcacatgctgcctgctgcggagaaccgccttctgctgcaacggcgagaagtctagggccaagcgatctggatctggagcaacaaacttctcactactcaaacaagcaggtgacgtggaggagaatcccgggcctactagtgccaccatggactggatttggcgcatccttttccttgtcggcgctgctaccggcgcccattccgggcccatgggatcttggagcgagttttacgatcggctgcacgccattcaccaccggctgtatgctctcggaggaagcgaagctgagctggccgcttttgaaaaagaaattgccgctttcgagtccgagcttcaggcttacaaaggcaaagggaatcctgaggtcgaggccctgagagataccgccgccttcatcagaacccggttgcaggcataccggcacaacggatccggcggcggaggatctggcggaggcggatctgggggcggaggctctttcgaacaagttcagcttcaacagcctggcgctgagctggtcaaacctggcgcttctgtgaagatgagctgcaaagccagcggctacgccttcagcagctactggatcaactggatgaagcagaaacccggccagggactcgaatggatcggccaaatctatcccggcgacggcgacaccaactacaacggcaagttcaagggcagagccacactgaccgccgatacctctagcagcacagcctacatgcagctgagcagcctgaccagcgaagatagcgccgtgtacttctgtgcccggtccatcacaacagtcgtgggctgcgctatggactattggggccagggaacaagcgtgaccgtgtctagtacgcgtgcgtccactaagggtccgtcagtcttcccgctggcgccctgttcccgcagcacgagtgaatctaccgccgcccttgggtgcttggtaaaagactattttcctgagcccgttacagtatcatggaacagcggggctctgactagcggggtgcatacgttccctgcggttctgcaatctagcggactgtattctctctccagtgttgtgaccgtgccaagctccagcctcggtactaaaacttatacatgtaatgtggatcataaaccttcaaataccaaggttgacaaaagggtagagagtaagtacggtggtaccgaagtgaaaaccgactccaccgaccacgtgaagcccaaagagacagagaacaccaagcagcccagcaagagctgccacaagcccaaggccatcgtgcacaccgagaaagtgaacatgatgagcctgaccgtgctgggcctgcggatgctgttcgccaaaaccgtggccgtgaacttcctgctgaccgccaagctgttcttcctccgcgccaagagaagcggatctggcgtgaagcagaccctgaatttcgacctgctgaagctggctggcgacgtggaatccaacccaggcccttctagataa

SEQ ID NO: 32858 - DNA, 2337 bp, synthetic construct
  source 1..2337: mol_type = other DNA
atggccttaccagtgaccgccttgctcctgccgctggccttgctgctccacgccgccaggccggacatccagatgacacagagccctagcagcctgtctgccagcgtgggagacagagtgaccatcacatgcaaggccagcgaccacatcaacaactggctggcctggtatcagcagaagcctggacaggcccctaagctgctgatctacggcgctaccacactggaaacaggcgtgcccagcagattttctggcagcggctctggcaccgactacaccctgacaatatccagcctccagcctgaggacttcgccacctactactgtcagcagagctggaacaccccttggacattcggccagggcaccaagctggaaatcaagagactcgaggacctgaagaacgtgttcccacctgaggtggccgtgttcgagcctagcgaggccgagatcagccacacccagaaagccaccctcgtgtgcctggctaccggcttctaccccgaccatgtggaactgtcttggtgggtcaacggcaaagaggtgcacagcggcgtgtctaccgacccccagccactgaaagaacagcccgccctgaacgacagccggtactgcctgagcagcagactgagagtgtccgccaccttctggcagaacccccggaaccacttcagatgccaggtgcagttctacggcctgagcgagaacgacgagtggacccaggacagagccaagcccgtgacccagatcgtgtctgccgaagcctggggcagagccgattgcggatcctccaaggacgccaacgataccctgctgctccagctgaccaacaccagcgcctactacatgtacttgttgctgctgctgaagtccgtggtgtacttcgccatcatcacatgctgcctgctgcggagaaccgccttctgctgcaacggcgagaagtctagggccaagcgatctggatctggagcaacaaacttctcactactcaaacaagcaggtgacgtggaggagaatcccgggcctactagtgccaccatggactggatttggcgcatccttttccttgtcggcgctgctaccggcgcccattccgggcccatgggatcttggagcgagttttacgatcggctgcacgccattcaccaccggctgtatgctctcggaggaagcgaagctgagctggccgcttttgaaaaagaaattgccgctttcgagtccgagcttcaggcttacaaaggcaaagggaatcctgaggtcgaggccctgagagataccgccgccttcatcagaacccggttgcaggcataccggcacaacggatccggcggcggaggatctggcggaggcggatctgggggcggaggctctttcgaacaagttcagcttcaacagcctggcgctgagctggtcaaacctggcgcttctgtgaagatgagctgcaaagccagcggctacgccttcagcagctactggatcaactggatgaagcagaaacccggccagggactcgaatggatcggccaaatctatcccggcgacggcgacaccaactacaacggcaagttcaagggcagagccacactgaccgccgatacctctagcagcacagcctacatgcagctgagcagcctgaccagcgaagatagcgccgtgtacttctgtgcccggtccatcacaacagtcgtgggctgcgctatggactattggggccagggaacaagcgtgaccgtgtctagtacgcgtatccagaaccctgatcctgccgtgtaccagctgcgggatagcaagagcagcgacaagagcgtgtgtctgttcaccgacttcgacagccagaccaacgtgtcccagagcaaggactccgacgtgtacatcaccgataagaccgtgctggacatgcggagcatggacttcaagagcaactccgccgtggcctggtccaacaagtccgatttcgcctgcgccaacgccttcaacaacagcattatccccgaggacacattcttcccaagccccgagagcagctgcggtaccgaagtgaaaaccgactccaccgaccacgtgaagcccaaagagacagagaacaccaagcagcccagcaagagctgccacaagcccaaggccatcgtgcacaccgagaaagtgaacatgatgagcctgaccgtgctgggcctgcggatgctgttcgccaaaaccgtggccgtgaacttcctgctgaccgccaagctgttcttcctccgcgccaagagaagcggatctggcgtgaagcagaccctgaatttcgacctgctgaagctggctggcgacgtggaatccaacccaggcccttctagataa

SEQ ID NO: 32859 - DNA, 2382 bp, synthetic construct
  source 1..2382: mol_type = other DNA
atggccttaccagtgaccgccttgctcctgccgctggccttgctgctccacgccgccaggccggacatccagatgacacagagccctagcagcctgtctgccagcgtgggagacagagtgaccatcacatgcaaggccagcgaccacatcaacaactggctggcctggtatcagcagaagcctggacaggcccctaagctgctgatctacggcgctaccacactggaaacaggcgtgcccagcagattttctggcagcggctctggcaccgactacaccctgacaatatccagcctccagcctgaggacttcgccacctactactgtcagcagagctggaacaccccttggacattcggccagggcaccaagctggaaatcaagagactcgaggacctgaagaacgtgttcccacctgaggtggccgtgttcgagcctagcgaggccgagatcagccacacccagaaagccaccctcgtgtgcctggctaccggcttctaccccgaccatgtggaactgtcttggtgggtcaacggcaaagaggtgcacagcggcgtgtctaccgacccccagccactgaaagaacagcccgccctgaacgacagccggtactgcctgagcagcagactgagagtgtccgccaccttctggcagaacccccggaaccacttcagatgccaggtgcagttctacggcctgagcgagaacgacgagtggacccaggacagagccaagcccgtgacccagatcgtgtctgccgaagcctggggcagagccgattgcggatcccccatcaagaccgatgtgattacaatggaccccaaggacaactgctccaaggacgccaacgataccctgctgctccagctgaccaacaccagcgcctactacatgtacttgttgctgctgctgaagtccgtggtgtacttcgccatcatcacatgctgcctgctgcggagaaccgccttctgctgcaacggcgagaagtctagggccaagcgatctggatctggagcaacaaacttctcactactcaaacaagcaggtgacgtggaggagaatcccgggcctactagtgccaccatggactggatttggcgcatccttttccttgtcggcgctgctaccggcgcccattccgggcccatgggatcttggagcgagttttacgatcggctgcacgccattcaccaccggctgtatgctctcggaggaagcgaagctgagctggccgcttttgaaaaagaaattgccgctttcgagtccgagcttcaggcttacaaaggcaaagggaatcctgaggtcgaggccctgagagataccgccgccttcatcagaacccggttgcaggcataccggcacaacggatccggcggcggaggatctggcggaggcggatctgggggcggaggctctttcgaacaagttcagcttcaacagcctggcgctgagctggtcaaacctggcgcttctgtgaagatgagctgcaaagccagcggctacgccttcagcagctactggatcaactggatgaagcagaaacccggccagggactcgaatggatcggccaaatctatcccggcgacggcgacaccaactacaacggcaagttcaagggcagagccacactgaccgccgatacctctagcagcacagcctacatgcagctgagcagcctgaccagcgaagatagcgccgtgtacttctgtgcccggtccatcacaacagtcgtgggctgcgctatggactattggggccagggaacaagcgtgaccgtgtctagtacgcgtatccagaaccctgatcctgccgtgtaccagctgcgggatagcaagagcagcgacaagagcgtgtgtctgttcaccgacttcgacagccagaccaacgtgtcccagagcaaggactccgacgtgtacatcaccgataagaccgtgctggacatgcggagcatggacttcaagagcaactccgccgtggcctggtccaacaagtccgatttcgcctgcgccaacgccttcaacaacagcattatccccgaggacacattcttcccaagccccgagagcagctgcggtaccgaagtgaaaaccgactccaccgaccacgtgaagcccaaagagacagagaacaccaagcagcccagcaagagctgccacaagcccaaggccatcgtgcacaccgagaaagtgaacatgatgagcctgaccgtgctgggcctgcggatgctgttcgccaaaaccgtggccgtgaacttcctgctgaccgccaagctgttcttcctccgcgccaagagaagcggatctggcgtgaagcagaccctgaatttcgacctgctgaagctggctggcgacgtggaatccaacccaggcccttctagataa

SEQ ID NO: 32860 - DNA, 2292 bp, synthetic construct
  source 1..2292: mol_type = other DNA
atggccttaccagtgaccgccttgctcctgccgctggccttgctgctccacgccgccaggccggacatccagatgacacagagccctagcagcctgtctgccagcgtgggagacagagtgaccatcacatgcaaggccagcgaccacatcaacaactggctggcctggtatcagcagaagcctggacaggcccctaagctgctgatctacggcgctaccacactggaaacaggcgtgcccagcagattttctggcagcggctctggcaccgactacaccctgacaatatccagcctccagcctgaggacttcgccacctactactgtcagcagagctggaacaccccttggacattcggccagggcaccaagctggaaatcaagagactcgagggacagcctaaggccaatcctaccgtgacactgttccctccaagcagcgaagaactccaggccaacaaggccacacttgtgtgcctgatctccgacttctaccctggggctgtgacagtggcttggaaggccgatggatctcctgtgaaagccggcgtggaaaccaccaagccatccaagcagagcaacaacaaatacgccgccagctcctacctgagcctgacacctgagcagtggaagtcccacagatcctacagctgccaagtgacccacgaaggcagcaccgtggaaaagacagtggcccctacagagtgcagcggatcctccaaggacgccaacgataccctgctgctccagctgaccaacaccagcgcctactacatgtacttgttgctgctgctgaagtccgtggtgtacttcgccatcatcacatgctgcctgctgcggagaaccgccttctgctgcaacggcgagaagtctagggccaagcgatctggatctggagcaacaaacttctcactactcaaacaagcaggtgacgtggaggagaatcccgggcctactagtgccaccatggactggatttggcgcatccttttccttgtcggcgctgctaccggcgcccattccgggcccatgggatcttggagcgagttttacgatcggctgcacgccattcaccaccggctgtatgctctcggaggaagcgaagctgagctggccgcttttgaaaaagaaattgccgctttcgagtccgagcttcaggcttacaaaggcaaagggaatcctgaggtcgaggccctgagagataccgccgccttcatcagaacccggttgcaggcataccggcacaacggatccggcggcggaggatctggcggaggcggatctgggggcggaggctctttcgaacaagttcagcttcaacagcctggcgctgagctggtcaaacctggcgcttctgtgaagatgagctgcaaagccagcggctacgccttcagcagctactggatcaactggatgaagcagaaacccggccagggactcgaatggatcggccaaatctatcccggcgacggcgacaccaactacaacggcaagttcaagggcagagccacactgaccgccgatacctctagcagcacagcctacatgcagctgagcagcctgaccagcgaagatagcgccgtgtacttctgtgcccggtccatcacaacagtcgtgggctgcgctatggactattggggccagggaacaagcgtgaccgtgtctagtacgcgtgcgtccactaagggtccgtcagtcttcccgctggcgccctgttcccgcagcacgagtgaatctaccgccgcccttgggtgcttggtaaaagactattttcctgagcccgttacagtatcatggaacagcggggctctgactagcggggtgcatacgttccctgcggttctgcaatctagcggactgtattctctctccagtgttgtgaccgtgccaagctccagcctcggtactaaaacttatacatgtaatgtggatcataaaccttcaaataccaaggttgacaaaagggtagagagtaagtacggtggtaccgaagtgaaaaccgactccaccgaccacgtgaagcccaaagagacagagaacaccaagcagcccagcaagagctgccacaagcccaaggccatcgtgcacaccgagaaagtgaacatgatgagcctgaccgtgctgggcctgcggatgctgttcgccaaaaccgtggccgtgaacttcctgctgaccgccaagctgttcttcctccgcgccaagagaagcggatctggcgtgaagcagaccctgaatttcgacctgctgaagctggctggcgacgtggaatccaacccaggcccttctagataa

SEQ ID NO: 32861 - DNA, 2988 bp, synthetic construct
  source 1..2988: mol_type = other DNA
atggccttaccagtgaccgccttgctcctgccgctggccttgctgctccacgccgccaggccggacatccagatgacacagagccctagcagcctgtctgccagcgtgggagacagagtgaccatcacatgcaaggccagcgaccacatcaacaactggctggcctggtatcagcagaagcctggacaggcccctaagctgctgatctacggcgctaccacactggaaacaggcgtgcccagcagattttctggcagcggctctggcaccgactacaccctgacaatatccagcctccagcctgaggacttcgccacctactactgtcagcagagctggaacaccccttggacattcggccagggcaccaagctggaaatcaagagactcgaggacctgaagaacgtgttcccacctgaggtggccgtgttcgagcctagcgaggccgagatcagccacacccagaaagccaccctcgtgtgcctggctaccggcttctaccccgaccgtgtggaactgtcttggtgggtcaacggcaaagaggtgcacagcggcgtgtgtaccgacccccagccactgaaagaacagcccgccctgaacgacagccggtactgcctgagcagcagactgagagtgtccgccaccttctggcagaacccccggaaccacttcagatgccaggtgcagttctacggcctgagcgagaacgacgagtggacccaggacagagccaagcccgtgacccagatcgtgtctgccgaagcctggggcagagccgattgcggctttaccagcgagagctaccagcagggcgtgctgagcgcctactacatgtacttgttgctgctgctgaagtccgtggtgtacttcgccatcatcacatgctgcctgctgcggagaaccgccttctgctgcaacggcgagaagtctagggccaagcgatctggatctggagcaacaaacttctcactactcaaacaagcaggtgacgtggaggagaatcccgggcctactagtgccaccatggactggatttggcgcatccttttccttgtcggcgctgctaccggcgcccattccgggcccgaagtgcaactggttgaatccggtggcggcctggtgcaagcaggcggatctctcagacttagctgtgccgcctccggcagaaccttcacaatgggatggtttaggcaggctccagggaaagagagagagttcgtcgccgccatctctctgtctcccacactggcctactacgccgactctgtgaaaggccggttcaccatctccagagataatgccaagaacaccgtggtgctgcaaatgaactctctgaaacccgaggatacagccctgtactattgtgccgctgaccggaagtccgtgatgagcatcagacccgattactggggacagggcacacaagtcacagtgtcctctggatccggcggcggaggatctggcggaggcggatctgggggcggaggctctttcgaacaagttcagcttcaacagcctggcgctgagctggtcaaacctggcgcttctgtgaagatgagctgcaaagccagcggctacgccttcagcagctactggatcaactggatgaagcagaaacccggccagggactcgaatggatcggccaaatctatcccggcgacggcgacaccaactacaacggcaagttcaagggcagagccacactgaccgccgatacctctagcagcacagcctacatgcagctgagcagcctgaccagcgaagatagcgccgtgtacttctgtgcccggtccatcacaacagtcgtgggctgcgctatggactattggggccagggaacaagcgtgaccgtgtctagtacgcgtatccagaaccctgatcctgccgtgtaccagctgcgggatagcaagagcagcgacaagagcgtgtgtctgttcaccgacttcgacagccagaccaacgtgtcccagagcaaggactccgacgtgtacatcaccgataagtgcgtgctggacatgcggagcatggacttcaagagcaactccgccgtggcctggtccaacaagtccgatttcgcctgcgccaacgccttcaacaacagcattatccccgaggacacattcttcccaagccccgagagcagctgcgacgtgaagctggtggaaaagagcttcgagacagacaccaacctgaacttccagaacctgagcgtgatcggcttcagaatcctgctgctgaaagtggccggctttaacctgctgatgaccctgcggctgtggtccagccgcgccaagagaagcggatctggcgtgaagcagaccctgaatttcgacctgctgaagctggctggcgacgtggaatccaacccaggcccttctagaggccatatgaccgagtacaagcccacggtgcgcctcgccacccgcgacgacgtccccagggccgtacgcaccctcgccgccgcgttcgccgactaccccgccacgcgccacaccgtcgatccggaccgccacatcgagcgggtcaccgagctgcaagaactcttcctcacgcgcgtcgggctcgacatcggcaaggtgtgggtcgcggacgacggcgccgcggtggcggtctggaccacgccggagagcgtcgaagcgggggcggtgttcgccgagatcggcccgcgcatggccgagttgagcggttcccggctggccgcgcagcaacagatggaaggcctcctggcgccgcaccggcccaaggagcccgcgtggttcctggccaccgtcggcgtctcgcccgaccaccagggcaagggtctgggcagcgccgtcgtgctccccggagtggaggcggccgagcgcgccggggtgcccgccttcctggagacctccgcgccccgcaacctccccttctacgagcggctcggcttcaccgtcaccgccgacgtcgaggtgcccgaaggaccgcgcacctggtgcatgacccgcaagcccggtgcctga

SEQ ID NO: 32862 - DNA, 2967 bp, synthetic construct
  source 1..2967: mol_type = other DNA
atggccttaccagtgaccgccttgctcctgccgctggccttgctgctccacgccgccaggccggacatccagatgacacagagccctagcagcctgtctgccagcgtgggagacagagtgaccatcacatgcaaggccagcgaccacatcaacaactggctggcctggtatcagcagaagcctggacaggcccctaagctgctgatctacggcgctaccacactggaaacaggcgtgcccagcagattttctggcagcggctctggcaccgactacaccctgacaatatccagcctccagcctgaggacttcgccacctactactgtcagcagagctggaacaccccttggacattcggccagggcaccaagctggaaatcaagagactcgaggacaagcagctggacgccgacgtgtcccccaagcctaccatcttcctgccctctatcgccgagacaaagctccagaaggccggcacctacctgtgcctgctggaaaagttcttcccagatgtgattaagatccactggcaggaaaagaagtccaacaccatcctgggcagccaggaaggcaacaccatgaagaccaacgacacctacatgaagttcagctggctgaccgtgcccgagaagtccctggacaaagaacacagatgcatcgtgcggcacgaaaacaacaagaacggcgtggaccaggaaatcatcttcccacccatcaagaccgatgtgattacaatggaccccaaggacaactgctccaaggacgccaacgataccctgctgctccagctgaccaacaccagcgcctactacatgtacgagatcctgctgggcaaggccaccctgtacgccgtgctggtgtctgccctggtgctgatggctatggtcaagcggaaggacagccggggaagggccaagcgatctggatctggagcaacaaacttctcactactcaaacaagcaggtgacgtggaggagaatcccgggcctactagtgccaccatggactggatttggcgcatccttttccttgtcggcgctgctaccggcgcccattccgggcccgaagtgcaactggttgaatccggtggcggcctggtgcaagcaggcggatctctcagacttagctgtgccgcctccggcagaaccttcacaatgggatggtttaggcaggctccagggaaagagagagagttcgtcgccgccatctctctgtctcccacactggcctactacgccgactctgtgaaaggccggttcaccatctccagagataatgccaagaacaccgtggtgctgcaaatgaactctctgaaacccgaggatacagccctgtactattgtgccgctgaccggaagtccgtgatgagcatcagacccgattactggggacagggcacacaagtcacagtgtcctctggatccggcggcggaggatctggcggaggcggatctgggggcggaggctctttcgaacaagttcagcttcaacagcctggcgctgagctggtcaaacctggcgcttctgtgaagatgagctgcaaagccagcggctacgccttcagcagctactggatcaactggatgaagcagaaacccggccagggactcgaatggatcggccaaatctatcccggcgacggcgacaccaactacaacggcaagttcaagggcagagccacactgaccgccgatacctctagcagcacagcctacatgcagctgagcagcctgaccagcgaagatagcgccgtgtacttctgtgcccggtccatcacaacagtcgtgggctgcgctatggactattggggccagggaacaagcgtgaccgtgtctagtacgcgtatccagaaccctgatcctgccgtgtaccagctgcgggatagcaagagcagcgacaagagcgtgtgtctgttcaccgacttcgacagccagaccaacgtgtcccagagcaaggactccgacgtgtacatcaccgataagtgcgtgctggacatgcggagcatggacttcaagagcaactccgccgtggcctggtccaacaagtccgatttcgcctgcgccaacgccttcaacaacagcattatccccgaggacacattcttcccaagccccgagagcagctgcgacgtgaagctggtggaaaagagcttcgagacagacaccaacctgaacttccagaacctgagcgtgatcggcttcagaatcctgctgctgaaagtggccggctttaacctgctgatgaccctgcggctgtggtccagccgcgccaagagaagcggatctggcgtgaagcagaccctgaatttcgacctgctgaagctggctggcgacgtggaatccaacccaggcccttctagaggccatatgaccgagtacaagcccacggtgcgcctcgccacccgcgacgacgtccccagggccgtacgcaccctcgccgccgcgttcgccgactaccccgccacgcgccacaccgtcgatccggaccgccacatcgagcgggtcaccgagctgcaagaactcttcctcacgcgcgtcgggctcgacatcggcaaggtgtgggtcgcggacgacggcgccgcggtggcggtctggaccacgccggagagcgtcgaagcgggggcggtgttcgccgagatcggcccgcgcatggccgagttgagcggttcccggctggccgcgcagcaacagatggaaggcctcctggcgccgcaccggcccaaggagcccgcgtggttcctggccaccgtcggcgtctcgcccgaccaccagggcaagggtctgggcagcgccgtcgtgctccccggagtggaggcggccgagcgcgccggggtgcccgccttcctggagacctccgcgccccgcaacctccccttctacgagcggctcggcttcaccgtcaccgccgacgtcgaggtgcccgaaggaccgcgcacctggtgcatgacccgcaagcccggtgcctga

SEQ ID NO: 32863 - DNA, 3021 bp, synthetic construct
  source 1..3021: mol_type = other DNA
atggccttaccagtgaccgccttgctcctgccgctggccttgctgctccacgccgccaggccggacatccagatgacacagagccctagcagcctgtctgccagcgtgggagacagagtgaccatcacatgcaaggccagcgaccacatcaacaactggctggcctggtatcagcagaagcctggacaggcccctaagctgctgatctacggcgctaccacactggaaacaggcgtgcccagcagattttctggcagcggctctggcaccgactacaccctgacaatatccagcctccagcctgaggacttcgccacctactactgtcagcagagctggaacaccccttggacattcggccagggcaccaagctggaaatcaagagactcgaggacctgaagaacgtgttcccacctgaggtggccgtgttcgagcctagcgaggccgagatcagccacacccagaaagccaccctcgtgtgcctggctaccggcttctaccccgaccatgtggaactgtcttggtgggtcaacggcaaagaggtgcacagcggcgtgtgtaccgacccccagccactgaaagaacagcccgccctgaacgacagccggtactgcctgagcagcagactgagagtgtccgccaccttctggcagaacccccggaaccacttcagatgccaggtgcagttctacggcctgagcgagaacgacgagtggacccaggacagagccaagcccgtgacccagatcgtgtctgccgaagcctggggcagagccgattgcggctttaccagcgagagctaccagcagggcgtgctgagcgccaccatcctgtacttgttgctgctgctgaagtccgtggtgtacttcgccatcatcacatgctgcctgctgcggagaaccgccttctgctgcaacggcgagaagtctagggccaagcgatctggatctggagcaacaaacttctcactactcaaacaagcaggtgacgtggaggagaatcccgggcctactagtgccaccatggactggatttggcgcatccttttccttgtcggcgctgctaccggcgcccattccgggcccgaagtgcaactggttgaatccggtggcggcctggtgcaagcaggcggatctctcagacttagctgtgccgcctccggcagaaccttcacaatgggatggtttaggcaggctccagggaaagagagagagttcgtcgccgccatctctctgtctcccacactggcctactacgccgactctgtgaaaggccggttcaccatctccagagataatgccaagaacaccgtggtgctgcaaatgaactctctgaaacccgaggatacagccctgtactattgtgccgctgaccggaagtccgtgatgagcatcagacccgattactggggacagggcacacaagtcacagtgtcctctggatccggcggcggaggatctggcggaggcggatctgggggcggaggctctttcgaacaagttcagcttcaacagcctggcgctgagctggtcaaacctggcgcttctgtgaagatgagctgcaaagccagcggctacgccttcagcagctactggatcaactggatgaagcagaaacccggccagggactcgaatggatcggccaaatctatcccggcgacggcgacaccaactacaacggcaagttcaagggcagagccacactgaccgccgatacctctagcagcacagcctacatgcagctgagcagcctgaccagcgaagatagcgccgtgtacttctgtgcccggtccatcacaacagtcgtgggctgcgctatggactattggggccagggaacaagcgtgaccgtgtctagtacgcgtcctcacaccaagcccagcgtgttcgtgatgaagaacggcaccaacgtggcctgcctcgtgaaagagttctaccccaaggacatcaggatcaacctggtgtccagcaagaagatcaccgagttcgaccccgccatcgtgatctcccccagcggcaagtacaacgccgtgaagctggggaagtacgaggacagcaacagcgtgacctgctccgtgcagcacgacaacaagaccgtgcacagcaccgactttgaagtgaaaaccgactccaccgaccacgtgaagcccaaagagacagagaacaccaagcagcccagcaagagctgccacaagcccaaggccatcgtgcacaccgagaaagtgaacatgatgagcctgaccgtgctgggcctgcggatgctgttcgccaaaaccgtggccgtgaacttcctgctgaccgccaagctgttcttcctccgcgccaagagaagcggatctggcgtgaagcagaccctgaatttcgacctgctgaagctggctggcgacgtggaatccaacccaggcccttctagaggccatatgaccgagtacaagcccacggtgcgcctcgccacccgcgacgacgtccccagggccgtacgcaccctcgccgccgcgttcgccgactaccccgccacgcgccacaccgtcgatccggaccgccacatcgagcgggtcaccgagctgcaagaactcttcctcacgcgcgtcgggctcgacatcggcaaggtgtgggtcgcggacgacggcgccgcggtggcggtctggaccacgccggagagcgtcgaagcgggggcggtgttcgccgagatcggcccgcgcatggccgagttgagcggttcccggctggccgcgcagcaacagatggaaggcctcctggcgccgcaccggcccaaggagcccgcgtggttcctggccaccgtcggcgtctcgcccgaccaccagggcaagggtctgggcagcgccgtcgtgctccccggagtggaggcggccgagcgcgccggggtgcccgccttcctggagacctccgcgccccgcaacctccccttctacgagcggctcggcttcaccgtcaccgccgacgtcgaggtgcccgaaggaccgcgcacctggtgcatgacccgcaagcccggtgcctga

SEQ ID NO: 32864 - DNA, 2472 bp, synthetic construct
  source 1..2472: mol_type = other DNA
atggccttaccagtgaccgccttgctcctgccgctggccttgctgctccacgccgccaggccggacatccagatgacacagagccctagcagcctgtctgccagcgtgggagacagagtgaccatcacatgcaaggccagcgaccacatcaacaactggctggcctggtatcagcagaagcctggacaggcccctaagctgctgatctacggcgctaccacactggaaacaggcgtgcccagcagattttctggcagcggctctggcaccgactacaccctgacaatatccagcctccagcctgaggacttcgccacctactactgtcagcagagctggaacaccccttggacattcggccagggcaccaagctggaaatcaagagactcgagggacagcctaaggccaatcctaccgtgacactgttccctccaagcagcgaagaactccaggccaacaaggccacacttgtgtgcctgatctccgacttctaccctggggctgtgacagtggcttggaaggccgatggatctcctgtgaaagccggcgtggaaaccaccaagccatccaagcagagcaacaacaaatacgccgccagctcctacctgagcctgacacctgagcagtggaagtcccacagatcctacagctgccaagtgacccacgaaggcagcaccgtggaaaagacagtggcccctacagagtgcagcggatcccccatcaagaccgatgtgattacaatggaccccaaggacaactgctccaaggacgccaacgataccctgctgctccagctgaccaacaccagcgcctactacatgtacttgttgctgctgctgaagtccgtggtgtacttcgccatcatcacatgctgcctgctgcggagaaccgccttctgctgcaacggcgagaagtctagggccaagcgatctggatctggagcaacaaacttctcactactcaaacaagcaggtgacgtggaggagaatcccgggcctactagtgccaccatggactggatttggcgcatccttttccttgtcggcgctgctaccggcgcccattccgggcccgaagtgcaactggttgaatccggtggcggcctggtgcaagcaggcggatctctcagacttagctgtgccgcctccggcagaaccttcacaatgggatggtttaggcaggctccagggaaagagagagagttcgtcgccgccatctctctgtctcccacactggcctactacgccgactctgtgaaaggccggttcaccatctccagagataatgccaagaacaccgtggtgctgcaaatgaactctctgaaacccgaggatacagccctgtactattgtgccgctgaccggaagtccgtgatgagcatcagacccgattactggggacagggcacacaagtcacagtgtcctctggatccggcggcggaggatctggcggaggcggatctgggggcggaggctctttcgaacaagttcagcttcaacagcctggcgctgagctggtcaaacctggcgcttctgtgaagatgagctgcaaagccagcggctacgccttcagcagctactggatcaactggatgaagcagaaacccggccagggactcgaatggatcggccaaatctatcccggcgacggcgacaccaactacaacggcaagttcaagggcagagccacactgaccgccgatacctctagcagcacagcctacatgcagctgagcagcctgaccagcgaagatagcgccgtgtacttctgtgcccggtccatcacaacagtcgtgggctgcgctatggactattggggccagggaacaagcgtgaccgtgtctagtacgcgtgcgtccactaagggtccgtcagtcttcccgctggcgccctgttcccgcagcacgagtgaatctaccgccgcccttgggtgcttggtaaaagactattttcctgagcccgttacagtatcatggaacagcggggctctgactagcggggtgcatacgttccctgcggttctgcaatctagcggactgtattctctctccagtgttgtgaccgtgccaagctccagcctcggtactaaaacttatacatgtaatgtggatcataaaccttcaaataccaaggttgacaaaagggtagagagtaagtacggtggtaccgaagtgaaaaccgactccaccgaccacgtgaagcccaaagagacagagaacaccaagcagcccagcaagagctgccacaagcccaaggccatcgtgcacaccgagaaagtgaacatgatgagcctgaccgtgctgggcctgcggatgctgttcgccaaaaccgtggccgtgaacttcctgctgaccgccaagctgttcttcctccgcgccaagagaagcggatctggcgtgaagcagaccctgaatttcgacctgctgaagctggctggcgacgtggaatccaacccaggcccttctagataa

SEQ ID NO: 32865 - DNA, 2472 bp, synthetic construct
  source 1..2472: mol_type = other DNA
atggccttaccagtgaccgccttgctcctgccgctggccttgctgctccacgccgccaggccggacatccagatgacacagagccctagcagcctgtctgccagcgtgggagacagagtgaccatcacatgcaaggccagcgaccacatcaacaactggctggcctggtatcagcagaagcctggacaggcccctaagctgctgatctacggcgctaccacactggaaacaggcgtgcccagcagattttctggcagcggctctggcaccgactacaccctgacaatatccagcctccagcctgaggacttcgccacctactactgtcagcagagctggaacaccccttggacattcggccagggcaccaagctggaaatcaagagactcgaggacctgaagaacgtgttcccacctgaggtggccgtgttcgagcctagcgaggccgagatcagccacacccagaaagccaccctcgtgtgcctggctaccggcttctaccccgaccatgtggaactgtcttggtgggtcaacggcaaagaggtgcacagcggcgtgtctaccgacccccagccactgaaagaacagcccgccctgaacgacagccggtactgcctgagcagcagactgagagtgtccgccaccttctggcagaacccccggaaccacttcagatgccaggtgcagttctacggcctgagcgagaacgacgagtggacccaggacagagccaagcccgtgacccagatcgtgtctgccgaagcctggggcagagccgattgcggatcctccaaggacgccaacgataccctgctgctccagctgaccaacaccagcgcctactacatgtacttgttgctgctgctgaagtccgtggtgtacttcgccatcatcacatgctgcctgctgcggagaaccgccttctgctgcaacggcgagaagtctagggccaagcgatctggatctggagcaacaaacttctcactactcaaacaagcaggtgacgtggaggagaatcccgggcctactagtgccaccatggactggatttggcgcatccttttccttgtcggcgctgctaccggcgcccattccgggcccgaagtgcaactggttgaatccggtggcggcctggtgcaagcaggcggatctctcagacttagctgtgccgcctccggcagaaccttcacaatgggatggtttaggcaggctccagggaaagagagagagttcgtcgccgccatctctctgtctcccacactggcctactacgccgactctgtgaaaggccggttcaccatctccagagataatgccaagaacaccgtggtgctgcaaatgaactctctgaaacccgaggatacagccctgtactattgtgccgctgaccggaagtccgtgatgagcatcagacccgattactggggacagggcacacaagtcacagtgtcctctggatccggcggcggaggatctggcggaggcggatctgggggcggaggctctttcgaacaagttcagcttcaacagcctggcgctgagctggtcaaacctggcgcttctgtgaagatgagctgcaaagccagcggctacgccttcagcagctactggatcaactggatgaagcagaaacccggccagggactcgaatggatcggccaaatctatcccggcgacggcgacaccaactacaacggcaagttcaagggcagagccacactgaccgccgatacctctagcagcacagcctacatgcagctgagcagcctgaccagcgaagatagcgccgtgtacttctgtgcccggtccatcacaacagtcgtgggctgcgctatggactattggggccagggaacaagcgtgaccgtgtctagtacgcgtatccagaaccctgatcctgccgtgtaccagctgcgggatagcaagagcagcgacaagagcgtgtgtctgttcaccgacttcgacagccagaccaacgtgtcccagagcaaggactccgacgtgtacatcaccgataagaccgtgctggacatgcggagcatggacttcaagagcaactccgccgtggcctggtccaacaagtccgatttcgcctgcgccaacgccttcaacaacagcattatccccgaggacacattcttcccaagccccgagagcagctgcggtaccgaagtgaaaaccgactccaccgaccacgtgaagcccaaagagacagagaacaccaagcagcccagcaagagctgccacaagcccaaggccatcgtgcacaccgagaaagtgaacatgatgagcctgaccgtgctgggcctgcggatgctgttcgccaaaaccgtggccgtgaacttcctgctgaccgccaagctgttcttcctccgcgccaagagaagcggatctggcgtgaagcagaccctgaatttcgacctgctgaagctggctggcgacgtggaatccaacccaggcccttctagataa

SEQ ID NO: 32866 - DNA, 2517 bp, synthetic construct
  source 1..2517: mol_type = other DNA
atggccttaccagtgaccgccttgctcctgccgctggccttgctgctccacgccgccaggccggacatccagatgacacagagccctagcagcctgtctgccagcgtgggagacagagtgaccatcacatgcaaggccagcgaccacatcaacaactggctggcctggtatcagcagaagcctggacaggcccctaagctgctgatctacggcgctaccacactggaaacaggcgtgcccagcagattttctggcagcggctctggcaccgactacaccctgacaatatccagcctccagcctgaggacttcgccacctactactgtcagcagagctggaacaccccttggacattcggccagggcaccaagctggaaatcaagagactcgaggacctgaagaacgtgttcccacctgaggtggccgtgttcgagcctagcgaggccgagatcagccacacccagaaagccaccctcgtgtgcctggctaccggcttctaccccgaccatgtggaactgtcttggtgggtcaacggcaaagaggtgcacagcggcgtgtctaccgacccccagccactgaaagaacagcccgccctgaacgacagccggtactgcctgagcagcagactgagagtgtccgccaccttctggcagaacccccggaaccacttcagatgccaggtgcagttctacggcctgagcgagaacgacgagtggacccaggacagagccaagcccgtgacccagatcgtgtctgccgaagcctggggcagagccgattgcggatcccccatcaagaccgatgtgattacaatggaccccaaggacaactgctccaaggacgccaacgataccctgctgctccagctgaccaacaccagcgcctactacatgtacttgttgctgctgctgaagtccgtggtgtacttcgccatcatcacatgctgcctgctgcggagaaccgccttctgctgcaacggcgagaagtctagggccaagcgatctggatctggagcaacaaacttctcactactcaaacaagcaggtgacgtggaggagaatcccgggcctactagtgccaccatggactggatttggcgcatccttttccttgtcggcgctgctaccggcgcccattccgggcccgaagtgcaactggttgaatccggtggcggcctggtgcaagcaggcggatctctcagacttagctgtgccgcctccggcagaaccttcacaatgggatggtttaggcaggctccagggaaagagagagagttcgtcgccgccatctctctgtctcccacactggcctactacgccgactctgtgaaaggccggttcaccatctccagagataatgccaagaacaccgtggtgctgcaaatgaactctctgaaacccgaggatacagccctgtactattgtgccgctgaccggaagtccgtgatgagcatcagacccgattactggggacagggcacacaagtcacagtgtcctctggatccggcggcggaggatctggcggaggcggatctgggggcggaggctctttcgaacaagttcagcttcaacagcctggcgctgagctggtcaaacctggcgcttctgtgaagatgagctgcaaagccagcggctacgccttcagcagctactggatcaactggatgaagcagaaacccggccagggactcgaatggatcggccaaatctatcccggcgacggcgacaccaactacaacggcaagttcaagggcagagccacactgaccgccgatacctctagcagcacagcctacatgcagctgagcagcctgaccagcgaagatagcgccgtgtacttctgtgcccggtccatcacaacagtcgtgggctgcgctatggactattggggccagggaacaagcgtgaccgtgtctagtacgcgtatccagaaccctgatcctgccgtgtaccagctgcgggatagcaagagcagcgacaagagcgtgtgtctgttcaccgacttcgacagccagaccaacgtgtcccagagcaaggactccgacgtgtacatcaccgataagaccgtgctggacatgcggagcatggacttcaagagcaactccgccgtggcctggtccaacaagtccgatttcgcctgcgccaacgccttcaacaacagcattatccccgaggacacattcttcccaagccccgagagcagctgcggtaccgaagtgaaaaccgactccaccgaccacgtgaagcccaaagagacagagaacaccaagcagcccagcaagagctgccacaagcccaaggccatcgtgcacaccgagaaagtgaacatgatgagcctgaccgtgctgggcctgcggatgctgttcgccaaaaccgtggccgtgaacttcctgctgaccgccaagctgttcttcctccgcgccaagagaagcggatctggcgtgaagcagaccctgaatttcgacctgctgaagctggctggcgacgtggaatccaacccaggcccttctagataa

SEQ ID NO: 32867 - DNA, 2427 bp, synthetic construct
  source 1..2427: mol_type = other DNA
atggccttaccagtgaccgccttgctcctgccgctggccttgctgctccacgccgccaggccggacatccagatgacacagagccctagcagcctgtctgccagcgtgggagacagagtgaccatcacatgcaaggccagcgaccacatcaacaactggctggcctggtatcagcagaagcctggacaggcccctaagctgctgatctacggcgctaccacactggaaacaggcgtgcccagcagattttctggcagcggctctggcaccgactacaccctgacaatatccagcctccagcctgaggacttcgccacctactactgtcagcagagctggaacaccccttggacattcggccagggcaccaagctggaaatcaagagactcgagggacagcctaaggccaatcctaccgtgacactgttccctccaagcagcgaagaactccaggccaacaaggccacacttgtgtgcctgatctccgacttctaccctggggctgtgacagtggcttggaaggccgatggatctcctgtgaaagccggcgtggaaaccaccaagccatccaagcagagcaacaacaaatacgccgccagctcctacctgagcctgacacctgagcagtggaagtcccacagatcctacagctgccaagtgacccacgaaggcagcaccgtggaaaagacagtggcccctacagagtgcagcggatcctccaaggacgccaacgataccctgctgctccagctgaccaacaccagcgcctactacatgtacttgttgctgctgctgaagtccgtggtgtacttcgccatcatcacatgctgcctgctgcggagaaccgccttctgctgcaacggcgagaagtctagggccaagcgatctggatctggagcaacaaacttctcactactcaaacaagcaggtgacgtggaggagaatcccgggcctactagtgccaccatggactggatttggcgcatccttttccttgtcggcgctgctaccggcgcccattccgggcccgaagtgcaactggttgaatccggtggcggcctggtgcaagcaggcggatctctcagacttagctgtgccgcctccggcagaaccttcacaatgggatggtttaggcaggctccagggaaagagagagagttcgtcgccgccatctctctgtctcccacactggcctactacgccgactctgtgaaaggccggttcaccatctccagagataatgccaagaacaccgtggtgctgcaaatgaactctctgaaacccgaggatacagccctgtactattgtgccgctgaccggaagtccgtgatgagcatcagacccgattactggggacagggcacacaagtcacagtgtcctctggatccggcggcggaggatctggcggaggcggatctgggggcggaggctctttcgaacaagttcagcttcaacagcctggcgctgagctggtcaaacctggcgcttctgtgaagatgagctgcaaagccagcggctacgccttcagcagctactggatcaactggatgaagcagaaacccggccagggactcgaatggatcggccaaatctatcccggcgacggcgacaccaactacaacggcaagttcaagggcagagccacactgaccgccgatacctctagcagcacagcctacatgcagctgagcagcctgaccagcgaagatagcgccgtgtacttctgtgcccggtccatcacaacagtcgtgggctgcgctatggactattggggccagggaacaagcgtgaccgtgtctagtacgcgtgcgtccactaagggtccgtcagtcttcccgctggcgccctgttcccgcagcacgagtgaatctaccgccgcccttgggtgcttggtaaaagactattttcctgagcccgttacagtatcatggaacagcggggctctgactagcggggtgcatacgttccctgcggttctgcaatctagcggactgtattctctctccagtgttgtgaccgtgccaagctccagcctcggtactaaaacttatacatgtaatgtggatcataaaccttcaaataccaaggttgacaaaagggtagagagtaagtacggtggtaccgaagtgaaaaccgactccaccgaccacgtgaagcccaaagagacagagaacaccaagcagcccagcaagagctgccacaagcccaaggccatcgtgcacaccgagaaagtgaacatgatgagcctgaccgtgctgggcctgcggatgctgttcgccaaaaccgtggccgtgaacttcctgctgaccgccaagctgttcttcctccgcgccaagagaagcggatctggcgtgaagcagaccctgaatttcgacctgctgaagctggctggcgacgtggaatccaacccaggcccttctagataa

SEQ ID NO: 32868 - DNA, 2979 bp, synthetic construct
  source 1..2979: mol_type = other DNA
atggccttaccagtgaccgccttgctcctgccgctggccttgctgctccacgccgccaggccgcaggtgcagctggttgaatctggcggaggactggttcagcctggcggatctctgagactgtcttgtgccgccagcggcttcaccttcaccaatcacgccatgagctgggtccgacaggcccctggaaaaggactggaactggtgtctagcatcagcggcaacggcagaaccacctactacgccgatagcgtgaagggcagattcaccatcagccgggacatcagcaagaacaccctggacctccagatgaacagcctgagagccgaggataccgccgtgtactactgtgccaaggatggcggagagacactggtggatagcagaggccagggcacactggtcacagtgtcatctggtaccggcggaggcggatctggcggcggaggtagcggtggcggaggatctgaattcgacatccagatgacacagagccctagcagcctgtctgccagcgtgggagacagagtgaccatcacatgcaaggccagcgaccacatcaacaactggctggcctggtatcagcagaagcctggacaggcccctaagctgctgatctacggcgctaccacactggaaacaggcgtgcccagcagattttctggcagcggctctggcaccgactacaccctgacaatatccagcctccagcctgaggacttcgccacctactactgtcagcagagctggaacaccccttggacattcggccagggcaccaagctggaaatcaagagactcgaggacctgaagaacgtgttcccacctgaggtggccgtgttcgagcctagcgaggccgagatcagccacacccagaaagccaccctcgtgtgcctggctaccggcttctaccccgaccatgtggaactgtcttggtgggtcaacggcaaagaggtgcacagcggcgtgtgtaccgacccccagccactgaaagaacagcccgccctgaacgacagccggtactgcctgagcagcagactgagagtgtccgccaccttctggcagaacccccggaaccacttcagatgccaggtgcagttctacggcctgagcgagaacgacgagtggacccaggacagagccaagcccgtgacccagatcgtgtctgccgaagcctggggcagagccgattgcggctttaccagcgagagctaccagcagggcgtgctgagcgccaccatcctgtacgagatcctgctgggcaaggccaccctgtacgccgtgctggtgtctgccctggtgctgatggctatggtcaagcggaaggacagccggggaagggccaagcgatctggatctggagcaacaaacttctcactactcaaacaagcaggtgacgtggaggagaatcccgggcctactagtatggactggatttggcgcatccttttccttgtcggcgctgctaccggcgcgcattccttcgaacaagttcagcttcaacagcctggcgctgagctggtcaaacctggcgcttctgtgaagatgagctgcaaagccagcggctacgccttcagcagctactggatcaactggatgaagcagaaacccggccagggactcgaatggatcggccaaatctatcccggcgacggcgacaccaactacaacggcaagttcaagggcagagccacactgaccgccgatacctctagcagcacagcctacatgcagctgagcagcctgaccagcgaagatagcgccgtgtacttctgtgcccggtccatcacaacagtcgtgggctgcgctatggactattggggccagggaacaagcgtgaccgtgtctagtacgcgtatccagaaccctgatcctgccgtgtaccagctgcgggatagcaagagcagcgacaagagcgtgtgtctgttcaccgacttcgacagccagaccaacgtgtcccagagcaaggactccgacgtgtacatcaccgataagtgcgtgctggacatgcggagcatggacttcaagagcaactccgccgtggcctggtccaacaagtccgatttcgcctgcgccaacgccttcaacaacagcattatccccgaggacacattcttcccaagccccgagagcagctgcgacgtgaagctggtggaaaagagcttcgagacagacaccaacctgaacttccagaacctgagcgtgatcggcctgcggatgctgttcgccaaaaccgtggccgtgaacttcctgctgaccgccaagctgttcttcctccgcgccaagagaagcggatctggcgtgaagcagaccctgaatttcgacctgctgaagctggctggcgacgtggaatccaacccaggcccttctagaggccatatgaccgagtacaagcccacggtgcgcctcgccacccgcgacgacgtccccagggccgtacgcaccctcgccgccgcgttcgccgactaccccgccacgcgccacaccgtcgatccggaccgccacatcgagcgggtcaccgagctgcaagaactcttcctcacgcgcgtcgggctcgacatcggcaaggtgtgggtcgcggacgacggcgccgcggtggcggtctggaccacgccggagagcgtcgaagcgggggcggtgttcgccgagatcggcccgcgcatggccgagttgagcggttcccggctggccgcgcagcaacagatggaaggcctcctggcgccgcaccggcccaaggagcccgcgtggttcctggccaccgtcggcgtctcgcccgaccaccagggcaagggtctgggcagcgccgtcgtgctccccggagtggaggcggccgagcgcgccggggtgcccgccttcctggagacctccgcgccccgcaacctccccttctacgagcggctcggcttcaccgtcaccgccgacgtcgaggtgcccgaaggaccgcgcacctggtgcatgacccgcaagcccggtgcctga

SEQ ID NO: 32869 - DNA, 2934 bp, synthetic construct
  source 1..2934: mol_type = other DNA
atggccttaccagtgaccgccttgctcctgccgctggccttgctgctccacgccgccaggccgatgctgcccgctcctaagaatctggtggtgtccagaatcaccgaggacagcgccagactgtcttggacagctcctgatgccgccttcgacagcttccccatccggtacatcgagacactgatctggggcgaagccatctggctggatgtgcctggaagcgagagaagctacgacctgaccggactgaagcctggcacagagtatgccgtggtcatcaccggcgtgaaaggcggcagattctctagccctctggtggcctctttcaccaccggtaccggcggaggcggatctggcggcggaggtagcggtggcggaggatctgaattcgacatccagatgacacagagccctagcagcctgtctgccagcgtgggagacagagtgaccatcacatgcaaggccagcgaccacatcaacaactggctggcctggtatcagcagaagcctggacaggcccctaagctgctgatctacggcgctaccacactggaaacaggcgtgcccagcagattttctggcagcggctctggcaccgactacaccctgacaatatccagcctccagcctgaggacttcgccacctactactgtcagcagagctggaacaccccttggacattcggccagggcaccaagctggaaatcaagagactcgaggacctgaagaacgtgttcccacctgaggtggccgtgttcgagcctagcgaggccgagatcagccacacccagaaagccaccctcgtgtgcctggctaccggcttctaccccgaccatgtggaactgtcttggtgggtcaacggcaaagaggtgcacagcggcgtgtgtaccgacccccagccactgaaagaacagcccgccctgaacgacagccggtactgcctgagcagcagactgagagtgtccgccaccttctggcagaacccccggaaccacttcagatgccaggtgcagttctacggcctgagcgagaacgacgagtggacccaggacagagccaagcccgtgacccagatcgtgtctgccgaagcctggggcagagccgattgcggctttaccagcgagagctaccagcagggcgtgctgagcgccaccatcctgtacgagatcctgctgggcaaggccaccctgtacgccgtgctggtgtctgccctggtgctgatggctatggtcaagcggaaggacagccggggaagggccaagcgatctggatctggagcaacaaacttctcactactcaaacaagcaggtgacgtggaggagaatcccgggcctactagtatggactggatttggcgcatccttttccttgtcggcgctgctaccggcgcgcattccttcgaacaagttcagcttcaacagcctggcgctgagctggtcaaacctggcgcttctgtgaagatgagctgcaaagccagcggctacgccttcagcagctactggatcaactggatgaagcagaaacccggccagggactcgaatggatcggccaaatctatcccggcgacggcgacaccaactacaacggcaagttcaagggcagagccacactgaccgccgatacctctagcagcacagcctacatgcagctgagcagcctgaccagcgaagatagcgccgtgtacttctgtgcccggtccatcacaacagtcgtgggctgcgctatggactattggggccagggaacaagcgtgaccgtgtctagtacgcgtagccagcctcacaccaagcccagcgtgttcgtgatgaagaacggcaccaacgtggcctgcctcgtgaaagagttctaccccaaggacatcaggatcaacctggtgtccagcaagaagatcaccgagttcgaccccgccatcgtgatctcccccagcggcaagtacaacgccgtgaagctggggaagtacgaggacagcaacagcgtgacctgctccgtgcagcacgacaacaagaccgtgcacagcaccgactttgaagtgaaaaccgactccaccgaccacgtgaagcccaaagagacagagaacaccaagcagcccagcaagagctgccacaagcccaaggccatcgtgcacaccgagaaagtgaacatgatgagcctgaccgtgctgggcttcagaatcctgctgctgaaagtggccggctttaacctgctgatgaccctgcggctgtggtccagccgcgccaagagaagcggatctggcgtgaagcagaccctgaatttcgacctgctgaagctggctggcgacgtggaatccaacccaggcccttctagaggccatatgaccgagtacaagcccacggtgcgcctcgccacccgcgacgacgtccccagggccgtacgcaccctcgccgccgcgttcgccgactaccccgccacgcgccacaccgtcgatccggaccgccacatcgagcgggtcaccgagctgcaagaactcttcctcacgcgcgtcgggctcgacatcggcaaggtgtgggtcgcggacgacggcgccgcggtggcggtctggaccacgccggagagcgtcgaagcgggggcggtgttcgccgagatcggcccgcgcatggccgagttgagcggttcccggctggccgcgcagcaacagatggaaggcctcctggcgccgcaccggcccaaggagcccgcgtggttcctggccaccgtcggcgtctcgcccgaccaccagggcaagggtctgggcagcgccgtcgtgctccccggagtggaggcggccgagcgcgccggggtgcccgccttcctggagacctccgcgccccgcaacctccccttctacgagcggctcggcttcaccgtcaccgccgacgtcgaggtgcccgaaggaccgcgcacctggtgcatgacccgcaagcccggtgcctga

SEQ ID NO: 32870 - DNA, 3009 bp, synthetic construct
  source 1..3009: mol_type = other DNA
atggccttaccagtgaccgccttgctcctgccgctggccttgctgctccacgccgccaggccggacatccagatgacacagagccctagcagcctgtctgccagcgtgggagacagagtgaccatcacatgcaaggccagcgaccacatcaacaactggctggcctggtatcagcagaagcctggacaggcccctaagctgctgatctacggcgctaccacactggaaacaggcgtgcccagcagattttctggcagcggctctggcaccgactacaccctgacaatatccagcctccagcctgaggacttcgccacctactactgtcagcagagctggaacaccccttggacattcggccagggcaccaagctggaaatcaagagactcgaggacctgaagaacgtgttcccacctgaggtggccgtgttcgagcctagcgaggccgagatcagccacacccagaaagccaccctcgtgtgcctggctaccggcttctaccccgaccatgtggaactgtcttggtgggtcaacggcaaagaggtgcacagcggcgtgtgtaccgacccccagccactgaaagaacagcccgccctgaacgacagccggtactgcctgagcagcagactgagagtgtccgccaccttctggcagaacccccggaaccacttcagatgccaggtgcagttctacggcctgagcgagaacgacgagtggacccaggacagagccaagcccgtgacccagatcgtgtctgccgaagcctggggcagagccgattgcggctttaccagcgagagctaccagcagggcgtgctgagcgccaccatcctgtacgagatcctgctgggcaaggccaccctgtacgccgtgctggtgtctgccctggtgctgatggctatggtcaagcggaaggacagccggggaagggccaagcgatctggatctggagcaacaaacttctcactactcaaacaagcaggtgacgtggaggagaatcccgggcctactagtgccaccatggactggatttggcgcatccttttccttgtcggcgctgctaccggcgcccattccgggcccgaagttcagctgctggaatctggcggaggactcgttcaacctggcggctctctgagactgagctgtgccgcttctggcttcagcttctctggctacgccctgagctgggttcgacaagctcccggaaagggccttgaatgggtgtccagcatcggcgagaatgacggcaccacagactatgccgatgccgtgaaaggccggtttaccatcagcagagacaattccaagaacacgctctatctgcaaatgaactccctgcgcgtggaagatacagccgtgtattattgcgtgaaggacggcgtgcactggggacagggaaccctggttacagtgtctagcggatccggcggcggaggatctggcggaggcggatctgggggcggaggctctttcgaacaagttcagcttcaacagcctggcgctgagctggtcaaacctggcgcttctgtgaagatgagctgcaaagccagcggctacgccttcagcagctactggatcaactggatgaagcagaaacccggccagggactcgaatggatcggccaaatctatcccggcgacggcgacaccaactacaacggcaagttcaagggcagagccacactgaccgccgatacctctagcagcacagcctacatgcagctgagcagcctgaccagcgaagatagcgccgtgtacttctgtgcccggtccatcacaacagtcgtgggctgcgctatggactattggggccagggaacaagcgtgaccgtgtctagtacgcgtagccagcctcacaccaagcccagcgtgttcgtgatgaagaacggcaccaacgtggcctgcctcgtgaaagagttctaccccaaggacatcaggatcaacctggtgtccagcaagaagatcaccgagttcgaccccgccatcgtgatctcccccagcggcaagtacaacgccgtgaagctggggaagtacgaggacagcaacagcgtgacctgctccgtgcagcacgacaacaagaccgtgcacagcaccgactttgaagtgaaaaccgactccaccgaccacgtgaagcccaaagagacagagaacaccaagcagcccagcaagagctgccacaagcccaaggccatcgtgcacaccgagaaagtgaacatgatgagcctgaccgtgctgggcttcagaatcctgctgctgaaagtggccggctttaacctgctgatgaccctgcggctgtggtccagccgcgccaagagaagcggatctggcgtgaagcagaccctgaatttcgacctgctgaagctggctggcgacgtggaatccaacccaggcccttctagaggccatatgaccgagtacaagcccacggtgcgcctcgccacccgcgacgacgtccccagggccgtacgcaccctcgccgccgcgttcgccgactaccccgccacgcgccacaccgtcgatccggaccgccacatcgagcgggtcaccgagctgcaagaactcttcctcacgcgcgtcgggctcgacatcggcaaggtgtgggtcgcggacgacggcgccgcggtggcggtctggaccacgccggagagcgtcgaagcgggggcggtgttcgccgagatcggcccgcgcatggccgagttgagcggttcccggctggccgcgcagcaacagatggaaggcctcctggcgccgcaccggcccaaggagcccgcgtggttcctggccaccgtcggcgtctcgcccgaccaccagggcaagggtctgggcagcgccgtcgtgctccccggagtggaggcggccgagcgcgccggggtgcccgccttcctggagacctccgcgccccgcaacctccccttctacgagcggctcggcttcaccgtcaccgccgacgtcgaggtgcccgaaggaccgcgcacctggtgcatgacccgcaagcccggtgcctga

SEQ ID NO: 32871 - DNA, 3024 bp, synthetic construct
  source 1..3024: mol_type = other DNA
atggccttaccagtgaccgccttgctcctgccgctggccttgctgctccacgccgccaggccggacatccagatgacacagagccctagcagcctgtctgccagcgtgggagacagagtgaccatcacatgcaaggccagcgaccacatcaacaactggctggcctggtatcagcagaagcctggacaggcccctaagctgctgatctacggcgctaccacactggaaacaggcgtgcccagcagattttctggcagcggctctggcaccgactacaccctgacaatatccagcctccagcctgaggacttcgccacctactactgtcagcagagctggaacaccccttggacattcggccagggcaccaagctggaaatcaagagactcgaggacctgaagaacgtgttcccacctgaggtggccgtgttcgagcctagcgaggccgagatcagccacacccagaaagccaccctcgtgtgcctggctaccggcttctaccccgaccatgtggaactgtcttggtgggtcaacggcaaagaggtgcacagcggcgtgtgtaccgacccccagccactgaaagaacagcccgccctgaacgacagccggtactgcctgagcagcagactgagagtgtccgccaccttctggcagaacccccggaaccacttcagatgccaggtgcagttctacggcctgagcgagaacgacgagtggacccaggacagagccaagcccgtgacccagatcgtgtctgccgaagcctggggcagagccgattgcggctttaccagcgagagctaccagcagggcgtgctgagcgccaccatcctgtacgagatcctgctgggcaaggccaccctgtacgccgtgctggtgtctgccctggtgctgatggctatggtcaagcggaaggacagccggggaagggccaagcgatctggatctggagcaacaaacttctcactactcaaacaagcaggtgacgtggaggagaatcccgggcctactagtgccaccatggactggatttggcgcatccttttccttgtcggcgctgctaccggcgcccattccgggcccgaagtgcaactggttgaatccggtggcggcctggtgcaagcaggcggatctctcagacttagctgtgccgcctccggcagaaccttcacaatgggatggtttaggcaggctccagggaaagagagagagttcgtcgccgccatctctctgtctcccacactggcctactacgccgactctgtgaaaggccggttcaccatctccagagataatgccaagaacaccgtggtgctgcaaatgaactctctgaaacccgaggatacagccctgtactattgtgccgctgaccggaagtccgtgatgagcatcagacccgattactggggacagggcacacaagtcacagtgtcctctggatccggcggcggaggatctggcggaggcggatctgggggcggaggctctttcgaacaagttcagcttcaacagcctggcgctgagctggtcaaacctggcgcttctgtgaagatgagctgcaaagccagcggctacgccttcagcagctactggatcaactggatgaagcagaaacccggccagggactcgaatggatcggccaaatctatcccggcgacggcgacaccaactacaacggcaagttcaagggcagagccacactgaccgccgatacctctagcagcacagcctacatgcagctgagcagcctgaccagcgaagatagcgccgtgtacttctgtgcccggtccatcacaacagtcgtgggctgcgctatggactattggggccagggaacaagcgtgaccgtgtctagtacgcgtagccagcctcacaccaagcccagcgtgttcgtgatgaagaacggcaccaacgtggcctgcctcgtgaaagagttctaccccaaggacatcaggatcaacctggtgtccagcaagaagatcaccgagttcgaccccgccatcgtgatctcccccagcggcaagtacaacgccgtgaagctggggaagtacgaggacagcaacagcgtgacctgctccgtgcagcacgacaacaagaccgtgcacagcaccgactttgaagtgaaaaccgactccaccgaccacgtgaagcccaaagagacagagaacaccaagcagcccagcaagagctgccacaagcccaaggccatcgtgcacaccgagaaagtgaacatgatgagcctgaccgtgctgggcttcagaatcctgctgctgaaagtggccggctttaacctgctgatgaccctgcggctgtggtccagccgcgccaagagaagcggatctggcgtgaagcagaccctgaatttcgacctgctgaagctggctggcgacgtggaatccaacccaggcccttctagaggccatatgaccgagtacaagcccacggtgcgcctcgccacccgcgacgacgtccccagggccgtacgcaccctcgccgccgcgttcgccgactaccccgccacgcgccacaccgtcgatccggaccgccacatcgagcgggtcaccgagctgcaagaactcttcctcacgcgcgtcgggctcgacatcggcaaggtgtgggtcgcggacgacggcgccgcggtggcggtctggaccacgccggagagcgtcgaagcgggggcggtgttcgccgagatcggcccgcgcatggccgagttgagcggttcccggctggccgcgcagcaacagatggaaggcctcctggcgccgcaccggcccaaggagcccgcgtggttcctggccaccgtcggcgtctcgcccgaccaccagggcaagggtctgggcagcgccgtcgtgctccccggagtggaggcggccgagcgcgccggggtgcccgccttcctggagacctccgcgccccgcaacctccccttctacgagcggctcggcttcaccgtcaccgccgacgtcgaggtgcccgaaggaccgcgcacctggtgcatgacccgcaagcccggtgcctga

SEQ ID NO: 32872 - DNA, 2934 bp, synthetic construct
  source 1..2934: mol_type = other DNA
atggccttaccagtgaccgccttgctcctgccgctggccttgctgctccacgccgccaggccgatgctgcccgctcctaagaatctggtggtgtccagaatcaccgaggacagcgccagactgtcttggacagctcctgatgccgccttcgacagcttccccatccggtacatcgagacactgatctggggcgaagccatctggctggatgtgcctggaagcgagagaagctacgacctgaccggactgaagcctggcacagagtatgccgtggtcatcaccggcgtgaaaggcggcagattctctagccctctggtggcctctttcaccaccggtaccggcggaggcggatctggcggcggaggtagcggtggcggaggatctgaattcgacatccagatgacacagagccctagcagcctgtctgccagcgtgggagacagagtgaccatcacatgcaaggccagcgaccacatcaacaactggctggcctggtatcagcagaagcctggacaggcccctaagctgctgatctacggcgctaccacactggaaacaggcgtgcccagcagattttctggcagcggctctggcaccgactacaccctgacaatatccagcctccagcctgaggacttcgccacctactactgtcagcagagctggaacaccccttggacattcggccagggcaccaagctggaaatcaagagactcgaggacctgaagaacgtgttcccacctgaggtggccgtgttcgagcctagcgaggccgagatcagccacacccagaaagccaccctcgtgtgcctggctaccggcttctaccccgaccatgtggaactgtcttggtgggtcaacggcaaagaggtgcacagcggcgtgtgtaccgacccccagccactgaaagaacagcccgccctgaacgacagccggtactgcctgagcagcagactgagagtgtccgccaccttctggcagaacccccggaaccacttcagatgccaggtgcagttctacggcctgagcgagaacgacgagtggacccaggacagagccaagcccgtgacccagatcgtgtctgccgaagcctggggcagagccgattgcggctttaccagcgagagctaccagcagggcgtgctgagcgccaccatcctgtacgagatcctgctgggcaaggccaccctgtacgccgtgctggtgtctgccctggtgctgatggctatggtcaagcggaaggacagccggggaagggccaagcgatctggatctggagcaacaaacttctcactactcaaacaagcaggtgacgtggaggagaatcccgggcctactagtatggactggatttggcgcatccttttccttgtcggcgctgctaccggcgcgcattccttcgaacaagttcagcttcaacagcctggcgctgagctggtcaaacctggcgcttctgtgaagatgagctgcaaagccagcggctacgccttcagcagctactggatcaactggatgaagcagaaacccggccagggactcgaatggatcggccaaatctatcccggcgacggcgacaccaactacaacggcaagttcaagggcagagccacactgaccgccgatacctctagcagcacagcctacatgcagctgagcagcctgaccagcgaagatagcgccgtgtacttctgtgcccggtccatcacaacagtcgtgggctgcgctatggactattggggccagggaacaagcgtgaccgtgtctagtacgcgtagccagcctcacaccaagcccagcgtgttcgtgatgaagaacggcaccaacgtggcctgcctcgtgaaagagttctaccccaaggacatcaggatcaacctggtgtccagcaagaagatcaccgagttcgaccccgccatcgtgatctcccccagcggcaagtacaacgccgtgaagctggggaagtacgaggacagcaacagcgtgacctgctccgtgcagcacgacaacaagaccgtgcacagcaccgactttgaagtgaaaaccgactccaccgaccacgtgaagcccaaagagacagagaacaccaagcagcccagcaagagctgccacaagcccaaggccatcgtgcacaccgagaaagtgaacatgatgagcctgaccgtgatcggcttcagaatcctgctgctgaaagtggccggctttaacctgctgatgaccctgcggctgtggtccagccgcgccaagagaagcggatctggcgtgaagcagaccctgaatttcgacctgctgaagctggctggcgacgtggaatccaacccaggcccttctagaggccatatgaccgagtacaagcccacggtgcgcctcgccacccgcgacgacgtccccagggccgtacgcaccctcgccgccgcgttcgccgactaccccgccacgcgccacaccgtcgatccggaccgccacatcgagcgggtcaccgagctgcaagaactcttcctcacgcgcgtcgggctcgacatcggcaaggtgtgggtcgcggacgacggcgccgcggtggcggtctggaccacgccggagagcgtcgaagcgggggcggtgttcgccgagatcggcccgcgcatggccgagttgagcggttcccggctggccgcgcagcaacagatggaaggcctcctggcgccgcaccggcccaaggagcccgcgtggttcctggccaccgtcggcgtctcgcccgaccaccagggcaagggtctgggcagcgccgtcgtgctccccggagtggaggcggccgagcgcgccggggtgcccgccttcctggagacctccgcgccccgcaacctccccttctacgagcggctcggcttcaccgtcaccgccgacgtcgaggtgcccgaaggaccgcgcacctggtgcatgacccgcaagcccggtgcctga

SEQ ID NO: 32873 - DNA, 3009 bp, synthetic construct
  source 1..3009: mol_type = other DNA
atggccttaccagtgaccgccttgctcctgccgctggccttgctgctccacgccgccaggccggacatccagatgacacagagccctagcagcctgtctgccagcgtgggagacagagtgaccatcacatgcaaggccagcgaccacatcaacaactggctggcctggtatcagcagaagcctggacaggcccctaagctgctgatctacggcgctaccacactggaaacaggcgtgcccagcagattttctggcagcggctctggcaccgactacaccctgacaatatccagcctccagcctgaggacttcgccacctactactgtcagcagagctggaacaccccttggacattcggccagggcaccaagctggaaatcaagagactcgaggacctgaagaacgtgttcccacctgaggtggccgtgttcgagcctagcgaggccgagatcagccacacccagaaagccaccctcgtgtgcctggctaccggcttctaccccgaccatgtggaactgtcttggtgggtcaacggcaaagaggtgcacagcggcgtgtgtaccgacccccagccactgaaagaacagcccgccctgaacgacagccggtactgcctgagcagcagactgagagtgtccgccaccttctggcagaacccccggaaccacttcagatgccaggtgcagttctacggcctgagcgagaacgacgagtggacccaggacagagccaagcccgtgacccagatcgtgtctgccgaagcctggggcagagccgattgcggctttaccagcgagagctaccagcagggcgtgctgagcgccaccatcctgtacgagatcctgctgggcaaggccaccctgtacgccgtgctggtgtctgccctggtgctgatggctatggtcaagcggaaggacagccggggaagggccaagcgatctggatctggagcaacaaacttctcactactcaaacaagcaggtgacgtggaggagaatcccgggcctactagtgccaccatggactggatttggcgcatccttttccttgtcggcgctgctaccggcgcccattccgggcccgaagttcagctgctggaatctggcggaggactcgttcaacctggcggctctctgagactgagctgtgccgcttctggcttcagcttctctggctacgccctgagctgggttcgacaagctcccggaaagggccttgaatgggtgtccagcatcggcgagaatgacggcaccacagactatgccgatgccgtgaaaggccggtttaccatcagcagagacaattccaagaacacgctctatctgcaaatgaactccctgcgcgtggaagatacagccgtgtattattgcgtgaaggacggcgtgcactggggacagggaaccctggttacagtgtctagcggatccggcggcggaggatctggcggaggcggatctgggggcggaggctctttcgaacaagttcagcttcaacagcctggcgctgagctggtcaaacctggcgcttctgtgaagatgagctgcaaagccagcggctacgccttcagcagctactggatcaactggatgaagcagaaacccggccagggactcgaatggatcggccaaatctatcccggcgacggcgacaccaactacaacggcaagttcaagggcagagccacactgaccgccgatacctctagcagcacagcctacatgcagctgagcagcctgaccagcgaagatagcgccgtgtacttctgtgcccggtccatcacaacagtcgtgggctgcgctatggactattggggccagggaacaagcgtgaccgtgtctagtacgcgtagccagcctcacaccaagcccagcgtgttcgtgatgaagaacggcaccaacgtggcctgcctcgtgaaagagttctaccccaaggacatcaggatcaacctggtgtccagcaagaagatcaccgagttcgaccccgccatcgtgatctcccccagcggcaagtacaacgccgtgaagctggggaagtacgaggacagcaacagcgtgacctgctccgtgcagcacgacaacaagaccgtgcacagcaccgactttgaagtgaaaaccgactccaccgaccacgtgaagcccaaagagacagagaacaccaagcagcccagcaagagctgccacaagcccaaggccatcgtgcacaccgagaaagtgaacatgatgagcctgaccgtgatcggcttcagaatcctgctgctgaaagtggccggctttaacctgctgatgaccctgcggctgtggtccagccgcgccaagagaagcggatctggcgtgaagcagaccctgaatttcgacctgctgaagctggctggcgacgtggaatccaacccaggcccttctagaggccatatgaccgagtacaagcccacggtgcgcctcgccacccgcgacgacgtccccagggccgtacgcaccctcgccgccgcgttcgccgactaccccgccacgcgccacaccgtcgatccggaccgccacatcgagcgggtcaccgagctgcaagaactcttcctcacgcgcgtcgggctcgacatcggcaaggtgtgggtcgcggacgacggcgccgcggtggcggtctggaccacgccggagagcgtcgaagcgggggcggtgttcgccgagatcggcccgcgcatggccgagttgagcggttcccggctggccgcgcagcaacagatggaaggcctcctggcgccgcaccggcccaaggagcccgcgtggttcctggccaccgtcggcgtctcgcccgaccaccagggcaagggtctgggcagcgccgtcgtgctccccggagtggaggcggccgagcgcgccggggtgcccgccttcctggagacctccgcgccccgcaacctccccttctacgagcggctcggcttcaccgtcaccgccgacgtcgaggtgcccgaaggaccgcgcacctggtgcatgacccgcaagcccggtgcctga

SEQ ID NO: 32874 - DNA, 3024 bp, synthetic construct
  source 1..3024: mol_type = other DNA
atggccttaccagtgaccgccttgctcctgccgctggccttgctgctccacgccgccaggccggacatccagatgacacagagccctagcagcctgtctgccagcgtgggagacagagtgaccatcacatgcaaggccagcgaccacatcaacaactggctggcctggtatcagcagaagcctggacaggcccctaagctgctgatctacggcgctaccacactggaaacaggcgtgcccagcagattttctggcagcggctctggcaccgactacaccctgacaatatccagcctccagcctgaggacttcgccacctactactgtcagcagagctggaacaccccttggacattcggccagggcaccaagctggaaatcaagagactcgaggacctgaagaacgtgttcccacctgaggtggccgtgttcgagcctagcgaggccgagatcagccacacccagaaagccaccctcgtgtgcctggctaccggcttctaccccgaccatgtggaactgtcttggtgggtcaacggcaaagaggtgcacagcggcgtgtgtaccgacccccagccactgaaagaacagcccgccctgaacgacagccggtactgcctgagcagcagactgagagtgtccgccaccttctggcagaacccccggaaccacttcagatgccaggtgcagttctacggcctgagcgagaacgacgagtggacccaggacagagccaagcccgtgacccagatcgtgtctgccgaagcctggggcagagccgattgcggctttaccagcgagagctaccagcagggcgtgctgagcgccaccatcctgtacgagatcctgctgggcaaggccaccctgtacgccgtgctggtgtctgccctggtgctgatggctatggtcaagcggaaggacagccggggaagggccaagcgatctggatctggagcaacaaacttctcactactcaaacaagcaggtgacgtggaggagaatcccgggcctactagtgccaccatggactggatttggcgcatccttttccttgtcggcgctgctaccggcgcccattccgggcccgaagtgcaactggttgaatccggtggcggcctggtgcaagcaggcggatctctcagacttagctgtgccgcctccggcagaaccttcacaatgggatggtttaggcaggctccagggaaagagagagagttcgtcgccgccatctctctgtctcccacactggcctactacgccgactctgtgaaaggccggttcaccatctccagagataatgccaagaacaccgtggtgctgcaaatgaactctctgaaacccgaggatacagccctgtactattgtgccgctgaccggaagtccgtgatgagcatcagacccgattactggggacagggcacacaagtcacagtgtcctctggatccggcggcggaggatctggcggaggcggatctgggggcggaggctctttcgaacaagttcagcttcaacagcctggcgctgagctggtcaaacctggcgcttctgtgaagatgagctgcaaagccagcggctacgccttcagcagctactggatcaactggatgaagcagaaacccggccagggactcgaatggatcggccaaatctatcccggcgacggcgacaccaactacaacggcaagttcaagggcagagccacactgaccgccgatacctctagcagcacagcctacatgcagctgagcagcctgaccagcgaagatagcgccgtgtacttctgtgcccggtccatcacaacagtcgtgggctgcgctatggactattggggccagggaacaagcgtgaccgtgtctagtacgcgtagccagcctcacaccaagcccagcgtgttcgtgatgaagaacggcaccaacgtggcctgcctcgtgaaagagttctaccccaaggacatcaggatcaacctggtgtccagcaagaagatcaccgagttcgaccccgccatcgtgatctcccccagcggcaagtacaacgccgtgaagctggggaagtacgaggacagcaacagcgtgacctgctccgtgcagcacgacaacaagaccgtgcacagcaccgactttgaagtgaaaaccgactccaccgaccacgtgaagcccaaagagacagagaacaccaagcagcccagcaagagctgccacaagcccaaggccatcgtgcacaccgagaaagtgaacatgatgagcctgaccgtgatcggcttcagaatcctgctgctgaaagtggccggctttaacctgctgatgaccctgcggctgtggtccagccgcgccaagagaagcggatctggcgtgaagcagaccctgaatttcgacctgctgaagctggctggcgacgtggaatccaacccaggcccttctagaggccatatgaccgagtacaagcccacggtgcgcctcgccacccgcgacgacgtccccagggccgtacgcaccctcgccgccgcgttcgccgactaccccgccacgcgccacaccgtcgatccggaccgccacatcgagcgggtcaccgagctgcaagaactcttcctcacgcgcgtcgggctcgacatcggcaaggtgtgggtcgcggacgacggcgccgcggtggcggtctggaccacgccggagagcgtcgaagcgggggcggtgttcgccgagatcggcccgcgcatggccgagttgagcggttcccggctggccgcgcagcaacagatggaaggcctcctggcgccgcaccggcccaaggagcccgcgtggttcctggccaccgtcggcgtctcgcccgaccaccagggcaagggtctgggcagcgccgtcgtgctccccggagtggaggcggccgagcgcgccggggtgcccgccttcctggagacctccgcgccccgcaacctccccttctacgagcggctcggcttcaccgtcaccgccgacgtcgaggtgcccgaaggaccgcgcacctggtgcatgacccgcaagcccggtgcctga

SEQ ID NO: 32875 - DNA, 2982 bp, synthetic construct
  source 1..2982: mol_type = other DNA
atggccttaccagtgaccgccttgctcctgccgctggccttgctgctccacgccgccaggccggaagtgcagctggttgaatctggcggaggactggttcaggctggcggatctctgagactgtcttgtgccgccagcggcagaacctttagcatgggctggtttagacaggcccctggcaaagagagagagttcgtcgccgccatcacatactctggcggcagcccttactacgccgactctgtgaagggcagattcaccatcagccgggacaacgccaagaacaccgtgtacctccagatgaacagcctgaagcctgaggacaccgccgtgtactactgcgccgccaatccaacatacggcagcgactggaacgccgagaattggggccagggaacccaagtgacagtgtctagcggtaccggcggaggcggatctggcggcggaggtagcggtggcggaggatctgaattcgacatccagatgacacagagccctagcagcctgtctgccagcgtgggagacagagtgaccatcacatgcaaggccagcgaccacatcaacaactggctggcctggtatcagcagaagcctggacaggcccctaagctgctgatctacggcgctaccacactggaaacaggcgtgcccagcagattttctggcagcggctctggcaccgactacaccctgacaatatccagcctccagcctgaggacttcgccacctactactgtcagcagagctggaacaccccttggacattcggccagggcaccaagctggaaatcaagagactcgaggacctgaagaacgtgttcccacctgaggtggccgtgttcgagcctagcgaggccgagatcagccacacccagaaagccaccctcgtgtgcctggctaccggcttctaccccgaccatgtggaactgtcttggtgggtcaacggcaaagaggtgcacagcggcgtgtgtaccgacccccagccactgaaagaacagcccgccctgaacgacagccggtactgcctgagcagcagactgagagtgtccgccaccttctggcagaacccccggaaccacttcagatgccaggtgcagttctacggcctgagcgagaacgacgagtggacccaggacagagccaagcccgtgacccagatcgtgtctgccgaagcctggggcagagccgattgcggctttaccagcgagagctaccagcagggcgtgctgagcgcctactacatgtacttgttgctgctgctgaagtccgtggtgtacttcgccatcatcacatgctgcctgctgcggagaaccgccttctgctgcaacggcgagaagtctagggccaagcgatctggatctggagcaacaaacttctcactactcaaacaagcaggtgacgtggaggagaatcccgggcctactagtatggactggatttggcgcatccttttccttgtcggcgctgctaccggcgcgcattccttcgaacaagttcagcttcaacagcctggcgctgagctggtcaaacctggcgcttctgtgaagatgagctgcaaagccagcggctacgccttcagcagctactggatcaactggatgaagcagaaacccggccagggactcgaatggatcggccaaatctatcccggcgacggcgacaccaactacaacggcaagttcaagggcagagccacactgaccgccgatacctctagcagcacagcctacatgcagctgagcagcctgaccagcgaagatagcgccgtgtacttctgtgcccggtccatcacaacagtcgtgggctgcgctatggactattggggccagggaacaagcgtgaccgtgtctagtacgcgtatccagaaccctgatcctgccgtgtaccagctgcgggatagcaagagcagcgacaagagcgtgtgtctgttcaccgacttcgacagccagaccaacgtgtcccagagcaaggactccgacgtgtacatcaccgataagtgcgtgctggacatgcggagcatggacttcaagagcaactccgccgtggcctggtccaacaagtccgatttcgcctgcgccaacgccttcaacaacagcattatccccgaggacacattcttcccaagccccgagagcagctgcgacgtgaagctggtggaaaagagcttcgagacagacaccaacctgaacttccagaacctgagcgtgatcggcttcagaatcctgctgctgaaagtggccggctttaacctgctgatgaccctgcggctgtggtccagccgcgccaagagaagcggatctggcgtgaagcagaccctgaatttcgacctgctgaagctggctggcgacgtggaatccaacccaggcccttctagaggccatatgaccgagtacaagcccacggtgcgcctcgccacccgcgacgacgtccccagggccgtacgcaccctcgccgccgcgttcgccgactaccccgccacgcgccacaccgtcgatccggaccgccacatcgagcgggtcaccgagctgcaagaactcttcctcacgcgcgtcgggctcgacatcggcaaggtgtgggtcgcggacgacggcgccgcggtggcggtctggaccacgccggagagcgtcgaagcgggggcggtgttcgccgagatcggcccgcgcatggccgagttgagcggttcccggctggccgcgcagcaacagatggaaggcctcctggcgccgcaccggcccaaggagcccgcgtggttcctggccaccgtcggcgtctcgcccgaccaccagggcaagggtctgggcagcgccgtcgtgctccccggagtggaggcggccgagcgcgccggggtgcccgccttcctggagacctccgcgccccgcaacctccccttctacgagcggctcggcttcaccgtcaccgccgacgtcgaggtgcccgaaggaccgcgcacctggtgcatgacccgcaagcccggtgcctga

SEQ ID NO: 32876 - DNA, 3027 bp, synthetic construct
  source 1..3027: mol_type = other DNA
atggccttaccagtgaccgccttgctcctgccgctggccttgctgctccacgccgccaggccggacatccagatgacacagagccctagcagcctgtctgccagcgtgggagacagagtgaccatcacatgcaaggccagcgaccacatcaacaactggctggcctggtatcagcagaagcctggacaggcccctaagctgctgatctacggcgctaccacactggaaacaggcgtgcccagcagattttctggcagcggctctggcaccgactacaccctgacaatatccagcctccagcctgaggacttcgccacctactactgtcagcagagctggaacaccccttggacattcggccagggcaccaagctggaaatcaagagactcgaggacctgaagaacgtgttcccacctgaggtggccgtgttcgagcctagcgaggccgagatcagccacacccagaaagccaccctcgtgtgcctggctaccggcttctaccccgaccatgtggaactgtcttggtgggtcaacggcaaagaggtgcacagcggcgtgtgtaccgacccccagccactgaaagaacagcccgccctgaacgacagccggtactgcctgagcagcagactgagagtgtccgccaccttctggcagaacccccggaaccacttcagatgccaggtgcagttctacggcctgagcgagaacgacgagtggacccaggacagagccaagcccgtgacccagatcgtgtctgccgaagcctggggcagagccgattgcggctttaccagcgagagctaccagcagggcgtgctgagcgccaccatcctgtacgagatcctgctgggcaaggccaccctgtacgccgtgctggtgtctgccctggtgctgatggctatggtcaagcggaaggacagccggggaagggccaagcgatctggatctggagcaacaaacttctcactactcaaacaagcaggtgacgtggaggagaatcccgggcctactagtgccaccatggactggatttggcgcatccttttccttgtcggcgctgctaccggcgcccattccgggcccgaagtgcaactggtggaatctgggggcggactggtgcagccaggcggaagtctgaggctgtcttgtgccgcctccggcagcatcttcggcttcaacgacatggcctggtatcggcaggctcccggaaaacagcgcgagctggtggctctgattagcagagtgggcgtgaccagcagcgccgactctgtgaagggcagattcacaatctccagagtgaacgccaaggatacagtgtacctccagatgaactctctgaaacctgaggatacagcagtgtactattgctacatggaccagcggctggacggcagcacactggcctactggggacagggaactcaagtgacagtgtctagcggatccggcggcggaggatctggcggaggcggatctgggggcggaggctctttcgaacaagttcagcttcaacagcctggcgctgagctggtcaaacctggcgcttctgtgaagatgagctgcaaagccagcggctacgccttcagcagctactggatcaactggatgaagcagaaacccggccagggactcgaatggatcggccaaatctatcccggcgacggcgacaccaactacaacggcaagttcaagggcagagccacactgaccgccgatacctctagcagcacagcctacatgcagctgagcagcctgaccagcgaagatagcgccgtgtacttctgtgcccggtccatcacaacagtcgtgggctgcgctatggactattggggccagggaacaagcgtgaccgtgtctagtacgcgtagccagcctcacaccaagcccagcgtgttcgtgatgaagaacggcaccaacgtggcctgcctcgtgaaagagttctaccccaaggacatcaggatcaacctggtgtccagcaagaagatcaccgagttcgaccccgccatcgtgatctcccccagcggcaagtacaacgccgtgaagctggggaagtacgaggacagcaacagcgtgacctgctccgtgcagcacgacaacaagaccgtgcacagcaccgactttgaagtgaaaaccgactccaccgaccacgtgaagcccaaagagacagagaacaccaagcagcccagcaagagctgccacaagcccaaggccatcgtgcacaccgagaaagtgaacatgatgagcctgaccgtgctgggcttcagaatcctgctgctgaaagtggccggctttaacctgctgatgaccctgcggctgtggtccagccgcgccaagagaagcggatctggcgtgaagcagaccctgaatttcgacctgctgaagctggctggcgacgtggaatccaacccaggcccttctagaggccatatgaccgagtacaagcccacggtgcgcctcgccacccgcgacgacgtccccagggccgtacgcaccctcgccgccgcgttcgccgactaccccgccacgcgccacaccgtcgatccggaccgccacatcgagcgggtcaccgagctgcaagaactcttcctcacgcgcgtcgggctcgacatcggcaaggtgtgggtcgcggacgacggcgccgcggtggcggtctggaccacgccggagagcgtcgaagcgggggcggtgttcgccgagatcggcccgcgcatggccgagttgagcggttcccggctggccgcgcagcaacagatggaaggcctcctggcgccgcaccggcccaaggagcccgcgtggttcctggccaccgtcggcgtctcgcccgaccaccagggcaagggtctgggcagcgccgtcgtgctccccggagtggaggcggccgagcgcgccggggtgcccgccttcctggagacctccgcgccccgcaacctccccttctacgagcggctcggcttcaccgtcaccgccgacgtcgaggtgcccgaaggaccgcgcacctggtgcatgacccgcaagcccggtgcctga

SEQ ID NO: 32877 - DNA, 3777 bp, synthetic construct; identical to SEQ ID NO: 32607
  source 1..3777: mol_type = other DNA

SEQ ID NO: 32878 - DNA, 2715 bp, synthetic construct; identical to SEQ ID NO: 22721
  source 1..2715: mol_type = other DNA

SEQ ID NO: 32879 - DNA, 2694 bp, synthetic construct
  source 1..2694: mol_type = other DNA
atggccttaccagtgaccgccttgctcctgccgctggccttgctgctccacgccgccaggccggaagtgcagctggttgaatctggcggaggactggttcaggctggcggatctctgagactgtcttgtgccgccagcggcagaacctttagcatgggctggtttagacaggcccctggcaaagagagagagttcgtcgccgccatcacatactctggcggcagcccttactacgccgactctgtgaagggcagattcaccatcagccgggacaacgccaagaacaccgtgtacctccagatgaacagcctgaagcctgaggacaccgccgtgtactactgcgccgccaatccaacatacggcagcgactggaacgccgagaattggggccagggaacccaagtgacagtgtctagcggtaccggcggaggcggatctggcggcggaggtagcggtggcggaggatctgaattcgacatccagatgacacagagccctagcagcctgtctgccagcgtgggagacagagtgaccatcacatgcaaggccagcgaccacatcaacaactggctggcctggtatcagcagaagcctggacaggcccctaagctgctgatctacggcgctaccacactggaaacaggcgtgcccagcagattttctggcagcggctctggcaccgactacaccctgacaatatccagcctccagcctgaggacttcgccacctactactgtcagcagagctggaacaccccttggacattcggccagggcaccaagctggaaatcaagagactcgaggacctgaagaacgtgttcccacctgaggtggccgtgttcgagcctagcgaggccgagatcagccacacccagaaagccaccctcgtgtgcctggctaccggcttctaccccgaccatgtggaactgtcttggtgggtcaacggcaaagaggtgcacagcggcgtgtgtaccgacccccagccactgaaagaacagcccgccctgaacgacagccggtactgcctgagcagcagactgagagtgtccgccaccttctggcagaacccccggaaccacttcagatgccaggtgcagttctacggcctgagcgagaacgacgagtggacccaggacagagccaagcccgtgacccagatcgtgtctgccgaagcctggggcagagccgattgcggctttaccagcgagagctaccagcagggcgtgctgagcgccaccatcctgtacgagatcctgctgggcaaggccaccctgtacgccgtgctggtgtctgccctggtgctgatggctatggtcaagcggaaggacagccggggaagggccaagcgatctggatctggagcaacaaacttctcactactcaaacaagcaggtgacgtggaggagaatcccgggcctactagtaccatggactggatttggcgcatccttttccttgtcggcgctgctaccggcgcccattccgggcccgaagtgcaactggttgaatccggtggcggcctggtgcaacccggcggatctctcagacttagctgtgccgcctccggcagaaccttcacaatgggatggtacaggcaggctccagggaaagagagagagttcgtcgccgccatctctctgtctcccacactggcctactacgccgactctgtgaaaggccggttcaccatctccagagataatagcaagaacaccgtggtgctgcaaatgaactctctgagagccgaggatacagccctgtactattgtgccgctgaccggaagtccgtgatgagcatcagacccgattactggggacagggcacactggtcacagtgtctagtggatccggcggcggaggatctggcggaggcggatctgggggcggaggctctttcgaacaagttcagcttcaacagcctggcgctgagctggtcaaacctggcgcttctgtgaagatgagctgcaaagccagcggctacgccttcagcagctactggatcaactggatgaagcagaaacccggccagggactcgaatggatcggccaaatctatcccggcgacggcgacaccaactacaacggcaagttcaagggcagagccacactgaccgccgatacctctagcagcacagcctacatgcagctgagcagcctgaccagcgaagatagcgccgtgtacttctgtgcccggtccatcacaacagtcgtgggctgcgctatggactattggggccagggaacaagcgtgaccgtgtctagtacgcgtatccagaaccctgatcctgccgtgtaccagctgcgggatagcaagagcagcgacaagagcgtgtgtctgttcaccgacttcgacagccagaccaacgtgtcccagagcaaggactccgacgtgtacatcaccgataagtgcgtgctggacatgcggagcatggacttcaagagcaactccgccgtggcctggtccaacaagtccgatttcgcctgcgccaacgccttcaacaacagcattatccccgaggacacattcttcccaagccccgagagcagctgcgacgtgaagctggtggaaaagagcttcgagacagacaccaacctgaacttccagaacctgagcgtgatcggcttcagaatcctgctgctgaaagtggccggctttaacctgctgatgaccctgcggctgtggtccagctaa

SEQ ID NO: 32880 - DNA, 3396 bp, synthetic construct
  source 1..3396: mol_type = other DNA
atggccttaccagtgaccgccttgctcctgccgctggccttgctgctccacgccgccaggccggaagtgcaactggttgaatccggtggcggcctggtgcaacccggcggatctctcagacttagctgtgccgcctccggcagaaccttcacaatgggatggtacaggcaggctccagggaaagagagagagttcgtcgccgccatctctctgtctcccacactggcctactacgccgactctgtgaaaggccggttcaccatctccagagataatagcaagaacaccgtggtgctgcaaatgaactctctgagagccgaggatacagccctgtactattgtgccgctgaccggaagtccgtgatgagcatcagacccgattactggggacagggcacactggtcacagtgtctagtggtaccggcggaggcggatctggcggcggaggtagcggtggcggaggatctgaattcgacatccagatgacacagagccctagcagcctgtctgccagcgtgggagacagagtgaccatcacatgcaaggccagcgaccacatcaacaactggctggcctggtatcagcagaagcctggacaggcccctaagctgctgatctacggcgctaccacactggaaacaggcgtgcccagcagattttctggcagcggctctggcaccgactacaccctgacaatatccagcctccagcctgaggacttcgccacctactactgtcagcagagctggaacaccccttggacattcggccagggcaccaagctggaaatcaagagactcgaggacctgaagaacgtgttcccacctgaggtggccgtgttcgagcctagcgaggccgagatcagccacacccagaaagccaccctcgtgtgcctggctaccggcttctaccccgaccatgtggaactgtcttggtgggtcaacggcaaagaggtgcacagcggcgtgtgtaccgacccccagccactgaaagaacagcccgccctgaacgacagccggtactgcctgagcagcagactgagagtgtccgccaccttctggcagaacccccggaaccacttcagatgccaggtgcagttctacggcctgagcgagaacgacgagtggacccaggacagagccaagcccgtgacccagatcgtgtctgccgaagcctggggcagagccgattgcggctttaccagcgagagctaccagcagggcgtgctgagcgccaccatcctgtacgagatcctgctgggcaaggccaccctgtacgccgtgctggtgtctgccctggtgctgatggctatggtcaagcggaaggacagccggggaagggccaagcgatctggatctggagcaacaaacttctcactactcaaacaagcaggtgacgtggaggagaatcccgggcctactagtgccaccatggactggatttggcgcatccttttccttgtcggcgctgctaccggcgcccattccgggcccgaagtgcagctggttgaatctggcggaggactggttcaggctggcggatctctgagactgtcttgtgccgccagcggcagaacctttagcatgggctggtttagacaggcccctggcaaagagagagagttcgtcgccgccatcacatactctggcggcagcccttactacgccgactctgtgaagggcagattcaccatcagccgggacaacgccaagaacaccgtgtacctccagatgaacagcctgaagcctgaggacaccgccgtgtactactgcgccgccaatccaacatacggcagcgactggaacgccgagaattggggccagggaacccaagtgacagtgtctagcggatccggcggcggaggatctggcggaggcggatctgggggcggaggctctttcgaacaagttcagcttcaacagcctggcgctgagctggtcaaacctggcgcttctgtgaagatgagctgcaaagccagcggctacgccttcagcagctactggatcaactggatgaagcagaaacccggccagggactcgaatggatcggccaaatctatcccggcgacggcgacaccaactacaacggcaagttcaagggcagagccacactgaccgccgatacctctagcagcacagcctacatgcagctgagcagcctgaccagcgaagatagcgccgtgtacttctgtgcccggtccatcacaacagtcgtgggctgcgctatggactattggggccagggaacaagcgtgaccgtgtctagtacgcgtatccagaaccctgatcctgccgtgtaccagctgcgggatagcaagagcagcgacaagagcgtgtgtctgttcaccgacttcgacagccagaccaacgtgtcccagagcaaggactccgacgtgtacatcaccgataagtgcgtgctggacatgcggagcatggacttcaagagcaactccgccgtggcctggtccaacaagtccgatttcgcctgcgccaacgccttcaacaacagcattatccccgaggacacattcttcccaagccccgagagcagctgcgacgtgaagctggtggaaaagagcttcgagacagacaccaacctgaacttccagaacctgagcgtgatcggcttcagaatcctgctgctgaaagtggccggctttaacctgctgatgaccctgcggctgtggtccagccgcgccaagagaagcggatctggcgtgaagcagaccctgaatttcgacctgctgaagctggctggcgacgtggaatccaacccaggcccttctagaggccatatgaccgagtacaagcccacggtgcgcctcgccacccgcgacgacgtccccagggccgtacgcaccctcgccgccgcgttcgccgactaccccgccacgcgccacaccgtcgatccggaccgccacatcgagcgggtcaccgagctgcaagaactcttcctcacgcgcgtcgggctcgacatcggcaaggtgtgggtcgcggacgacggcgccgcggtggcggtctggaccacgccggagagcgtcgaagcgggggcggtgttcgccgagatcggcccgcgcatggccgagttgagcggttcccggctggccgcgcagcaacagatggaaggcctcctggcgccgcaccggcccaaggagcccgcgtggttcctggccaccgtcggcgtctcgcccgaccaccagggcaagggtctgggcagcgccgtcgtgctccccggagtggaggcggccgagcgcgccggggtgcccgccttcctggagacctccgcgccccgcaacctccccttctacgagcggctcggcttcaccgtcaccgccgacgtcgaggtgcccgaaggaccgcgcacctggtgcatgacccgcaagcccggtgcctga

SEQ ID NO: 32881 - DNA, 2694 bp, synthetic construct
  source 1..2694: mol_type = other DNA
atggccttaccagtgaccgccttgctcctgccgctggccttgctgctccacgccgccaggccggaggttcagctgcttgagtctggcggaggactggttcaacctggcggaagcctgagactgtcttgtgccgcctctggcagaaccttcagcatgggctggtatagacaggcccctggcaagggcctcgaatttgtgtctgccatcacatacagcggcggcagcccttactacgccgattctgtgaagggcagattcaccatcagccgggacaacagcaagaacaccgtgtacctccagatgaacagcctgagagccgaggacaccgccgtgtactactgtgccgccaatccaacctacggcagcgactggaatgccgagaattggggccagggcacactggtcacagtgtctagtggtaccggcggaggcggatctggcggcggaggtagcggtggcggaggatctgaattcgacatccagatgacacagagccctagcagcctgtctgccagcgtgggagacagagtgaccatcacatgcaaggccagcgaccacatcaacaactggctggcctggtatcagcagaagcctggacaggcccctaagctgctgatctacggcgctaccacactggaaacaggcgtgcccagcagattttctggcagcggctctggcaccgactacaccctgacaatatccagcctccagcctgaggacttcgccacctactactgtcagcagagctggaacaccccttggacattcggccagggcaccaagctggaaatcaagagactcgaggacctgaagaacgtgttcccacctgaggtggccgtgttcgagcctagcgaggccgagatcagccacacccagaaagccaccctcgtgtgcctggctaccggcttctaccccgaccatgtggaactgtcttggtgggtcaacggcaaagaggtgcacagcggcgtgtgtaccgacccccagccactgaaagaacagcccgccctgaacgacagccggtactgcctgagcagcagactgagagtgtccgccaccttctggcagaacccccggaaccacttcagatgccaggtgcagttctacggcctgagcgagaacgacgagtggacccaggacagagccaagcccgtgacccagatcgtgtctgccgaagcctggggcagagccgattgcggctttaccagcgagagctaccagcagggcgtgctgagcgccaccatcctgtacgagatcctgctgggcaaggccaccctgtacgccgtgctggtgtctgccctggtgctgatggctatggtcaagcggaaggacagccggggaagggccaagcgatctggatctggagcaacaaacttctcactactcaaacaagcaggtgacgtggaggagaatcccgggcctactagtaccatggactggatttggcgcatccttttccttgtcggcgctgctaccggcgcccattccgggcccgaagtgcaactggttgaatccggtggcggcctggtgcaacccggcggatctctcagacttagctgtgccgcctccggcagaaccttcacaatgggatggtacaggcaggctccagggaaagagagagagttcgtcgccgccatctctctgtctcccacactggcctactacgccgactctgtgaaaggccggttcaccatctccagagataatagcaagaacaccgtggtgctgcaaatgaactctctgagagccgaggatacagccctgtactattgtgccgctgaccggaagtccgtgatgagcatcagacccgattactggggacagggcacactggtcacagtgtctagtggatccggcggcggaggatctggcggaggcggatctgggggcggaggctctttcgaacaagttcagcttcaacagcctggcgctgagctggtcaaacctggcgcttctgtgaagatgagctgcaaagccagcggctacgccttcagcagctactggatcaactggatgaagcagaaacccggccagggactcgaatggatcggccaaatctatcccggcgacggcgacaccaactacaacggcaagttcaagggcagagccacactgaccgccgatacctctagcagcacagcctacatgcagctgagcagcctgaccagcgaagatagcgccgtgtacttctgtgcccggtccatcacaacagtcgtgggctgcgctatggactattggggccagggaacaagcgtgaccgtgtctagtacgcgtatccagaaccctgatcctgccgtgtaccagctgcgggatagcaagagcagcgacaagagcgtgtgtctgttcaccgacttcgacagccagaccaacgtgtcccagagcaaggactccgacgtgtacatcaccgataagtgcgtgctggacatgcggagcatggacttcaagagcaactccgccgtggcctggtccaacaagtccgatttcgcctgcgccaacgccttcaacaacagcattatccccgaggacacattcttcccaagccccgagagcagctgcgacgtgaagctggtggaaaagagcttcgagacagacaccaacctgaacttccagaacctgagcgtgatcggcttcagaatcctgctgctgaaagtggccggctttaacctgctgatgaccctgcggctgtggtccagctaa

SEQ ID NO: 32882 - DNA, 3396 bp, synthetic construct
  source 1..3396: mol_type = other DNA
atggccttaccagtgaccgccttgctcctgccgctggccttgctgctccacgccgccaggccggaagtgcaactggttgaatccggtggcggcctggtgcaacccggcggatctctcagacttagctgtgccgcctccggcagaaccttcacaatgggatggtacaggcaggctccagggaaagagagagagttcgtcgccgccatctctctgtctcccacactggcctactacgccgactctgtgaaaggccggttcaccatctccagagataatagcaagaacaccgtggtgctgcaaatgaactctctgagagccgaggatacagccctgtactattgtgccgctgaccggaagtccgtgatgagcatcagacccgattactggggacagggcacactggtcacagtgtctagtggtaccggcggaggcggatctggcggcggaggtagcggtggcggaggatctgaattcgacatccagatgacacagagccctagcagcctgtctgccagcgtgggagacagagtgaccatcacatgcaaggccagcgaccacatcaacaactggctggcctggtatcagcagaagcctggacaggcccctaagctgctgatctacggcgctaccacactggaaacaggcgtgcccagcagattttctggcagcggctctggcaccgactacaccctgacaatatccagcctccagcctgaggacttcgccacctactactgtcagcagagctggaacaccccttggacattcggccagggcaccaagctggaaatcaagagactcgaggacctgaagaacgtgttcccacctgaggtggccgtgttcgagcctagcgaggccgagatcagccacacccagaaagccaccctcgtgtgcctggctaccggcttctaccccgaccatgtggaactgtcttggtgggtcaacggcaaagaggtgcacagcggcgtgtgtaccgacccccagccactgaaagaacagcccgccctgaacgacagccggtactgcctgagcagcagactgagagtgtccgccaccttctggcagaacccccggaaccacttcagatgccaggtgcagttctacggcctgagcgagaacgacgagtggacccaggacagagccaagcccgtgacccagatcgtgtctgccgaagcctggggcagagccgattgcggctttaccagcgagagctaccagcagggcgtgctgagcgccaccatcctgtacgagatcctgctgggcaaggccaccctgtacgccgtgctggtgtctgccctggtgctgatggctatggtcaagcggaaggacagccggggaagggccaagcgatctggatctggagcaacaaacttctcactactcaaacaagcaggtgacgtggaggagaatcccgggcctactagtgccaccatggactggatttggcgcatccttttccttgtcggcgctgctaccggcgcccattccgggccccaggttcagctgcttgagtctggcggaggactggttcaacctggcggaagcctgagactgtcttgtgccgcctctggcagaaccttcagcatgggctggtatagacaggcccctggcaaggagagagaatttgtggccgccatcacatacagcggcggcagcccttactacgccgattctgtgaagggcagattcaccatcagccgggacaacagcaagaacaccgtgtacctccagatgaacagcctgagagccgaggacaccgccgtgtactactgtgccgccaatccaacctacggcagcgactggaatgccgagaattggggccagggcacactggtcacagtgtctagtggatccggcggcggaggatctggcggaggcggatctgggggcggaggctctttcgaacaagttcagcttcaacagcctggcgctgagctggtcaaacctggcgcttctgtgaagatgagctgcaaagccagcggctacgccttcagcagctactggatcaactggatgaagcagaaacccggccagggactcgaatggatcggccaaatctatcccggcgacggcgacaccaactacaacggcaagttcaagggcagagccacactgaccgccgatacctctagcagcacagcctacatgcagctgagcagcctgaccagcgaagatagcgccgtgtacttctgtgcccggtccatcacaacagtcgtgggctgcgctatggactattggggccagggaacaagcgtgaccgtgtctagtacgcgtatccagaaccctgatcctgccgtgtaccagctgcgggatagcaagagcagcgacaagagcgtgtgtctgttcaccgacttcgacagccagaccaacgtgtcccagagcaaggactccgacgtgtacatcaccgataagtgcgtgctggacatgcggagcatggacttcaagagcaactccgccgtggcctggtccaacaagtccgatttcgcctgcgccaacgccttcaacaacagcattatccccgaggacacattcttcccaagccccgagagcagctgcgacgtgaagctggtggaaaagagcttcgagacagacaccaacctgaacttccagaacctgagcgtgatcggcttcagaatcctgctgctgaaagtggccggctttaacctgctgatgaccctgcggctgtggtccagccgcgccaagagaagcggatctggcgtgaagcagaccctgaatttcgacctgctgaagctggctggcgacgtggaatccaacccaggcccttctagaggccatatgaccgagtacaagcccacggtgcgcctcgccacccgcgacgacgtccccagggccgtacgcaccctcgccgccgcgttcgccgactaccccgccacgcgccacaccgtcgatccggaccgccacatcgagcgggtcaccgagctgcaagaactcttcctcacgcgcgtcgggctcgacatcggcaaggtgtgggtcgcggacgacggcgccgcggtggcggtctggaccacgccggagagcgtcgaagcgggggcggtgttcgccgagatcggcccgcgcatggccgagttgagcggttcccggctggccgcgcagcaacagatggaaggcctcctggcgccgcaccggcccaaggagcccgcgtggttcctggccaccgtcggcgtctcgcccgaccaccagggcaagggtctgggcagcgccgtcgtgctccccggagtggaggcggccgagcgcgccggggtgcccgccttcctggagacctccgcgccccgcaacctccccttctacgagcggctcggcttcaccgtcaccgccgacgtcgaggtgcccgaaggaccgcgcacctggtgcatgacccgcaagcccggtgcctga

SEQ ID NO: 32883 - DNA, 3399 bp, synthetic construct
  source 1..3399: mol_type = other DNA
atggccttaccagtgaccgccttgctcctgccgctggccttgctgctccacgccgccaggccgcaagtgaagctggaagagtctggcggaggactggtgcaggctggaagaagcctgagactgtcttgtgccgccagcgagcacacctttagctctcacgtgatgggctggttcagacaggcccctggcaaagaaagggaaagcgtggccgttatcggctggcgggatattagcacctactacgccgatagcgtgaagggcagattcaccatcagccgggacaacgccaagaaaaccctgtacctccagatgaacagcctgaagccagaggacaccgccgtgtactactgcgccgccagaagaattgacgccgccgactttgattcttggggccagggaacccaagtgaccgtttctagcggtaccggcggaggcggatctggcggcggaggtagcggtggcggaggatctgaattcgacatccagatgacacagagccctagcagcctgtctgccagcgtgggagacagagtgaccatcacatgcaaggccagcgaccacatcaacaactggctggcctggtatcagcagaagcctggacaggcccctaagctgctgatctacggcgctaccacactggaaacaggcgtgcccagcagattttctggcagcggctctggcaccgactacaccctgacaatatccagcctccagcctgaggacttcgccacctactactgtcagcagagctggaacaccccttggacattcggccagggcaccaagctggaaatcaagagactcgaggacctgaagaacgtgttcccacctgaggtggccgtgttcgagcctagcaaggccgagatcgcccacacccagaaagccaccctcgtgtgcctggctaccggcttctaccccgaccatgtggaactgtcttggtgggtcaacggcaaagaggtgcacagcggcgtgtgtaccgacccccagccactgaaagaacagcccgccctgaacgacagccggtactgcctgagcagcagactgagagtgtccgccaccttctggcagaacccccggaaccacttcagatgccaggtgcagttctacggcctgagcgagaacgacgagtggacccaggacagagccaagcccgtgacccagatcgtgtctgccgaagcctggggcagagccgattgcggcatcaccagcgccagctaccaccagggcgtgctgagcgccaccatcctgtacgagatcctgctgggcaaggccaccctgtacgccgtgctggtgtctgccctggtgctgatggctatggtcaagcggaaggacagccggggaagggccaagcgatctggatctggagcaacaaacttctcactactcaaacaagcaggtgacgtggaggagaatcccgggcctactagtgccaccatggactggatttggcgcatccttttccttgtcggcgctgctaccggcgcccattccgggcccgaagtgcagctggttgaatctggcggaggactggttcaggctggcggatctctgagactgtcttgtgccgccagcggcagaacctttagcatgggctggtttagacaggcccctggcaaagagagagagttcgtcgccgccatcacatactctggcggcagcccttactacgccgactctgtgaagggcagattcaccatcagccgggacaacgccaagaacaccgtgtacctccagatgaacagcctgaagcctgaggacaccgccgtgtactactgcgccgccaatccaacatacggcagcgactggaacgccgagaattggggccagggaacccaagtgacagtgtctagcggatccggcggcggaggatctggcggaggcggatctgggggcggaggctctttcgaacaagttcagcttcaacagcctggcgctgagctggtcaaacctggcgcttctgtgaagatgagctgcaaagccagcggctacgccttcagcagctactggatcaactggatgaagcagaaacccggccagggactcgaatggatcggccaaatctatcccggcgacggcgacaccaactacaacggcaagttcaagggcagagccacactgaccgccgatacctctagcagcacagcctacatgcagctgagcagcctgaccagcgaagatagcgccgtgtacttctgtgcccggtccatcacaacagtcgtgggctgcgctatggactattggggccagggaacaagcgtgaccgtgtctagtacgcgtatccagaaccctgatcctgccgtgtaccagctgcgggatagcaagagcagcgacaagagcgtgtgtctgttcaccgacttcgacagccagaccaacgtgtcccagagcaaggactccgacgtgtacatcaccgataagtgcgtgctggacatgcggagcatggacttcaagagcaactccgccgtggcctggtccaacaagtccgatttcgcctgcgccaacgccttcaacaacagcattatccccgaggacacattcttcccaagcagcgacgtgccctgcgacgtgaagctggtggaaaagagcttcgagacagacaccaacctgaacttccagaacctgagcgtgatcggcttcagaatcctgctgctgaaagtggccggctttaacctgctgatgaccctgcggctgtggtccagccgcgccaagagaagcggatctggcgtgaagcagaccctgaatttcgacctgctgaagctggctggcgacgtggaatccaacccaggcccttctagaggccatatgaccgagtacaagcccacggtgcgcctcgccacccgcgacgacgtccccagggccgtacgcaccctcgccgccgcgttcgccgactaccccgccacgcgccacaccgtcgatccggaccgccacatcgagcgggtcaccgagctgcaagaactcttcctcacgcgcgtcgggctcgacatcggcaaggtgtgggtcgcggacgacggcgccgcggtggcggtctggaccacgccggagagcgtcgaagcgggggcggtgttcgccgagatcggcccgcgcatggccgagttgagcggttcccggctggccgcgcagcaacagatggaaggcctcctggcgccgcaccggcccaaggagcccgcgtggttcctggccaccgtcggcgtctcgcccgaccaccagggcaagggtctgggcagcgccgtcgtgctccccggagtggaggcggccgagcgcgccggggtgcccgccttcctggagacctccgcgccccgcaacctccccttctacgagcggctcggcttcaccgtcaccgccgacgtcgaggtgcccgaaggaccgcgcacctggtgcatgacccgcaagcccggtgcctga

SEQ ID NO: 32884 - DNA, 3396 bp, synthetic construct
  source 1..3396: mol_type = other DNA
atggccttaccagtgaccgccttgctcctgccgctggccttgctgctccacgccgccaggccggaagtgcaactggttgaatccggtggcggcctggtgcaacccggcggatctctcagacttagctgtgccgcctccggcagaaccttcacaatgggatggtacaggcaggctccagggaaagagagagagttcgtcgccgccatctctctgtctcccacactggcctactacgccgactctgtgaaaggccggttcaccatctccagagataatagcaagaacaccgtggtgctgcaaatgaactctctgagagccgaggatacagccctgtactattgtgccgctgaccggaagtccgtgatgagcatcagacccgattactggggacagggcacactggtcacagtgtctagtggtaccggcggaggcggatctggcggcggaggtagcggtggcggaggatctgaattcgacatccagatgacacagagccctagcagcctgtctgccagcgtgggagacagagtgaccatcacatgcaaggccagcgaccacatcaacaactggctggcctggtatcagcagaagcctggacaggcccctaagctgctgatctacggcgctaccacactggaaacaggcgtgcccagcagattttctggcagcggctctggcaccgactacaccctgacaatatccagcctccagcctgaggacttcgccacctactactgtcagcagagctggaacaccccttggacattcggccagggcaccaagctggaaatcaagagactcgaggacctgaagaacgtgttcccacctgaggtggccgtgttcgagcctagcaaggccgagatcgcccacacccagaaagccaccctcgtgtgcctggctaccggcttctaccccgaccatgtggaactgtcttggtgggtcaacggcaaagaggtgcacagcggcgtgtgtaccgacccccagccactgaaagaacagcccgccctgaacgacagccggtactgcctgagcagcagactgagagtgtccgccaccttctggcagaacccccggaaccacttcagatgccaggtgcagttctacggcctgagcgagaacgacgagtggacccaggacagagccaagcccgtgacccagatcgtgtctgccgaagcctggggcagagccgattgcggcatcaccagcgccagctaccaccagggcgtgctgagcgccaccatcctgtacgagatcctgctgggcaaggccaccctgtacgccgtgctggtgtctgccctggtgctgatggctatggtcaagcggaaggacagccggggaagggccaagcgatctggatctggagcaacaaacttctcactactcaaacaagcaggtgacgtggaggagaatcccgggcctactagtgccaccatggactggatttggcgcatccttttccttgtcggcgctgctaccggcgcccattccgggcccgaagtgcagctggttgaatctggcggaggactggttcaggctggcggatctctgagactgtcttgtgccgccagcggcagaacctttagcatgggctggtttagacaggcccctggcaaagagagagagttcgtcgccgccatcacatactctggcggcagcccttactacgccgactctgtgaagggcagattcaccatcagccgggacaacgccaagaacaccgtgtacctccagatgaacagcctgaagcctgaggacaccgccgtgtactactgcgccgccaatccaacatacggcagcgactggaacgccgagaattggggccagggaacccaagtgacagtgtctagcggatccggcggcggaggatctggcggaggcggatctgggggcggaggctctttcgaacaagttcagcttcaacagcctggcgctgagctggtcaaacctggcgcttctgtgaagatgagctgcaaagccagcggctacgccttcagcagctactggatcaactggatgaagcagaaacccggccagggactcgaatggatcggccaaatctatcccggcgacggcgacaccaactacaacggcaagttcaagggcagagccacactgaccgccgatacctctagcagcacagcctacatgcagctgagcagcctgaccagcgaagatagcgccgtgtacttctgtgcccggtccatcacaacagtcgtgggctgcgctatggactattggggccagggaacaagcgtgaccgtgtctagtacgcgtatccagaaccctgatcctgccgtgtaccagctgcgggatagcaagagcagcgacaagagcgtgtgtctgttcaccgacttcgacagccagaccaacgtgtcccagagcaaggactccgacgtgtacatcaccgataagtgcgtgctggacatgcggagcatggacttcaagagcaactccgccgtggcctggtccaacaagtccgatttcgcctgcgccaacgccttcaacaacagcattatccccgaggacacattcttcccaagcagcgacgtgccctgcgacgtgaagctggtggaaaagagcttcgagacagacaccaacctgaacttccagaacctgagcgtgatcggcttcagaatcctgctgctgaaagtggccggctttaacctgctgatgaccctgcggctgtggtccagccgcgccaagagaagcggatctggcgtgaagcagaccctgaatttcgacctgctgaagctggctggcgacgtggaatccaacccaggcccttctagaggccatatgaccgagtacaagcccacggtgcgcctcgccacccgcgacgacgtccccagggccgtacgcaccctcgccgccgcgttcgccgactaccccgccacgcgccacaccgtcgatccggaccgccacatcgagcgggtcaccgagctgcaagaactcttcctcacgcgcgtcgggctcgacatcggcaaggtgtgggtcgcggacgacggcgccgcggtggcggtctggaccacgccggagagcgtcgaagcgggggcggtgttcgccgagatcggcccgcgcatggccgagttgagcggttcccggctggccgcgcagcaacagatggaaggcctcctggcgccgcaccggcccaaggagcccgcgtggttcctggccaccgtcggcgtctcgcccgaccaccagggcaagggtctgggcagcgccgtcgtgctccccggagtggaggcggccgagcgcgccggggtgcccgccttcctggagacctccgcgccccgcaacctccccttctacgagcggctcggcttcaccgtcaccgccgacgtcgaggtgcccgaaggaccgcgcacctggtgcatgacccgcaagcccggtgcctga

SEQ ID NO: 32885 - DNA, 3396 bp, synthetic construct
  source 1..3396: mol_type = other DNA
atggccttaccagtgaccgccttgctcctgccgctggccttgctgctccacgccgccaggccggaagtgcaactggttgaatccggtggcggcctggtgcaagcaggcggatctctcagacttagctgtgccgcctccggcagaaccttcacaatgggatggtttaggcaggctccagggaaagagagagagttcgtcgccgccatctctctgtctcccacactggcctactacgccgactctgtgaaaggccggttcaccatctccagagataatgccaagaacaccgtggtgctgcaaatgaactctctgaaacccgaggatacagccctgtactattgtgccgctgaccggaagtccgtgatgagcatcagacccgattactggggacagggcacacaagtcacagtgtcctctggtaccggcggaggcggatctggcggcggaggtagcggtggcggaggatctgaattcgacatccagatgacacagagccctagcagcctgtctgccagcgtgggagacagagtgaccatcacatgcaaggccagcgaccacatcaacaactggctggcctggtatcagcagaagcctggacaggcccctaagctgctgatctacggcgctaccacactggaaacaggcgtgcccagcagattttctggcagcggctctggcaccgactacaccctgacaatatccagcctccagcctgaggacttcgccacctactactgtcagcagagctggaacaccccttggacattcggccagggcaccaagctggaaatcaagagactcgaggacctgaagaacgtgttcccacctgaggtggccgtgttcgagcctagcaaggccgagatcgcccacacccagaaagccaccctcgtgtgcctggctaccggcttctaccccgaccatgtggaactgtcttggtgggtcaacggcaaagaggtgcacagcggcgtgtgtaccgacccccagccactgaaagaacagcccgccctgaacgacagccggtactgcctgagcagcagactgagagtgtccgccaccttctggcagaacccccggaaccacttcagatgccaggtgcagttctacggcctgagcgagaacgacgagtggacccaggacagagccaagcccgtgacccagatcgtgtctgccgaagcctggggcagagccgattgcggcatcaccagcgccagctaccaccagggcgtgctgagcgccaccatcctgtacgagatcctgctgggcaaggccaccctgtacgccgtgctggtgtctgccctggtgctgatggctatggtcaagcggaaggacagccggggaagggccaagcgatctggatctggagcaacaaacttctcactactcaaacaagcaggtgacgtggaggagaatcccgggcctactagtgccaccatggactggatttggcgcatccttttccttgtcggcgctgctaccggcgcccattccgggcccgaagtgcagctggttgaatctggcggaggactggttcaggctggcggatctctgagactgtcttgtgccgccagcggcagaacctttagcatgggctggtttagacaggcccctggcaaagagagagagttcgtcgccgccatcacatactctggcggcagcccttactacgccgactctgtgaagggcagattcaccatcagccgggacaacgccaagaacaccgtgtacctccagatgaacagcctgaagcctgaggacaccgccgtgtactactgcgccgccaatccaacatacggcagcgactggaacgccgagaattggggccagggaacccaagtgacagtgtctagcggatccggcggcggaggatctggcggaggcggatctgggggcggaggctctttcgaacaagttcagcttcaacagcctggcgctgagctggtcaaacctggcgcttctgtgaagatgagctgcaaagccagcggctacgccttcagcagctactggatcaactggatgaagcagaaacccggccagggactcgaatggatcggccaaatctatcccggcgacggcgacaccaactacaacggcaagttcaagggcagagccacactgaccgccgatacctctagcagcacagcctacatgcagctgagcagcctgaccagcgaagatagcgccgtgtacttctgtgcccggtccatcacaacagtcgtgggctgcgctatggactattggggccagggaacaagcgtgaccgtgtctagtacgcgtatccagaaccctgatcctgccgtgtaccagctgcgggatagcaagagcagcgacaagagcgtgtgtctgttcaccgacttcgacagccagaccaacgtgtcccagagcaaggactccgacgtgtacatcaccgataagtgcgtgctggacatgcggagcatggacttcaagagcaactccgccgtggcctggtccaacaagtccgatttcgcctgcgccaacgccttcaacaacagcattatccccgaggacacattcttcccaagcagcgacgtgccctgcgacgtgaagctggtggaaaagagcttcgagacagacaccaacctgaacttccagaacctgagcgtgatcggcttcagaatcctgctgctgaaagtggccggctttaacctgctgatgaccctgcggctgtggtccagccgcgccaagagaagcggatctggcgtgaagcagaccctgaatttcgacctgctgaagctggctggcgacgtggaatccaacccaggcccttctagaggccatatgaccgagtacaagcccacggtgcgcctcgccacccgcgacgacgtccccagggccgtacgcaccctcgccgccgcgttcgccgactaccccgccacgcgccacaccgtcgatccggaccgccacatcgagcgggtcaccgagctgcaagaactcttcctcacgcgcgtcgggctcgacatcggcaaggtgtgggtcgcggacgacggcgccgcggtggcggtctggaccacgccggagagcgtcgaagcgggggcggtgttcgccgagatcggcccgcgcatggccgagttgagcggttcccggctggccgcgcagcaacagatggaaggcctcctggcgccgcaccggcccaaggagcccgcgtggttcctggccaccgtcggcgtctcgcccgaccaccagggcaagggtctgggcagcgccgtcgtgctccccggagtggaggcggccgagcgcgccggggtgcccgccttcctggagacctccgcgccccgcaacctccccttctacgagcggctcggcttcaccgtcaccgccgacgtcgaggtgcccgaaggaccgcgcacctggtgcatgacccgcaagcccggtgcctga

SEQ ID NO: 32886 - DNA, 3396 bp, synthetic construct
  source 1..3396: mol_type = other DNA
atggccttaccagtgaccgccttgctcctgccgctggccttgctgctccacgccgccaggccggaagtgcaactggttgaatccggtggcggcctggtgcaacccggcggatctctcagacttagctgtgccgcctccggcagaaccttcacaatgggatggtacaggcaggctccagggaaagagagagagttcgtcgccgccatctctctgtctcccacactggcctactacgccgactctgtgaaaggccggttcaccatctccagagataatagcaagaacaccgtggtgctgcaaatgaactctctgagagccgaggatacagccctgtactattgtgccgctgaccggaagtccgtgatgagcatcagacccgattactggggacagggcacactggtcacagtgtctagtggtaccggcggaggcggatctggcggcggaggtagcggtggcggaggatctgaattcgacatccagatgacacagagccctagcagcctgtctgccagcgtgggagacagagtgaccatcacatgcaaggccagcgaccacatcaacaactggctggcctggtatcagcagaagcctggacaggcccctaagctgctgatctacggcgctaccacactggaaacaggcgtgcccagcagattttctggcagcggctctggcaccgactacaccctgacaatatccagcctccagcctgaggacttcgccacctactactgtcagcagagctggaacaccccttggacattcggccagggcaccaagctggaaatcaagagactcgaggacctgaagaacgtgttcccacctgaggtggccgtgttcgagcctagcaaggccgagatcgcccacacccagaaagccaccctcgtgtgcctggctaccggcttctaccccgaccatgtggaactgtcttggtgggtcaacggcaaagaggtgcacagcggcgtgtgtaccgacccccagccactgaaagaacagcccgccctgaacgacagccggtactgcctgagcagcagactgagagtgtccgccaccttctggcagaacccccggaaccacttcagatgccaggtgcagttctacggcctgagcgagaacgacgagtggacccaggacagagccaagcccgtgacccagatcgtgtctgccgaagcctggggcagagccgattgcggcatcaccagcgccagctaccaccagggcgtgctgagcgccaccatcctgtacgagatcctgctgggcaaggccaccctgtacgccgtgctggtgtctgccctggtgctgatggctatggtcaagcggaaggacagccggggaagggccaagcgatctggatctggagcaacaaacttctcactactcaaacaagcaggtgacgtggaggagaatcccgggcctactagtgccaccatggactggatttggcgcatccttttccttgtcggcgctgctaccggcgcccattccgggccccaggttcagctgcaagagtctggcggaggacttgctcaagctggcggaagcctgagactgtcttgtgccgcctctggcagaaccttcagcatgggctggtttagacaggcccctggcaaagagagagagttcgtcgccgccatcacatacagcggcggcagcccttactacgcctcttctgtcagaggccggttcaccatcagccgggacaacgccaagaacaccgtgtacctccagatgaacagcctgaagccagaggacaccgccgtgtactactgtgccgccaatccaacctacggcagcgactggaatgccgagaattggggccagggcacccaagtgacagtgtctagtggatccggcggcggaggatctggcggaggcggatctgggggcggaggctctttcgaacaagttcagcttcaacagcctggcgctgagctggtcaaacctggcgcttctgtgaagatgagctgcaaagccagcggctacgccttcagcagctactggatcaactggatgaagcagaaacccggccagggactcgaatggatcggccaaatctatcccggcgacggcgacaccaactacaacggcaagttcaagggcagagccacactgaccgccgatacctctagcagcacagcctacatgcagctgagcagcctgaccagcgaagatagcgccgtgtacttctgtgcccggtccatcacaacagtcgtgggctgcgctatggactattggggccagggaacaagcgtgaccgtgtctagtacgcgtatccagaaccctgatcctgccgtgtaccagctgcgggatagcaagagcagcgacaagagcgtgtgtctgttcaccgacttcgacagccagaccaacgtgtcccagagcaaggactccgacgtgtacatcaccgataagtgcgtgctggacatgcggagcatggacttcaagagcaactccgccgtggcctggtccaacaagtccgatttcgcctgcgccaacgccttcaacaacagcattatccccgaggacacattcttcccaagcagcgacgtgccctgcgacgtgaagctggtggaaaagagcttcgagacagacaccaacctgaacttccagaacctgagcgtgatcggcttcagaatcctgctgctgaaagtggccggctttaacctgctgatgaccctgcggctgtggtccagccgcgccaagagaagcggatctggcgtgaagcagaccctgaatttcgacctgctgaagctggctggcgacgtggaatccaacccaggcccttctagaggccatatgaccgagtacaagcccacggtgcgcctcgccacccgcgacgacgtccccagggccgtacgcaccctcgccgccgcgttcgccgactaccccgccacgcgccacaccgtcgatccggaccgccacatcgagcgggtcaccgagctgcaagaactcttcctcacgcgcgtcgggctcgacatcggcaaggtgtgggtcgcggacgacggcgccgcggtggcggtctggaccacgccggagagcgtcgaagcgggggcggtgttcgccgagatcggcccgcgcatggccgagttgagcggttcccggctggccgcgcagcaacagatggaaggcctcctggcgccgcaccggcccaaggagcccgcgtggttcctggccaccgtcggcgtctcgcccgaccaccagggcaagggtctgggcagcgccgtcgtgctccccggagtggaggcggccgagcgcgccggggtgcccgccttcctggagacctccgcgccccgcaacctccccttctacgagcggctcggcttcaccgtcaccgccgacgtcgaggtgcccgaaggaccgcgcacctggtgcatgacccgcaagcccggtgcctga

SEQ ID NO: 32887 - DNA, 3402 bp, synthetic construct
  source 1..3402: mol_type = other DNA
atggccttaccagtgaccgccttgctcctgccgctggccttgctgctccacgccgccaggccgcaagtgaagctggaagagtctggcggaggactggtgcaggctggaagaagcctgagactgtcttgtgccgccagcgagcacacctttagctctcacgtgatgggctggttcagacaggcccctggcaaagaaagggaaagcgtggccgttatcggctggcgggatattagcacctactacgccgatagcgtgaagggcagattcaccatcagccgggacaacgccaagaaaaccctgtacctccagatgaacagcctgaagccagaggacaccgccgtgtactactgcgccgccagaagaattgacgccgccgactttgattcttggggccagggaacccaagtgaccgtttctagcggtaccggcggaggcggatctggcggcggaggtagcggtggcggaggatctgaattcgacatccagatgacacagagccctagcagcctgtctgccagcgtgggagacagagtgaccatcacatgcaaggccagcgaccacatcaacaactggctggcctggtatcagcagaagcctggacaggcccctaagctgctgatctacggcgctaccacactggaaacaggcgtgcccagcagattttctggcagcggctctggcaccgactacaccctgacaatatccagcctccagcctgaggacttcgccacctactactgtcagcagagctggaacaccccttggacattcggccagggcaccaagctggaaatcaagagactcgagatccagaaccctgatcctgccgtgtaccagctgcgggatagcaagagcagcgacaagagcgtgtgtctgttcaccgacttcgacagccagaccaacgtgtcccagagcaaggactccgacgtgtacatcaccgataagtgcgtgctggacatgcggagcatggacttcaagagcaactccgccgtggcctggtccaacaagtccgatttcgcctgcgccaacgccttcaacaacagcattatccccgaggacacattcttcccaagcagcgacgtgccctgcgacgtgaagctggtggaaaagagcttcgagacagacaccaacctgaacttccagaacctgagcgtgatcggcttcagaatcctgctgctgaaagtggccggctttaacctgctgatgaccctgcggctgtggtccagccgcgccaagagaagcggatctggcgtgaagcagaccctgaatttcgacctgctgaagctggctggcgacgtggaatccaacccaggccctactagtgccaccatggactggatttggcgcatccttttccttgtcggcgctgctaccggcgcccattccgggccccaggttcagctgcaagagtctggcggaggacttgctcaagctggcggaagcctgagactgtcttgtgccgcctctggcagaaccttcagcatgggctggtttagacaggcccctggcaaagagagagagttcgtcgccgccatcacatacagcggcggcagcccttactacgcctcttctgtcagaggccggttcaccatcagccgggacaacgccaagaacaccgtgtacctccagatgaacagcctgaagccagaggacaccgccgtgtactactgtgccgccaatccaacctacggcagcgactggaatgccgagaattggggccagggcacccaagtgacagtgtctagtggatccggcggcggaggatctggcggaggcggatctgggggcggaggctctttcgaacaagttcagcttcaacagcctggcgctgagctggtcaaacctggcgcttctgtgaagatgagctgcaaagccagcggctacgccttcagcagctactggatcaactggatgaagcagaaacccggccagggactcgaatggatcggccaaatctatcccggcgacggcgacaccaactacaacggcaagttcaagggcagagccacactgaccgccgatacctctagcagcacagcctacatgcagctgagcagcctgaccagcgaagatagcgccgtgtacttctgtgcccggtccatcacaacagtcgtgggctgcgctatggactattggggccagggaacaagcgtgaccgtgtctagtacgcgtgaggacctgaagaacgtgttcccacctgaggtggccgtgttcgagcctagcaaggccgagatcgcccacacccagaaagccaccctcgtgtgcctggctaccggcttctaccccgaccatgtggaactgtcttggtgggtcaacggcaaagaggtgcacagcggcgtgtgtaccgacccccagccactgaaagaacagcccgccctgaacgacagccggtactgcctgagcagcagactgagagtgtccgccaccttctggcagaacccccggaaccacttcagatgccaggtgcagttctacggcctgagcgagaacgacgagtggacccaggacagagccaagcccgtgacccagatcgtgtctgccgaagcctggggcagagccgattgcggcatcaccagcgccagctaccaccagggcgtgctgagcgccaccatcctgtacgagatcctgctgggcaaggccaccctgtacgccgtgctggtgtctgccctggtgctgatggctatggtcaagcggaaggacagccggggaagggccaagcgatctggatctggagcaacaaacttctcactactcaaacaagcaggtgacgtggaggagaatcccgggccttctagaggccatatgaccgagtacaagcccacggtgcgcctcgccacccgcgacgacgtccccagggccgtacgcaccctcgccgccgcgttcgccgactaccccgccacgcgccacaccgtcgatccggaccgccacatcgagcgggtcaccgagctgcaagaactcttcctcacgcgcgtcgggctcgacatcggcaaggtgtgggtcgcggacgacggcgccgcggtggcggtctggaccacgccggagagcgtcgaagcgggggcggtgttcgccgagatcggcccgcgcatggccgagttgagcggttcccggctggccgcgcagcaacagatggaaggcctcctggcgccgcaccggcccaaggagcccgcgtggttcctggccaccgtcggcgtctcgcccgaccaccagggcaagggtctgggcagcgccgtcgtgctccccggagtggaggcggccgagcgcgccggggtgcccgccttcctggagacctccgcgccccgcaacctccccttctacgagcggctcggcttcaccgtcaccgccgacgtcgaggtgcccgaaggaccgcgcacctggtgcatgacccgcaagcccggtgcctga

SEQ ID NO: 32888 - DNA, 3396 bp, synthetic construct; identical to SEQ ID NO: 32886
  source 1..3396: mol_type = other DNA

SEQ ID NO: 32889 - DNA, 2706 bp, synthetic construct
  source 1..2706: mol_type = other DNA
atggccttaccagtgaccgccttgctcctgccgctggccttgctgctccacgccgccaggccggaggttcagctgcttgagtctggcggaggactggttcaacctggcggaagcctgagactgtcttgtgccgcctctggcagaaccttcagcatgggctggtatagacaggcccctggcaagggcctcgaatttgtgtctgccatcacatacagcggcggcagcccttactacgccgattctgtgaagggcagattcaccatcagccgggacaacagcaagaacaccgtgtacctccagatgaacagcctgagagccgaggacaccgccgtgtactactgtgccgccaatccaacctacggcagcgactggaatgccgagaattggggccagggcacactggtcacagtgtctagtggtaccggcggaggcggatctggcggcggaggtagcggtggcggaggatctgaattcgacatccagatgacacagagccctagcagcctgtctgccagcgtgggagacagagtgaccatcacatgcaaggccagcgaccacatcaacaactggctggcctggtatcagcagaagcctggacaggcccctaagctgctgatctacggcgctaccacactggaaacaggcgtgcccagcagattttctggcagcggctctggcaccgactacaccctgacaatatccagcctccagcctgaggacttcgccacctactactgtcagcagagctggaacaccccttggacattcggccagggcaccaagctggaaatcaagagactcgagatccagaaccctgatcctgccgtgtaccagctgcgggatagcaagagcagcgacaagagcgtgtgtctgttcaccgacttcgacagccagaccaacgtgtcccagagcaaggactccgacgtgtacatcaccgataagtgcgtgctggacatgcggagcatggacttcaagagcaactccgccgtggcctggtccaacaagtccgatttcgcctgcgccaacgccttcaacaacagcattatccccgaggacacattcttcccaagcagcgacgtgccctgcgacgtgaagctggtggaaaagagcttcgagacagacaccaacctgaacttccagaacctgagcgtgatcggcttcagaatcctgctgctgaaagtggccggctttaacctgctgatgaccctgcggctgtggtccagccgcgccaagagaagcggatctggcgtgaagcagaccctgaatttcgacctgctgaagctggctggcgacgtggaatccaacccaggccctactagtaccatggactggatttggcgcatccttttccttgtcggcgctgctaccggcacccattccgggcccgaagtgcaactggttgaatccggtggcggcctggtgcaacccggcggatctctcagacttagctgtgccgcctccggcagaaccttcacaatgggatggtacaggcaggctccagggaaagagagagagttcgtcgccgccatctctctgtctcccacactggcctactacgccgactctgtgaaaggccggttcaccatctccagagataatagcaagaacaccgtggtgctgcaaatgaactctctgagagccgaggatacagccctgtactattgtgccgctgaccggaagtccgtgatgagcatcagacccgattactggggacagggcacactggtcacagtgtctagtggatccggcggcggaggatctggcggaggcggatctgggggcggaggctctttcgaacaagttcagcttcaacagcctggcgctgagctggtcaaacctggcgcttctgtgaagatgagctgcaaagccagcggctacgccttcagcagctactggatcaactggatgaagcagaaacccggccagggactcgaatggatcggccaaatctatcccggcgacggcgacaccaactacaacggcaagttcaagggcagagccacactgaccgccgatacctctagcagcacagcctacatgcagctgagcagcctgaccagcgaagatagcgccgtgtacttctgtgcccggtccatcacaacagtcgtgggctgcgctatggactattggggccagggaacaagcgtgaccgtgtctagtacgcgtgaggacctgaagaacgtgttcccacctgaggtggccgtgttcgagcctagcaaggccgagatcgcccacacccagaaagccaccctcgtgtgcctggctaccggcttctaccccgaccatgtggaactgtcttggtgggtcaacggcaaagaggtgcacagcggcgtgtgtaccgacccccagccactgaaagaacagcccgccctgaacgacagccggtactgcctgagcagcagactgagagtgtccgccaccttctggcagaacccccggaaccacttcagatgccaggtgcagttctacggcctgagcgagaacgacgagtggacccaggacagagccaagcccgtgacccagatcgtgtctgccgaagcctggggcagagccgattgcggcatcaccagcgccagctaccaccagggcgtgctgagcgccaccatcctgtacgagatcctgctgggcaaggccaccctgtacgccgtgctggtgtctgccctggtgctgatggctatggtcaagcggaaggacagccggggataa

SEQ ID NO: 32890 - DNA, 2706 bp, synthetic construct
  source 1..2706: mol_type = other DNA
atggccttaccagtgaccgccttgctcctgccgctggccttgctgctccacgccgccaggccggaagtgcagctggttgaatctggcggaggactggttcaggctggcggatctctgagactgtcttgtgccgccagcggcagaacctttagcatgggctggtttagacaggcccctggcaaagagagagagttcgtcgccgccatcacatactctggcggcagcccttactacgccgactctgtgaagggcagattcaccatcagccgggacaacgccaagaacaccgtgtacctccagatgaacagcctgaagcctgaggacaccgccgtgtactactgcgccgccaatccaacatacggcagcgactggaacgccgagaattggggccagggaacccaagtgacagtgtctagcggtaccggcggaggcggatctggcggcggaggtagcggtggcggaggatctgaattcgacatccagatgacacagagccctagcagcctgtctgccagcgtgggagacagagtgaccatcacatgcaaggccagcgaccacatcaacaactggctggcctggtatcagcagaagcctggacaggcccctaagctgctgatctacggcgctaccacactggaaacaggcgtgcccagcagattttctggcagcggctctggcaccgactacaccctgacaatatccagcctccagcctgaggacttcgccacctactactgtcagcagagctggaacaccccttggacattcggccagggcaccaagctggaaatcaagagactcgagatccagaaccctgatcctgccgtgtaccagctgcgggatagcaagagcagcgacaagagcgtgtgtctgttcaccgacttcgacagccagaccaacgtgtcccagagcaaggactccgacgtgtacatcaccgataagtgcgtgctggacatgcggagcatggacttcaagagcaactccgccgtggcctggtccaacaagtccgatttcgcctgcgccaacgccttcaacaacagcattatccccgaggacacattcttcccaagcagcgacgtgccctgcgacgtgaagctggtggaaaagagcttcgagacagacaccaacctgaacttccagaacctgagcgtgatcggcttcagaatcctgctgctgaaagtggccggctttaacctgctgatgaccctgcggctgtggtccagccgcgccaagagaagcggatctggcgtgaagcagaccctgaatttcgacctgctgaagctggctggcgacgtggaatccaacccaggccctactagtaccatggactggatttggcgcatccttttccttgtcggcgctgctaccggcgcccattccgggcccgaagtgcaactggttgaatccggtggcggcctggtgcaacccggcggatctctcagacttagctgtgccgcctccggcagaaccttcacaatgggatggtacaggcaggctccagggaaagagagagagttcgtcgccgccatctctctgtctcccacactggcctactacgccgactctgtgaaaggccggttcaccatctccagagataatagcaagaacaccgtggtgctgcaaatgaactctctgagagccgaggatacagccctgtactattgtgccgctgaccggaagtccgtgatgagcatcagacccgattactggggacagggcacactggtcacagtgtctagtggatccggcggcggaggatctggcggaggcggatctgggggcggaggctctttcgaacaagttcagcttcaacagcctggcgctgagctggtcaaacctggcgcttctgtgaagatgagctgcaaagccagcggctacgccttcagcagctactggatcaactggatgaagcagaaacccggccagggactcgaatggatcggccaaatctatcccggcgacggcgacaccaactacaacggcaagttcaagggcagagccacactgaccgccgatacctctagcagcacagcctacatgcagctgagcagcctgaccagcgaagatagcgccgtgtacttctgtgcccggtccatcacaacagtcgtgggctgcgctatggactattggggccagggaacaagcgtgaccgtgtctagtacgcgtgaggacctgaagaacgtgttcccacctgaggtggccgtgttcgagcctagcaaggccgagatcgcccacacccagaaagccaccctcgtgtgcctggctaccggcttctaccccgaccatgtggaactgtcttggtgggtcaacggcaaagaggtgcacagcggcgtgtgtaccgacccccagccactgaaagaacagcccgccctgaacgacagccggtactgcctgagcagcagactgagagtgtccgccaccttctggcagaacccccggaaccacttcagatgccaggtgcagttctacggcctgagcgagaacgacgagtggacccaggacagagccaagcccgtgacccagatcgtgtctgccgaagcctggggcagagccgattgcggcatcaccagcgccagctaccaccagggcgtgctgagcgccaccatcctgtacgagatcctgctgggcaaggccaccctgtacgccgtgctggtgtctgccctggtgctgatggctatggtcaagcggaaggacagccggggataa

SEQ ID NO: 32891 - DNA, 3402 bp, synthetic construct
  source 1..3402: mol_type = other DNA
atggccttaccagtgaccgccttgctcctgccgctggccttgctgctccacgccgccaggccggcatgcgaagtgcaactggttgaatccggtggcggcctggtgcaagcaggcggatctctcagacttagctgtgccgcctccggcagaaccttcacaatgggatggtttaggcaggctccagggaaagagagagagttcgtcgccgccatctctctgtctcccacactggcctactacgccgactctgtgaaaggccggttcaccatctccagagataatgccaagaacaccgtggtgctgcaaatgaactctctgaaacccgaggatacagccctgtactattgtgccgctgaccggaagtccgtgatgagcatcagacccgattactggggacagggcacacaagtcacagtgtcctctggtaccggcggaggcggatctggcggcggaggtagcggtggcggaggatctgaattcgacatccagatgacacagagccctagcagcctgtctgccagcgtgggagacagagtgaccatcacatgcaaggccagcgaccacatcaacaactggctggcctggtatcagcagaagcctggacaggcccctaagctgctgatctacggcgctaccacactggaaacaggcgtgcccagcagattttctggcagcggctctggcaccgactacaccctgacaatatccagcctccagcctgaggacttcgccacctactactgtcagcagagctggaacaccccttggacattcggccagggcaccaagctggaaatcaagagactcgaggacctgaagaacgtgttcccacctgaggtggccgtgttcgagcctagcaaggccgagatcgcccacacccagaaagccaccctcgtgtgcctggctaccggcttctaccccgaccatgtggaactgtcttggtgggtcaacggcaaagaggtgcacagcggcgtgtgtaccgacccccagccactgaaagaacagcccgccctgaacgacagccggtactgcctgagcagcagactgagagtgtccgccaccttctggcagaacccccggaaccacttcagatgccaggtgcagttctacggcctgagcgagaacgacgagtggacccaggacagagccaagcccgtgacccagatcgtgtctgccgaagcctggggcagagccgattgcggcatcaccagcgccagctaccaccagggcgtgctgagcgccaccatcctgtacgagatcctgctgggcaaggccaccctgtacgccgtgctggtgtctgccctggtgctgatggctatggtcaagcggaaggacagccggggaagggccaagcgatctggatctggagcaacaaacttctcactactcaaacaagcaggtgacgtggaggagaatcccgggcctactagtgccaccatggactggatttggcgcatccttttccttgtcggcgctgctaccggcgcccattccgggcccgaagtgcagctggttgaatctggcggaggactggttcaggctggcggatctctgagactgtcttgtgccgccagcggcagaacctttagcatgggctggtttagacaggcccctggcaaagagagagagttcgtcgccgccatcacatactctggcggcagcccttactacgccgactctgtgaagggcagattcaccatcagccgggacaacgccaagaacaccgtgtacctccagatgaacagcctgaagcctgaggacaccgccgtgtactactgcgccgccaatccaacatacggcagcgactggaacgccgagaattggggccagggaacccaagtgacagtgtctagcggatccggcggcggaggatctggcggaggcggatctgggggcggaggctctttcgaacaagttcagcttcaacagcctggcgctgagctggtcaaacctggcgcttctgtgaagatgagctgcaaagccagcggctacgccttcagcagctactggatcaactggatgaagcagaaacccggccagggactcgaatggatcggccaaatctatcccggcgacggcgacaccaactacaacggcaagttcaagggcagagccacactgaccgccgatacctctagcagcacagcctacatgcagctgagcagcctgaccagcgaagatagcgccgtgtacttctgtgcccggtccatcacaacagtcgtgggctgcgctatggactattggggccagggaacaagcgtgaccgtgtctagtacgcgtatccagaaccctgatcctgccgtgtaccagctgcgggatagcaagagcagcgacaagagcgtgtgtctgttcaccgacttcgacagccagaccaacgtgtcccagagcaaggactccgacgtgtacatcaccgataagtgcgtgctggacatgcggagcatggacttcaagagcaactccgccgtggcctggtccaacaagtccgatttcgcctgcgccaacgccttcaacaacagcattatccccgaggacacattcttcccaagcagcgacgtgccctgcgacgtgaagctggtggaaaagagcttcgagacagacaccaacctgaacttccagaacctgagcgtgatcggcttcagaatcctgctgctgaaagtggccggctttaacctgctgatgaccctgcggctgtggtccagccgcgccaagagaagcggatctggcgtgaagcagaccctgaatttcgacctgctgaagctggctggcgacgtggaatccaacccaggcccttctagaggccatatgaccgagtacaagcccacggtgcgcctcgccacccgcgacgacgtccccagggccgtacgcaccctcgccgccgcgttcgccgactaccccgccacgcgccacaccgtcgatccggaccgccacatcgagcgggtcaccgagctgcaagaactcttcctcacgcgcgtcgggctcgacatcggcaaggtgtgggtcgcggacgacggcgccgcggtggcggtctggaccacgccggagagcgtcgaagcgggggcggtgttcgccgagatcggcccgcgcatggccgagttgagcggttcccggctggccgcgcagcaacagatggaaggcctcctggcgccgcaccggcccaaggagcccgcgtggttcctggccaccgtcggcgtctcgcccgaccaccagggcaagggtctgggcagcgccgtcgtgctccccggagtggaggcggccgagcgcgccggggtgcccgccttcctggagacctccgcgccccgcaacctccccttctacgagcggctcggcttcaccgtcaccgccgacgtcgaggtgcccgaaggaccgcgcacctggtgcatgacccgcaagcccggtgcctga

SEQ ID NO: 32892 - DNA, 3405 bp, synthetic construct
  source 1..3405: mol_type = other DNA
atggccttaccagtgaccgccttgctcctgccgctggccttgctgctccacgccgccaggccggcatgccaagtgaagctggaagagtctggcggaggactggtgcaggctggaagaagcctgagactgtcttgtgccgccagcgagcacacctttagctctcacgtgatgggctggttcagacaggcccctggcaaagaaagggaaagcgtggccgttatcggctggcgggatattagcacctactacgccgatagcgtgaagggcagattcaccatcagccgggacaacgccaagaaaaccctgtacctccagatgaacagcctgaagccagaggacaccgccgtgtactactgcgccgccagaagaattgacgccgccgactttgattcttggggccagggaacccaagtgaccgtttctagcggtaccggcggaggcggatctggcggcggaggtagcggtggcggaggatctgaattcgacatccagatgacacagagccctagcagcctgtctgccagcgtgggagacagagtgaccatcacatgcaaggccagcgaccacatcaacaactggctggcctggtatcagcagaagcctggacaggcccctaagctgctgatctacggcgctaccacactggaaacaggcgtgcccagcagattttctggcagcggctctggcaccgactacaccctgacaatatccagcctccagcctgaggacttcgccacctactactgtcagcagagctggaacaccccttggacattcggccagggcaccaagctggaaatcaagagactcgaggacctgaagaacgtgttcccacctgaggtggccgtgttcgagcctagcaaggccgagatcgcccacacccagaaagccaccctcgtgtgcctggctaccggcttctaccccgaccatgtggaactgtcttggtgggtcaacggcaaagaggtgcacagcggcgtgtgtaccgacccccagccactgaaagaacagcccgccctgaacgacagccggtactgcctgagcagcagactgagagtgtccgccaccttctggcagaacccccggaaccacttcagatgccaggtgcagttctacggcctgagcgagaacgacgagtggacccaggacagagccaagcccgtgacccagatcgtgtctgccgaagcctggggcagagccgattgcggcatcaccagcgccagctaccaccagggcgtgctgagcgccaccatcctgtacgagatcctgctgggcaaggccaccctgtacgccgtgctggtgtctgccctggtgctgatggctatggtcaagcggaaggacagccggggaagggccaagcgatctggatctggagcaacaaacttctcactactcaaacaagcaggtgacgtggaggagaatcccgggcctactagtgccaccatggactggatttggcgcatccttttccttgtcggcgctgctaccggcgcccattccgggcccgaagtgcagctggttgaatctggcggaggactggttcaggctggcggatctctgagactgtcttgtgccgccagcggcagaacctttagcatgggctggtttagacaggcccctggcaaagagagagagttcgtcgccgccatcacatactctggcggcagcccttactacgccgactctgtgaagggcagattcaccatcagccgggacaacgccaagaacaccgtgtacctccagatgaacagcctgaagcctgaggacaccgccgtgtactactgcgccgccaatccaacatacggcagcgactggaacgccgagaattggggccagggaacccaagtgacagtgtctagcggatccggcggcggaggatctggcggaggcggatctgggggcggaggctctttcgaacaagttcagcttcaacagcctggcgctgagctggtcaaacctggcgcttctgtgaagatgagctgcaaagccagcggctacgccttcagcagctactggatcaactggatgaagcagaaacccggccagggactcgaatggatcggccaaatctatcccggcgacggcgacaccaactacaacggcaagttcaagggcagagccacactgaccgccgatacctctagcagcacagcctacatgcagctgagcagcctgaccagcgaagatagcgccgtgtacttctgtgcccggtccatcacaacagtcgtgggctgcgctatggactattggggccagggaacaagcgtgaccgtgtctagtacgcgtatccagaaccctgatcctgccgtgtaccagctgcgggatagcaagagcagcgacaagagcgtgtgtctgttcaccgacttcgacagccagaccaacgtgtcccagagcaaggactccgacgtgtacatcaccgataagtgcgtgctggacatgcggagcatggacttcaagagcaactccgccgtggcctggtccaacaagtccgatttcgcctgcgccaacgccttcaacaacagcattatccccgaggacacattcttcccaagcagcgacgtgccctgcgacgtgaagctggtggaaaagagcttcgagacagacaccaacctgaacttccagaacctgagcgtgatcggcttcagaatcctgctgctgaaagtggccggctttaacctgctgatgaccctgcggctgtggtccagccgcgccaagagaagcggatctggcgtgaagcagaccctgaatttcgacctgctgaagctggctggcgacgtggaatccaacccaggcccttctagaggccatatgaccgagtacaagcccacggtgcgcctcgccacccgcgacgacgtccccagggccgtacgcaccctcgccgccgcgttcgccgactaccccgccacgcgccacaccgtcgatccggaccgccacatcgagcgggtcaccgagctgcaagaactcttcctcacgcgcgtcgggctcgacatcggcaaggtgtgggtcgcggacgacggcgccgcggtggcggtctggaccacgccggagagcgtcgaagcgggggcggtgttcgccgagatcggcccgcgcatggccgagttgagcggttcccggctggccgcgcagcaacagatggaaggcctcctggcgccgcaccggcccaaggagcccgcgtggttcctggccaccgtcggcgtctcgcccgaccaccagggcaagggtctgggcagcgccgtcgtgctccccggagtggaggcggccgagcgcgccggggtgcccgccttcctggagacctccgcgccccgcaacctccccttctacgagcggctcggcttcaccgtcaccgccgacgtcgaggtgcccgaaggaccgcgcacctggtgcatgacccgcaagcccggtgcctga

SEQ ID NO: 32893 - DNA, 2451 bp, synthetic construct
  source 1..2451: mol_type = other DNA
atggccttaccagtgaccgccttgctcctgccgctggccttgctgctccacgccgccaggccggaagtgcagctggttgaatctggcggaggactggttcaggctggcggatctctgagactgtcttgtgccgccagcggcagaacctttagcatgggctggtttagacaggcccctggcaaagagagagagttcgtcgccgccatcacatactctggcggcagcccttactacgccgactctgtgaagggcagattcaccatcagccgggacaacgccaagaacaccgtgtacctccagatgaacagcctgaagcctgaggacaccgccgtgtactactgcgccgccaatccaacatacggcagcgactggaacgccgagaattggggccagggaacccaagtgacagtgtctagcggtaccggcggaggcggatctggcggcggaggtagcggtggcggaggatctgaattcgacatccagatgacacagagccctagcagcctgtctgccagcgtgggagacagagtgaccatcacatgcaaggccagcgaccacatcaacaactggctggcctggtatcagcagaagcctggacaggcccctaagctgctgatctacggcgctaccacactggaaacaggcgtgcccagcagattttctggcagcggctctggcaccgactacaccctgacaatatccagcctccagcctgaggacttcgccacctactactgtcagcagagctggaacaccccttggacattcggccagggcaccaagctggaaatcaagagactcgaggacctgaagaacgtgttcccacctgaggtggccgtgttcgagcctagcgaggccgagatcagccacacccagaaagccaccctcgtgtgcctggctaccggcttctaccccgaccatgtggaactgtcttggtgggtcaacggcaaagaggtgcacagcggcgtgtctaccgacccccagccactgaaagaacagcccgccctgaacgacagccggtactgcctgagcagcagactgagagtgtccgccaccttctggcagaacccccggaaccacttcagatgccaggtgcagttctacggcctgagcgagaacgacgagtggacccaggacagagccaagcccgtgacccagatcgtgtctgccgaagcctggggcagagccgattgcggatcctccaaggacgccaacgataccctgctgctccagctgaccaacaccagcgcctactacatgtacttgttgctgctgctgaagtccgtggtgtacttcgccatcatcacatgctgcctgctgcggagaaccgccttctgctgcaacggcgagaagtctagggccaagcgatctggatctggagcaacaaacttctcactactcaaacaagcaggtgacgtggaggagaatcccgggcctactagtatggactggatttggcgcatccttttccttgtcggcgctgctaccggcgcgcattccttcgaagtgcagctggttgaatcaggtggcggcctggttcaacctggcggatctctgagactgagctgtgccgccagcggctacaccttcagcgactactttatgagctgggtccgacaggcccctggcaaaggacttgaatgggtcgccaccatcagcaatggcggcacctacacttactaccccgacagcgtgaagggcagattcaccatctccagagacaacagcaagaacaccctgtacctccagatgaactccctgagagccgaggacaccgccgtgtactactgcgccagattcgacggctacatcttcgactattggggccagggcaccctggtcacagtctcttctacgcgtatccagaaccctgatcctgccgtgtaccagctgcgggatagcaagagcagcgacaagagcgtgtgtctgttcaccgacttcgacagccagaccaacgtgtcccagagcaaggactccgacgtgtacatcaccgataagaccgtgctggacatgcggagcatggacttcaagagcaactccgccgtggcctggtccaacaagtccgatttcgcctgcgccaacgccttcaacaacagcattatccccgaggacacattcttcccaagccccgagagcagctgcggtaccgaagtgaaaaccgactccaccgaccacgtgaagcccaaagagacagagaacaccaagcagcccagcaagagctgccacaagcccaaggccatcgtgcacaccgagaaagtgaacatgatgagcctgaccgtgctgggcctgcggatgctgttcgccaaaaccgtggccgtgaacttcctgctgaccgccaagctgttcttcctccgcgccaagagaagcggatctggcgtgaagcagaccctgaatttcgacctgctgaagctggctggcgacgtggaatccaacccaggcccttctagataa

SEQ ID NO: 32894 - DNA, 1914 bp, synthetic construct
  source 1..1914: mol_type = other DNA
atggccctgcccgtgacagccctgctgctgcctctggctctgctgctgcacgccgccagacccgatgaattcgtggacaacaagttcaacaaagagcggtacagcgcctactacgagatttggcaactgcccaacctgaacgtgcggcagaaggccgccttcatcggatctctgcaggacgaccctagccagagcgccaatctgctggccgaggccaagaagctgaacgacgcccaggcccctaaactcgagggacagcctaaggccaatcctaccgtgacactgttccctccaagcagcgaagaactccaggccaacaaggccacacttgtgtgcctgatctccgacttctaccctggggctgtgacagtggcttggaaggccgatggatctcctgtgaaagccggcgtggaaaccaccaagccatccaagcagagcaacaacaaatacgccgccagctcctacctgagcctgacacctgagcagtggaagtcccacagatcctacagctgccaagtgacccacgaaggcagcaccgtggaaaagacagtggcccctacagagtgcagcggatcccccatcaagaccgatgtgattacaatggaccccaaggacaactgctccaaggacgccaacgataccctgctgctccagctgaccaacaccagcgcctactacatgtacttgttgctgctgctgaagtccgtggtgtacttcgccatcatcacatgctgcctgctgcggagaaccgccttctgctgcaacggcgagaagtctagggccaagcgatctggatctggagcaacaaacttctcactactcaaacaagcaggtgacgtggaggagaatcccgggcctactagtatggactggatttggcgcatccttttccttgtcggcgctgctaccggcgcgcattccttcgaacaagttcagcttcaacagcctggcgctgagctggtcaaacctggcgcttctgtgaagatgagctgcaaagccagcggctacgccttcagcagctactggatcaactggatgaagcagaaacccggccagggactcgaatggatcggccaaatctatcccggcgacggcgacaccaactacaacggcaagttcaagggcagagccacactgaccgccgatacctctagcagcacagcctacatgcagctgagcagcctgaccagcgaagatagcgccgtgtacttctgtgcccggtccatcacaacagtcgtgggctgcgctatggactattggggccagggaacaagcgtgaccgtgtctagtacgcgtgcgtccactaagggtccgtcagtcttcccgctggcgccctgttcccgcagcacgagtgaatctaccgccgcccttgggtgcttggtaaaagactattttcctgagcccgttacagtatcatggaacagcggggctctgactagcggggtgcatacgttccctgcggttctgcaatctagcggactgtattctctctccagtgttgtgaccgtgccaagctccagcctcggtactaaaacttatacatgtaatgtggatcataaaccttcaaataccaaggttgacaaaagggtagagagtaagtacggtggtaccgaagtgaaaaccgactccaccgaccacgtgaagcccaaagagacagagaacaccaagcagcccagcaagagctgccacaagcccaaggccatcgtgcacaccgagaaagtgaacatgatgagcctgaccgtgctgggcctgcggatgctgttcgccaaaaccgtggccgtgaacttcctgctgaccgccaagctgttcttcctccgcgccaagagaagcggatctggcgtgaagcagaccctgaatttcgacctgctgaagctggctggcgacgtggaatccaacccaggcccttctagataa

SEQ ID NO: 32895 - DNA, 3444 bp, synthetic construct
  source 1..3444: mol_type = other DNA
atggccttaccagtgaccgccttgctcctgccgctggccttgctgctccacgccgccaggccggcatgcgaagtgcagctgcttgaaagtggcggcggactgattcagcctggcggatctctgagactgagctgtgccgccagcggcttcaccttttctagccacgccatgacctgggtccgacaggcacctggaaaagggcttgaatgggtgtccgccatcagcggctctggcgattacacacactacgccgacagcgtgaagggcagattcaccatcagcagagacaacagcaagaacaccgtgtacctccagatgaacagcctgagagccgaggacagcgccgtgtattattgcgccaaggatgaggatggcggcagcctgcttggacacagaggacaaggcaccctggtcaccgtttcttccggtaccggcggaggcggatctggcggcggaggtagcggtggcggaggatctgaattcgacatccagatgacacagagccctagcagcctgtctgccagcgtgggagacagagtgaccatcacatgcaaggccagcgaccacatcaacaactggctggcctggtatcagcagaagcctggacaggcccctaagctgctgatctacggcgctaccacactggaaacaggcgtgcccagcagattttctggcagcggctctggcaccgactacaccctgacaatatccagcctccagcctgaggacttcgccacctactactgtcagcagagctggaacaccccttggacattcggccagggcaccaagctggaaatcaagagactcgaggacctgaagaacgtgttcccacctgaggtggccgtgttcgagcctagcgaggccgagatcagccacacccagaaagccaccctcgtgtgcctggctaccggcttctaccccgaccatgtggaactgtcttggtgggtcaacggcaaagaggtgcacagcggcgtgtgtaccgacccccagccactgaaagaacagcccgccctgaacgacagccggtactgcctgagcagcagactgagagtgtccgccaccttctggcagaacccccggaaccacttcagatgccaggtgcagttctacggcctgagcgagaacgacgagtggacccaggacagagccaagcccgtgacccagatcgtgtctgccgaagcctggggcagagccgattgcggctttaccagcgagagctaccagcagggcgtgctgagcgccaccatcctgtacgagatcctgctgggcaaggccaccctgtacgccgtgctggtgtctgccctggtgctgatggctatggtcaagcggaaggacagccggggaagggccaagcgatctggatctggagcaacaaacttctcactactcaaacaagcaggtgacgtggaggagaatcccgggcctactagtgccaccatggactggatttggcgcatccttttccttgtcggcgctgctaccggcgcccattccgggcccgaagtgcagctggttgaatctggcggaggactggttcaggctggcggatctctgagactgtcttgtgccgccagcggcagaacctttagcatgggctggtttagacaggcccctggcaaagagagagagttcgtcgccgccatcacatactctggcggcagcccttactacgccgactctgtgaagggcagattcaccatcagccgggacaacgccaagaacaccgtgtacctccagatgaacagcctgaagcctgaggacaccgccgtgtactactgcgccgccaatccaacatacggcagcgactggaacgccgagaattggggccagggaacccaagtgacagtgtctagcggatccggcggcggaggatctggcggaggcggatctgggggcggaggctctttcgaacaagttcagcttcaacagcctggcgctgagctggtcaaacctggcgcttctgtgaagatgagctgcaaagccagcggctacgccttcagcagctactggatcaactggatgaagcagaaacccggccagggactcgaatggatcggccaaatctatcccggcgacggcgacaccaactacaacggcaagttcaagggcagagccacactgaccgccgatacctctagcagcacagcctacatgcagctgagcagcctgaccagcgaagatagcgccgtgtacttctgtgcccggtccatcacaacagtcgtgggctgcgctatggactattggggccagggaacaagcgtgaccgtgtctagtacgcgtagccagcctcacaccaagcccagcgtgttcgtgatgaagaacggcaccaacgtggcctgcctcgtgaaagagttctaccccaaggacatcaggatcaacctggtgtccagcaagaagatcaccgagttcgaccccgccatcgtgatctcccccagcggcaagtacaacgccgtgaagctggggaagtacgaggacagcaacagcgtgacctgctccgtgcagcacgacaacaagaccgtgcacagcaccgactttgaagtgaaaaccgactccaccgaccacgtgaagcccaaagagacagagaacaccaagcagcccagcaagagctgccacaagcccaaggccatcgtgcacaccgagaaagtgaacatgatgagcctgaccgtgctgggcttcagaatcctgctgctgaaagtggccggctttaacatgctgatgaccctgcggctgtggtccagccgcgccaagagaagcggatctggcgtgaagcagaccctgaatttcgacctgctgaagctggctggcgacgtggaatccaacccaggcccttctagaggccatatgaccgagtacaagcccacggtgcgcctcgccacccgcgacgacgtccccagggccgtacgcaccctcgccgccgcgttcgccgactaccccgccacgcgccacaccgtcgatccggaccgccacatcgagcgggtcaccgagctgcaagaactcttcctcacgcgcgtcgggctcgacatcggcaaggtgtgggtcgcggacgacggcgccgcggtggcggtctggaccacgccggagagcgtcgaagcgggggcggtgttcgccgagatcggcccgcgcatggccgagttgagcggttcccggctggccgcgcagcaacagatggaaggcctcctggcgccgcaccggcccaaggagcccgcgtggttcctggccaccgtcggcgtctcgcccgaccaccagggcaagggtctgggcagcgccgtcgtgctccccggagtggaggcggccgagcgcgccggggtgcccgccttcctggagacctccgcgccccgcaacctccccttctacgagcggctcggcttcaccgtcaccgccgacgtcgaggtgcccgaaggaccgcgcacctggtgcatgacccgcaagcccggtgcctga

SEQ ID NO: 32896 - DNA, 3444 bp, synthetic construct
  source 1..3444: mol_type = other DNA
atggccttaccagtgaccgccttgctcctgccgctggccttgctgctccacgccgccaggccggcatgcgaagtgcagctgcttgaaagtggcggcggactgattcagcctggcggatctctgagactgagctgtgccgccagcggcttcaccttttctagccacgccatgacctgggtccgacaggcacctggaaaagggcttgaatgggtgtccgccatcagcggctctggcgattacacacactacgccgacagcgtgaagggcagattcaccatcagcagagacaacagcaagaacaccgtgtacctccagatgaacagcctgagagccgaggacagcgccgtgtattattgcgccaaggatgaggatggcggcagcctgcttggacacagaggacaaggcaccctggtcaccgtttcttccggtaccggcggaggcggatctggcggcggaggtagcggtggcggaggatctgaattcgacatccagatgacacagagccctagcagcctgtctgccagcgtgggagacagagtgaccatcacatgcaaggccagcgaccacatcaacaactggctggcctggtatcagcagaagcctggacaggcccctaagctgctgatctacggcgctaccacactggaaacaggcgtgcccagcagattttctggcagcggctctggcaccgactacaccctgacaatatccagcctccagcctgaggacttcgccacctactactgtcagcagagctggaacaccccttggacattcggccagggcaccaagctggaaatcaagagactcgaggacctgaagaacgtgttcccacctgaggtggccgtgttcgagcctagcgaggccgagatcagccacacccagaaagccaccctcgtgtgcctggctaccggcttctaccccgaccatgtggaactgtcttggtgggtcaacggcaaagaggtgcacagcggcgtgtgtaccgacccccagccactgaaagaacagcccgccctgaacgacagccggtactgcctgagcagcagactgagagtgtccgccaccttctggcagaacccccggaaccacttcagatgccaggtgcagttctacggcctgagcgagaacgacgagtggacccaggacagagccaagcccgtgacccagatcgtgtctgccgaagcctggggcagagccgattgcggctttaccagcgagagctaccagcagggcgtgctgagcgccaccatcctgtacgagatcctgctgggcaaggccaccctgtacgccgtgctggtgtctgccctggtgctgatggctatggtcaagcggaaggacagccggggaagggccaagcgatctggatctggagcaacaaacttctcactactcaaacaagcaggtgacgtggaggagaatcccgggcctactagtgccaccatggactggatttggcgcatccttttccttgtcggcgctgctaccggcgcccattccgggcccgaagtgcagctggttgaatctggcggaggactggttcaggctggcggatctctgagactgtcttgtgccgccagcggcagaacctttagcatgggctggtttagacaggcccctggcaaagagagagagttcgtcgccgccatcacatactctggcggcagcccttactacgccgactctgtgaagggcagattcaccatcagccgggacaacgccaagaacaccgtgtacctccagatgaacagcctgaagcctgaggacaccgccgtgtactactgcgccgccaatccaacatacggcagcgactggaacgccgagaattggggccagggaacccaagtgacagtgtctagcggatccggcggcggaggatctggcggaggcggatctgggggcggaggctctttcgaacaagttcagcttcaacagcctggcgctgagctggtcaaacctggcgcttctgtgaagatgagctgcaaagccagcggctacgccttcagcagctactggatcaactggatgaagcagaaacccggccagggactcgaatggatcggccaaatctatcccggcgacggcgacaccaactacaacggcaagttcaagggcagagccacactgaccgccgatacctctagcagcacagcctacatgcagctgagcagcctgaccagcgaagatagcgccgtgtacttctgtgcccggtccatcacaacagtcgtgggctgcgctatggactattggggccagggaacaagcgtgaccgtgtctagtacgcgtagccagcctcacaccaagcccagcgtgttcgtgatgaagaacggcaccaacgtggcctgcctcgtgaaagagttctaccccaaggacatcaggatcaacctggtgtccagcaagaagatcaccgagttcgaccccgccatcgtgatctcccccagcggcaagtacaacgccgtgaagctggggaagtacgaggacagcaacagcgtgacctgctccgtgcagcacgacaacaagaccgtgcacagcaccgactttgaagtgaaaaccgactccaccgaccacgtgaagcccaaagagacagagaacaccaagcagcccagcaagagctgccacaagcccaaggccatcgtgcacaccgagaaagtgaacatgatgagcctgaccgtgatcggcttcagaatcctgctgctgaaagtggccggctttaacctgctgatgaccctgcggctgtggtccagccgcgccaagagaagcggatctggcgtgaagcagaccctgaatttcgacctgctgaagctggctggcgacgtggaatccaacccaggcccttctagaggccatatgaccgagtacaagcccacggtgcgcctcgccacccgcgacgacgtccccagggccgtacgcaccctcgccgccgcgttcgccgactaccccgccacgcgccacaccgtcgatccggaccgccacatcgagcgggtcaccgagctgcaagaactcttcctcacgcgcgtcgggctcgacatcggcaaggtgtgggtcgcggacgacggcgccgcggtggcggtctggaccacgccggagagcgtcgaagcgggggcggtgttcgccgagatcggcccgcgcatggccgagttgagcggttcccggctggccgcgcagcaacagatggaaggcctcctggcgccgcaccggcccaaggagcccgcgtggttcctggccaccgtcggcgtctcgcccgaccaccagggcaagggtctgggcagcgccgtcgtgctccccggagtggaggcggccgagcgcgccggggtgcccgccttcctggagacctccgcgccccgcaacctccccttctacgagcggctcggcttcaccgtcaccgccgacgtcgaggtgcccgaaggaccgcgcacctggtgcatgacccgcaagcccggtgcctga

SEQ ID NO: 32897 - DNA, 36 bp, synthetic construct
  source 1..36: mol_type = other DNA
gggggggggggggggggggggggggggggggggggg

SEQ ID NO: 32898 - DNA, 36 bp, synthetic construct; identical to SEQ ID NO: 32897
  source 1..36: mol_type = other DNA

SEQ ID NO: 32899 - DNA, 36 bp, synthetic construct; identical to SEQ ID NO: 32897
  source 1..36: mol_type = other DNA

SEQ ID NO: 32900 - DNA, 36 bp, synthetic construct; identical to SEQ ID NO: 32897
  source 1..36: mol_type = other DNA

SEQ ID NO: 32901 - DNA, 36 bp, synthetic construct; identical to SEQ ID NO: 32897
  source 1..36: mol_type = other DNA

SEQ ID NO: 32902 - DNA, 36 bp, synthetic construct; identical to SEQ ID NO: 32897
  source 1..36: mol_type = other DNA

SEQ ID NO: 32903 - DNA, 36 bp, synthetic construct; identical to SEQ ID NO: 32897
  source 1..36: mol_type = other DNA

SEQ ID NO: 32904 - DNA, 36 bp, synthetic construct; identical to SEQ ID NO: 32897
  source 1..36: mol_type = other DNA

SEQ ID NO: 32905 - DNA, 36 bp, synthetic construct; identical to SEQ ID NO: 32897
  source 1..36: mol_type = other DNA

SEQ ID NO: 32906 - DNA, 36 bp, synthetic construct; identical to SEQ ID NO: 32897
  source 1..36: mol_type = other DNA

SEQ ID NO: 32907 - DNA, 36 bp, synthetic construct; identical to SEQ ID NO: 32897
  source 1..36: mol_type = other DNA

SEQ ID NO: 32908 - DNA, 36 bp, synthetic construct; identical to SEQ ID NO: 32897
  source 1..36: mol_type = other DNA

SEQ ID NO: 32909 - DNA, 36 bp, synthetic construct; identical to SEQ ID NO: 32897
  source 1..36: mol_type = other DNA

SEQ ID NO: 32910 - DNA, 36 bp, synthetic construct; identical to SEQ ID NO: 32897
  source 1..36: mol_type = other DNA

SEQ ID NO: 32911 - DNA, 36 bp, synthetic construct; identical to SEQ ID NO: 32897
  source 1..36: mol_type = other DNA

SEQ ID NO: 32912 - DNA, 333 bp, synthetic construct
  source 1..333: mol_type = other DNA
gacgtgcagatgatccagacccccgatagcctggccgtgtccctgggacagagagccaccatctcttgcagagccagcgagagcgtggacaactacggcatcagcttcatgcactggtatcagcagaagcccggccagagccccaagctgctgatctacagagcctccaacctggaaagcggcatccccgccagattttccggcagcggcagcagaaccgacttcaccctgaccatcaaccccgtggaaaccgacgacgtggcaacctactactgccagcagaacaacaaggacccccccacctttggcggaggcaccaagctggaaatcaag

SEQ ID NO: 32913 - DNA, 321 bp, synthetic construct
  source 1..321: mol_type = other DNA
gacgtgcagatgatccagacccccagcagcctgtctgccagcctgggcgatagagtgaccatcagctgtcgggccagccaggacatcggcaactacctgaactggtatcagcagaaacccgacggcaccgtgaagctgctgatctactacaccagcagactgcacagcggcgtgcccagcagattttctggcagcggctctggcaccgagtacagcctgaccatctccaacctggaacaggaagatattgctacctacttctgtcagcaaggcagcgccctgccccctacatttggcggcggaacaaagctggaaatcaac

SEQ ID NO: 32914 - DNA, 336 bp, synthetic construct
  source 1..336: mol_type = other DNA
gacatcgtgctgacacagagccctgccaccctgtctctgagccctggcgatagagccaccatcagctgtagagccagcgagagcgtgaccatcctgggcagccacctgatctactggtatcagcagaagcccggccagccccccagactgctgattcagctggcctccaatgtgcagaccggcgtgccagccagattttccggcagcggcagcagaaccgacttcaccctgaccatcagcagcgtggaacccgaggacttcgccgtgtactactgcctccagagccggaccatccccagaacattcggccagggcaccaagctggaaatcaagaga

SEQ ID NO: 32915 - DNA, 324 bp, synthetic construct
  source 1..324: mol_type = other DNA
gacatccagatgacccagagccctagctcactgagcgccagcgtgggcgacagggtgaccattacctgctccgccagccaggacatcagcaactacctgaactggtaccagcagaagcccggcaaggcccccaagctgctgatctactacacctccaacctgcactccggcgtgcccagcaggttcagcggaagcggcagcggcaccgatttcaccctgaccatctccagcctgcagcccgaggacttcgccacctactactgccagcagtacaggaagctcccctggactttcggccagggcaccaaactggagatcaagcgt

SEQ ID NO: 32916 - DNA, 342 bp, synthetic construct
  source 1..342: mol_type = other DNA
gacatcgtgatgacccagagccccgatagcctggccgtgtctctgggagagagagccaccatcaactgcgagagcagccagagcctgctgaacagcggcaaccagaagaactacctgacctggtatcagcagaagcccggccagccccccaagcccctgatctattgggccagcaccagagaaagcggcgtgcccgatagattcagcggcagcggaagcggcaccgacttcaccctgaccatcagttctcttcaggccgaggacgtggccgtgtactactgccagaacgactacagctacccctacaccttcggccagggcaccaagctggaaatcaagaga

SEQ ID NO: 32917 - DNA, 321 bp, synthetic construct
  source 1..321: mol_type = other DNA
gacatccagatgacccagtctaccagttccctgagtgcatccctcggagacagggtgacgatcagttgcagcgcaagccaagggatcaataactatctgaactggtatcagcagaaaccggacggaacagtcgaactcctgatttattacaccagcacccttcagagtggcgtcccttcccggttcagtggctccggaagcgggaccgattactccctgaccatttctaatctggagccagaggacataggaacgtattattgccagcagtatagtaaactgccacgaacttttggaggggggacgaaactggagatcaaa

SEQ ID NO: 32918 - DNA, 318 bp, synthetic construct
  source 1..318: mol_type = other DNA
gacatccagatgacccagagccctgccagcctgtccgtgtctgtgggcgagacagtgaccatcacctgtcgggccagcgagaacatctacagcaacctggcctggtatcagcagaagcagggcaagagcccccaactgctggtgtacgccgccaccaatctggccgatggcgtgcccagcagattttccggctctggcagcggcacccagtacagcctgaagatcaacagcctccagagcgaggacttcggcagctactactgccagcacttctggggcacctggacctttggaggaggcaccaccctggaaatcaag

SEQ ID NO: 32919 - DNA, 321 bp, synthetic construct
  source 1..321: mol_type = other DNA
gagatcgtgctgacacagagccccgccaccctgtcactgtctccaggcgaaagagccaccctgagctgtagcgccagcagcagcgtgtcctacatgcactggtatcagcagaagcccggccaggcccccagactgctgatctacgataccagcaagctggcctccggcatccccgccagattttctggcagcggctccggcaccgacttcaccctgacaatcagcagcctggaacccgaggacgtggccgtgtactactgttttcaaggcagcgtgtaccccttcaccttcggccagggcaccaagctggaaatcaagaga

SEQ ID NO: 32920 - DNA, 321 bp, synthetic construct
  source 1..321: mol_type = other DNA
gacatccagatgacacagactacatcctccctgtctgcctctctgggagacagagtcaccatcagttgcagggcaagtcaggacattagtaaatatttaaattggtatcagcagaaaccagatggaactgttaaactcctgatctaccatacatcaagattacactcaggagtcccatcaaggttcagtggcagtgggtctggaacagattattctctcaccattagcaacctggagcaagaagatattgccacttacttttgccaacagggtaatacgcttccgtacacgttcggaggggggaccaagctggagatcaca

SEQ ID NO: 32921 - DNA, 321 bp, synthetic construct
  source 1..321: mol_type = other DNA
gagatcgtgatgacccagagccctgccaccctgtctctgagccctggcgaaagagccaccctgagctgtagagccagccaggacatcagcaagtacctgaactggtatcagcagaagcccggccaggcccccagactgctgatctaccacaccagcagactgcacagcggcatccccgccagattttctggctctggcagcggcaccgactacaccctgacaatcagcagcctccagcccgaggacttcgccgtgtacttctgtcagcaaggcaacaccctgccctacaccttcggccagggcaccaagctggaaatcaag

SEQ ID NO: 32922 - DNA, 321 bp, synthetic construct
  source 1..321: mol_type = other DNA
gagatcgtgctgacacagagccctgccaccctgtctctgagccctggcgaaagagccaccctgagctgtagagccagccagagcgtgtccagctacctggcctggtatcagcagaagcccggccaggctccccggctgctgatctacgatgccagcaatagagccaccggcatccccgccagattttccggctctggcagcggcaccgacttcaccctgaccatcagctccctggaacccgaggacttcgccgtgtactactgccagcagcggagcaactggcccatcacattcggccagggcacccggctggaaatcaaa

SEQ ID NO: 32923 - DNA, 339 bp, synthetic construct
  source 1..339: mol_type = other DNA
gacatcgtgatgacccagacccccctgagcctgcctgtgacacctggcgagcctgccagcatctcctgcagaagcagcaagagcctgctgcacagcaacggcatcacctacctgtactggtatctgcagaaacccggccagagcccccaactgctgatctaccagatgagcaacctggtgtccggcgtgcccgacagattttctggcagcggctccggcaccgacttcaccctgaagatcagccgggtggaagccgaggacgtgggcgtgtactactgcgcccagaacctggaactgccctacacctttggcggcggaacaaaggtggaaatcaagcgg

SEQ ID NO: 32924 - DNA, 339 bp, synthetic construct
  source 1..339: mol_type = other DNA
gacatccagatgacccagagccccagcagcctgtctgccagcgtgggcgacagagtgaccatcacctgtcggagcagccagagcatcgtgcactccgtgggcaacaccttcctggaatggtatcagcagaagcccggcaaggcccccaagctgctgatctacaaggtgtccaacagattcagcggcgtgcccagcaggtttagcggctctggcagcggcaccgacttcaccctgaccatctctagcctccagcccgaggacttcgccacctactactgttttcaaggcagccagttcccctacaccttcggccagggaacaaaggtggaaatcaagcgg

SEQ ID NO: 32925 - DNA, 330 bp, synthetic construct
  source 1..330: mol_type = other DNA
gagatcgtgctgacacagagccctggcaccctgagcctgtctccaggcgaaagagccacactgagctgtcgggcctctcagagcgtgggaggctacctggcttggtatcagcagaagccaggccaggcccccagactgctgatctacgacgccagcaatcgggccacaggcatccccgccagattttctggcagcggctccggcaccgacttcaccctgacaatcagcagcctggaacccgaggacttcgccgtgtactactgccagcagcggaacaactggccccccatgtacacattcggccagggcaccaagctggaaatcaagaga

SEQ ID NO: 32926 - DNA, 336 bp, synthetic construct
  source 1..336: mol_type = other DNA
gacatccagatgacccagagccccgccaccatcgagaacacaagcctgtctgccagcgtgggcgacagagtgaccatcacctgtagagccagccagggcatcagctcttggctgacctggtatcagcagaagcccgagaaggcccccaagagcctgatctacgccgccagctctctgcagtctggcgtgcccagcagattttccggcagcggctctggcaccgacttcaccctgacaatcagcagcctgcagcccgaggacttcgccacctactactgccagcagtacgacagctaccccatcaccttcggccagggcacccggctggaaatcaag

SEQ ID NO: 32927 - DNA, 336 bp, synthetic construct
  source 1..336: mol_type = other DNA
gacgagatcgtgctgacccagagccctgatagcctggccgtgtctctgggcgagagagccaccatcaactgcaaggccagccagagcgtggacttcgacggcgacagctacctgaactggtatcagcagaagcccggccagccccccaaggtgctgatctatgccgccagcacactgcagagcggcgtgcccagcagattttctggcagcggctccggcaccgacttcaccctgaccatcaacagcctggaagccgaggacgccgccacctactactgccagcagagcaacgaggacccctggacctttggcggcggaacaaaggtggaaatcaag

SEQ ID NO: 32928 - DNA, 321 bp, synthetic construct
  source 1..321: mol_type = other DNA
gacatccagatgacccagagccccagcagcctgtctgccagcgtgggcgacagagtgaccatcacctgtagagccagccagggcatcagctcttggctggcctggtatcagcagaagcccgagaaggcccccaagagcctgatctacgccgcctctagtctccagagcggcgtgcccagcagattttctggcagcggctccggcaccgacttcaccctgacaatcagctccctccagcccgaggacttcgccacctactactgccagcagtacaacagctaccctcccacctttggcggaggcaccaaggtggaaatcaag

SEQ ID NO: 32929 - DNA, 336 bp, synthetic construct
  source 1..336: mol_type = other DNA
gacgtcgtgatgacccagagccctctgagcctgcctgtgacactgggacagcctgccagcatctcctgtcggagcagccagagcatcgtgcacagcgacggcaacacctacctggaatggtatcagcagcggccaggccagagccccagacggctgatctacaaggtgtccaacagattcagcggcgtgcccgacagattctccggcagcggctctggcaccgacttcaccctgaagatcagcagagtggaagccgaggacgtgggcgtgtactactgttttcaaggcagccacgccccctggacctttggcggaggaacaaaggtggaaatcaag

SEQ ID NO: 32930 - DNA, 318 bp, synthetic construct
  source 1..318: mol_type = other DNA
cagatcgtgctgacacagagccctgccctgatgagcgccagccctggcgagaaagtgaccatgacctgtagcgccagcagcagcgtgcgctacatgtactggtatcagcagaagcccagaagcagccccaagccctggattcacctgaccagcaatctggcctctggcgtgcccgctagattttccggctctggcagcggcaccagctacagcctgaccatcagcagcatggaagccgaggacgccgccacctactactgccagcagtggtccagccaccccttcacatttggctccggcaccaagctggaaatcaag

SEQ ID NO: 32931 - DNA, 339 bp, synthetic construct
  source 1..339: mol_type = other DNA
gagatcgtgctgacacagagccctggaagcctggccgtgtctcctggcgagcgcgtgacaatgagctgcaagagcagccagagcgtgttcttcagcagctcccagaagaactacctggcctggtatcagcagatccccggccagagccccagactgctgatctactgggccagcaccagagaaagcggcgtgcccgatagattcaccggcagcggctctggcaccgacttcaccctgacaatcagcagcgtgcagcccgaggacctggctatctactactgccaccagtacctgagcagccggaccttcggccagggcaccaagctggaaatcaagaga

SEQ ID NO: 32932 - DNA, 339 bp, synthetic construct
  source 1..339: mol_type = other DNA
gacatcgtgatgacacagtcaccagatagcctcaccgtctccctgggggagcggaccaccattaattgtaaatccagccaaagcgtgctggactcaagcaagaacaagaatagcctcgcctggtatcagcagaagcccggtcagcctccaaagctgctgctttcttgggcctccaccagagagtccgggattcctgataggtttagtggttcaggctccggcacagattttactctgaccattgattctctccagccagaggattctgcaacttattactgccagcaaagcgcccactttcctataacttttggccagggaacccgacttgaaatcaag

SEQ ID NO: 32933 - DNA, 339 bp, synthetic construct
  source 1..339: mol_type = other DNA
gatgtgctgctgacccagagccctctgagcctgcctgtgacactgggacagcctgccagcatctcctgtcggagcagccagaccatcgtgcacagcaacggcaacacctacctggaatggttccagcagcggccaggccagagccccagactgctgatctaccaggtgtccaacagattcagcggcgtgcccgacagattctccggcagcggctctggcaccgacttcaccctgaagatcagccgggtggaagccgaggacgtgggcgtgtactactgttttcaaggcagccacgtgccccggacctttggcggaggaacaaaggtggaaatcaagaga

SEQ ID NO: 32934 - DNA, 324 bp, synthetic construct
  source 1..324: mol_type = other DNA
cacatcgtgctgacccagagccctagcagcctgtctgccagcctgggcgacagagtgaccatcagctgtagagccagccaggacatcagcacctacctgaactggtatcagcagaaacccgacggcaccgtgaagctgctgatcttctacaccagcagactgcacgccggggtgcccagcagattttctggcagcggctctggcacccaccacagcctgaccatctccaacctggaacaggaagatattgctacctacttctgtcagcaaggcaacagcctgcccttcaccttcggcagcggcaccaagctggaaatcaagaga

SEQ ID NO: 32935 - DNA, 327 bp, synthetic construct
  source 1..327: mol_type = other DNA
gaccacatcgtgctgacccagagccctagcagcctgtctgccagcctgggcgacagagtgaccatcagctgtagagccagccaggacatcagcacctacctgaactggtatcagcagaaacccgacggcaccgtgaagctgctgatcttctacaccagcagactgcacgccggggtgcccagcagattttctggcagcggctctggcacccaccacagcctgaccatctccaacctggaacaggaagatattgctacctacttctgtcagcaaggcaacagcctgcccttcaccttcggcagcggcaccaagctggaaatcaagaga

SEQ ID NO: 32936 - DNA, 336 bp, synthetic construct
  source 1..336: mol_type = other DNA
gacatcgtgatgacccagagccccgatagcctggccgtgtctctgggagagagagccaccatcaactgccgggccagcaagagcgtgtccaccagcggctacagcttcatgcactggtatcagcagaagcccggccagccccccaagctgctgatctacctggcctccaacctggaaagcggcgtgcccgatagattcagcggcagcggctctggcaccgacttcaccctgaccatcagttctcttcaggccgaggacgtggccgtgtactactgccagcacagcagagaggtgccctggacattcggccagggcacaaaggtggaaatcaagcgg

SEQ ID NO: 32937 - DNA, 339 bp, synthetic construct
  source 1..339: mol_type = other DNA
gacatcgtgatgacccagacccccctgaccctgagcgtgacaatcggacagcctgccagcatctcctgcaagagcagccagagcctgctggacagcgacggcaagacctacctgaactggctgctgcagaggccaggccagagccccgagagactgatctacctggtgtccaagctggactccggcgtgcccgatagattcacaggcagcggctccggcaccgacttcaccctgaagatcagccgggtggaagccgaggacctgggcgtgtactgttgttggcagggcacccacttcccttacaccttcggcggagggaccaaggtggaaatcaagggc

SEQ ID NO: 32938 - DNA, 336 bp, synthetic construct; identical to SEQ ID NO: 32030
  source 1..336: mol_type = other DNA

SEQ ID NO: 32939 - DNA, 342 bp, synthetic construct
  source 1..342: mol_type = other DNA
gacatcgtgatgagccagagccctagcagcctggccgtgtccgtgggcgagaaagtgaccatgagctgcaagagcagccagtccctgctgcacagcagcaaccagaagaactacctggcctggtatcagcagaagcccggccagtcccccaaggtgctgatctactgggccagcaccagagaaagcggcgtgcccgatagattcaccggcagcggctctggcaccgacttcaccctgaccatcaccagcgtgaagtccgaggacctggctgtgtactactgccagcagtattacagctacccctggaccttcggcggaggcacccggctggaaatcaaaaga

SEQ ID NO: 32940 - DNA, 327 bp, synthetic construct
  source 1..327: mol_type = other DNA
gagatcgtgctgacacagagccctggcaccctgagcctgtctccaggcgaaagagccacactgagctgtcgggccagccagagcgtgtccagctcttacctggcctggtatcagcagaagcccggccaggctccccggctgctgatctacggaacaagcagcagagccaccggcatccccgacagattttctggcagcggctccggcaccgacttcaccctgacaatcagcagactggaacccgaggacttcgccgtgtactactgccagcagtacggcagcagccccttcacctttggcggaggcaccaaggtggaaatcaagaga

SEQ ID NO: 32941 - DNA, 324 bp, synthetic construct
  source 1..324: mol_type = other DNA
gacatccagatgacccagagccccagcagcctgtctgccagcgtgggcgacagagtgaccatcacctgtagagccagccagagcatcagcctgtggctgaactggtatcagcagaagcccggcaaggcccccaagctgctgatctacgccgccagcacactccagagcggcgtgccaagcagattttccggcagcggctccggcaccgacttcaccctgacaatcagctccctccagcccgaggacttcgccacctactactgccagcagtactacaccagcccctacaccttcggccagggcaccaaggtggaaatcaagaga

SEQ ID NO: 32942 - DNA, 327 bp, synthetic construct
  source 1..327: mol_type = other DNA
gacatccagatgacccagagccccagcagcctgtctgccagcgtgggcgacagagtgaccatcacctgtagagccagccagagcatcagcagctacctgaactggtatcagcagaagcccggcaaggcccccaaactgctgatctacgccgtgtccacactccagagcggcgtgcccagcagattttctggcagcggctccggcaccgacttcaccctgacaatcagctccctccagcccgaggacttcgccacctactactgtcagcagagcggcaccttccctcccaccacatttggacagggcaccaaggtggaaatcaagaga

SEQ ID NO: 32943 - DNA, 318 bp, synthetic construct
  source 1..318: mol_type = other DNA
cagagcccatctagcctggctgtgtctgccggcgagaaagtgaccatgagctgcaagagcagccagagcctgctgaacagccggacccggaagaactacctggcctggtatcagcagaagcccggccagagccccaagctgctgatctactgggccagcaccagagaaagcggcgtgcccgatagattcaccggctctggcagcggcaccgacttcaccctgacaatcagcagcgtgcaggccgaggacctggccgtgtactactgcaagcagagcaacctgtacaccttcggcggaggcaccaagctggaaatcaag

SEQ ID NO: 32944 - DNA, 312 bp, synthetic construct
  source 1..312: mol_type = other DNA
atgacccagagccccaagttcctgctggtgtctgccggcgacagagtgaccctgacatgcaaggccagccagagcgtgaacaacgacgtgtactggtatcagcaggaacccggccagtcccccaagctgctgatctactgggccagcaccagagaaagcggcgtgcccgatagattcaccggcagcggctctggcaccgacttcaccctgacaatcagcagcgtgcaggccgaggacctggccgtgtactactgcaagcagagctacaacctgtacaccttcggcggaggcaccaagctggaaatcaagaga

SEQ ID NO: 32945 - DNA, 321 bp, synthetic construct
  source 1..321: mol_type = other DNA
gacatccagatgacccagagccccagcagcctgtctgcctctctgggcgagagagtgtccctgacctgtcgggccacacaggaactgagcggctacctgtcttggctgcagcagaagcccgacggcaccatcaagcggctgatctacgccgccagcaccctggatagcggcgtgcccaagagattcagcggcaacagaagcggcagcgactacagcctgaccatcagctccctggaaagcgaggacttcgccgactactactgcctgcagtacgccatctacccctacaccttcggcggaggcaccaagctggaaatcaag

SEQ ID NO: 32946 - DNA, 336 bp, synthetic construct
  source 1..336: mol_type = other DNA
gacaccatcgtgctgacacagagccctgcttccctggccgtgtccctgggacagagagccaccatctcttgcagagccagcgagagcgtggacagctacggcaacagcttcatgcactggtatcagcagaagcccggccagccccccaagctgctgatctacctggcctccaacctggaaagcggcgtgcccgccagattttctggcagcggcagcagaaccgacttcaccctgaccatcgaccccgtggaagccgatgatgccgccacctactactgccagcagaacaactacgacccctggaccttcggcggaggcaccaagctggaaatcaag

SEQ ID NO: 32947 - DNA, 324 bp, synthetic construct
  source 1..324: mol_type = other DNA
gacatccagatgacccagagccccagcagcctgtctgccagcgtgggcgacagagtgaccatcacatgcaaggccagccaggacgtgggaatcgccgtggcctggtatcagcagaaacccggcaaggtgcccaagctgctgatctactgggccagcaccagacacaccggcgtgcccgatagattttccggcagcggctccggcaccgacttcaccctgacaatcagctccctccagcccgaggacgtggcaacctactactgccagcagtacagcagctacccctacaccttcggccagggcaccaaggtggaaatcaagaga

SEQ ID NO: 32948 - DNA, 321 bp, synthetic construct
  source 1..321: mol_type = other DNA
gacatcgtgatgacccagagccagaagagcatgagcaccagcgtgggcgacagagtgagcatcacctgcaaggccagccaggacgtgatcaccggcgtggcctggtaccagcagaagcccggccagagccccaagctgctgatctacagcgccagctacagatacaccggcgtgcccgacagattcaccggcagcggcagcggcaccgacttcaccttcaccatcagcaacgtgcaggccgaggacctggccgtgtactactgccagcagcactacagcacccccctgaccttcggcgccggcaccaagctggagctgaag

SEQ ID NO: 32949 - DNA, 339 bp, synthetic construct
  source 1..339: mol_type = other DNA
cagagcgtgctgacacagcctccatccgtgtctggcgctccaggccagagagtgaccatctcctgtaccggcagcggcagcaacatcggagccccctacgacgtgtcctggtatcagcaactgcctggcaccgcccccaagctgctgatctaccacaacaacaagcggcccagcggcgtgcccgatagattcagcggctctaagagcggcaccagcgccagcctggctatcactggactccaggccgaggacgaggccgactactactgccagagctacgacagcagcagcatcagcaccatcttcggcggaggcaccaagctgacagtgctgggagct

SEQ ID NO: 32950 - DNA, 339 bp, synthetic construct
  source 1..339: mol_type = other DNA
cagagcgtgctgacacagcctccatccgtgtctggcgctccaggccagagagtgaccatctcctgtaccggcagcggcagcaacatcggagccccctacgacgtgtcctggtatcagcaactgcctggcaccgcccccaagctgctgatctaccacaacaacaagcggcccagcggcgtgcccgatagattcagcggctctaagagcggcaccagcgccagcctggctatcactggactccaggccgaggacgaggccgactactactgtgccacagtggaagccggcctgagcggctctgtgtttggcggcggaacaaagctgaccgtgctgggagct

SEQ ID NO: 32951 - DNA, 321 bp, synthetic construct
  source 1..321: mol_type = other DNA
gacatccagatgacccagagccccagcagcctgtctgccagcgtgggcgacagagtgaccatcacctgtagcgccagcagcagcgtgtcctacatgtactggtatcagcagaagcccggcaaggcccccaagctgctgatctacctgaccagcaatctggcctccggcgtgcccagcagattttctggcagcggctccggcaccgacttcaccctgacaatcagctccctccagcccgaggacttcgccacctactactgtcagcagtggcggagcaaccccttcaccttcggccagggcaccaagctggaaatcaagaga

SEQ ID NO: 32952 - DNA, 324 bp, synthetic construct
  source 1..324: mol_type = other DNA
gagatcgtgatgacccagagccctgccaccctgtccgtgtctccaggcgaaagagccaccctgagctgcaaggcttcccagagcgtgtccaacgacgtcgtgtggtatcagcagaagcccggccaggcccccagactgctgatctactacgccagcaacagatacaccggcatccccgccagattcagcggctctggcagcggcaccgagttcaccctgacaatcagcagcctccagagcgaggacttcgccgtgtactactgtcagcaggactacaccagcccctggaccttcggccagggcaccaagctggaaatcaagaga

SEQ ID NO: 32953 - DNA, 321 bp, synthetic construct
  source 1..321: mol_type = other DNA
gacatcctgctgacccagagccccgtgatcctgtccgtgtctcctggcgagagagtgtccttcagctgtcgggccagccagagcatcggcaccaacatccactggtatcagcagcggaccaacggcagccccagactgctgattaagtacgccagcgagtccatcagcggcatccccagcagattttccggcagcggctccggcaccgacttcaccctgagcatcaacagcgtggaaagcgaggacattgccgactactactgccagcagaacaacaactggcccaccaccttcggagccggcaccaagctggaactgaag

SEQ ID NO: 32954 - DNA, 336 bp, synthetic construct
  source 1..336: mol_type = other DNA
gatgtcgtgatgacccagagccccgacagcctggctgtgtctctgggagagagagccaccatcaactgcaagtccagccagtccctgctggacagcgacggcaagacctacctgaactggctccagcagaagcccggccagccccccaagagactgatctccctggtgtccaagctggactccggcgtgcccgatagattttccggctctggcagcggcaccgacttcaccctgacaatcagctcccttcaggccgaggacgtggccgtgtactattgctggcagggcacacacttccccggcacctttggcggaggcaccaaggtggaaatcaag

SEQ ID NO: 32955 - DNA, 321 bp, synthetic construct
  source 1..321: mol_type = other DNA
gagctgcagatgacccagagccctagcagcctgtctgccagcgtgggcgacagagtgaccatcacctgtagagccagccagagcatcagcagctacctgaactggtatcagcagaagcccggccagccccccaaactgctgatctactgggccagcaccagagaaagcggcgtgcccgatagattcagcggcagcgagagcggcaccaactacaccctgaccatcagctccctgcagcccgaggacttcgccacctacttttgccagcagagcgacagcctgcccatcacctttggacagggcacccggctggacattcag

SEQ ID NO: 32956 - DNA, 339 bp, synthetic construct
  source 1..339: mol_type = other DNA
gagcttgtgatgacccagagccccagcagcctgacagtgacagccggcgagaaagtgaccatgagctgcaagagcagccagagcctgctgaacagcggcaaccagaagaactacctgacctggtatcagcagaagcccggccagccccccaagctgctgatctactgggccagcaccagagaaagcggcgtgcccgatagattcaccggctctggcagcggcaccgacttcaccctgacaatcagcagcgtgcaggccgaggacctggccgtgtactactgccagaacgactacagctaccccctgaccttcggagccggcaccaagctggaaatcaag

SEQ ID NO: 32957 - DNA, 321 bp, synthetic construct
  source 1..321: mol_type = other DNA
gacatccaaatgacacagagtccttctagtttgagtgcgagcgtgggggacagggtgaccattacctgcagggccagccagagcataagctcataccttaattggtaccagcaaaaaccaggtaaggcccctaagctcctgatctacgcggcctcttcacttcaatctggggtcccttcccgcttcagtggctccggcagcggcaccgacttcacgctcactatatcaagtctgcagcctgaggatctcgccacctattactgtcaacaaagttattccacccctttcacctttggaccgggcacgaaagtggatattaag

SEQ ID NO: 32958 - DNA, 309 bp, synthetic construct
  source 1..309: mol_type = other DNA
tacatccacgtgacacagagccctagcagcctgtccgtgtccatcggcgatagagtgaccatcaactgccagacctctcaaggcgtgggcagcgacctgcactggtatcagcacaaacctggcagagcccctaagctgctgatccaccatgccagctctgtggaagatggcgtgcccagcagattttccggcaccggatttcacaccagcttcaacctgacaatcaacgacctccaggccgacgacatcggcacctactactgtcaagtgctccagagcttcggcagaggcagcagactggatacaaaa

SEQ ID NO: 32959 - DNA, 336 bp, synthetic construct
  source 1..336: mol_type = other DNA
gacatcgtgctgacccagagccctctgagcctggccgtgtctctgggacagcctgccatcatcagctgcaaggccagccagagcgtgtcctttgccggcacctctctgatgcactggtatcaccagaagcccggccagcagcccagactgctgatctacagagccagcaacctggaagccggcgtgcccgatagattttccggcagcggcagcaagaccgacttcaccctgaccatcagccccgtggaagccgaagatgccgccacctactactgccagcagagcagagagtacccctacaccttcggcggaggcaccaagctggaaatcaagagg

SEQ ID NO: 32960 - DNA, 339 bp, synthetic construct
  source 1..339: mol_type = other DNA
gacgttgtgatgacccagacccccctgagcctgcctgtgacacctggcgaacctgccagcatcagctgtcggagcagccagagcctggtgcacagaaacggcaacacctacctgcactggtatctccagaagcccggccagagccccaagctgctgatccacaaggtgtccaacagattcagcggcgtgcccgacagattctccggcagcggctctggcaccgacttcaccctgaagatcagccgggtggaagccgaggacctgggcgtgtacttctgtagccagagcacccatgtgccccccctgacatttggagccggcaccaagctggaactgaag

SEQ ID NO: 32961 - DNA, 315 bp, synthetic construct
  source 1..315: mol_type = other DNA
gagatcgtgatgacccagacccctgccaccctgtctgtgtctgccggcgagagagtgaccattacctgcaaggccagccagagcgtgtccaacgacgtgacctggtatcagcagaagcccggccaggcccccagactgctgatctacagcgccagcaacagatacagcggcgtgcccgccagattttccggcagcggctacggcaccgagttcaccttcaccatcagcagcgtgcagagcgaggacttcgccgtgtacttctgtcagcaagactacagcagcttcggccagggcaccaagctggaaatcaagagg

SEQ ID NO: 32962 - DNA, 324 bp, synthetic construct
  source 1..324: mol_type = other DNA
gacatccagatgacccagaccgccagcagcctgcctgcctctctgggcgacagagtgaccatctcctgtagcgccagccaggacatcagcaactacctgaactggtatcagcagaaacccgacggcaccgtgaagctgctgatcttctacagcagcaacctgcacagcggcgtgcccagcagattttctggcggcggaagcggcaccgactacagcctgaccatcagcaatctggaacccgaggacattgccacctacttttgccaccagtacagcaagctgccctggacctttggcggaggcaccaagctggaaatcaagaga

SEQ ID NO: 32963 - DNA, 333 bp, synthetic construct
  source 1..333: mol_type = other DNA
cagttcgtgctgacccagagcccttctgcctctgctgccctgggagcctctgccaagctgacctgtacactgagcagcgcccacaagacctacaccatcgactggtatcagcagcagaagggaaaggcccccagatacctgatccaagtgaagtccgacggcacctacacaaaggccaccggcgtgcccgatagattcagcggcagtagcagcggagccgatagatacctgattatccccagcgtgcaggccgacgacgaggccgattactactgcggcaccgattacaccggcggctacgtgttcggcggaggcacacaactgaccgtgaca

SEQ ID NO: 32964 - DNA, 321 bp, synthetic construct
  source 1..321: mol_type = other DNA
gacatccagatgacccagagccccagcagcctgtctgccagcgtgggcgacagagtgaccatcacctgtagagccagccagggcatcagctcttggctggcctggtatcagcagaagcccgagaaggcccccaagagcctgatctacgccgcctctagtctccagagcggcgtgcccagcagattttctggcagcggctccggcaccgacttcaccctgacaatcagctccctccagcccgaggacttcgccacctactactgccagcagtacaacagctacccccccacctttggcggaggcaccaaggtggaaatcaag

SEQ ID NO: 32965 - DNA, 333 bp, synthetic construct
  source 1..333: mol_type = other DNA
cagtctgtggtcacacagccacctagcatgtctgccgctccaggccagcaagtgaccatctcttgtagcggcggcaacagcaacatcgagcggaactacgtgtcctggtatctgcaactgcctggcacagcccctaagctggtcatcttcgacaacgacagacggcccagcggcatccccgatagattttctggcagcaagagcggcaccagcgccacactgggaattaccggacttcagacaggcgacgaggccgactactactgtggcacatgggactctagcctgagaggctgggttttcggcggaggcacaaagctgacagtgcttggt

SEQ ID NO: 32966 - DNA, 333 bp, synthetic construct
  source 1..333: mol_type = other DNA
cagtctgtgctgacacagcctccatctgcctctggcacacctggacagagagtgaccatcagctgtagcggcagcagaagcaacgtcggcggcaactacgtgttctggtatcagcaggtcccaggcgctacccctaagctgctgatctacagaagcaatcagcggcctagcggcgtgcccgatagatttgccggaagcaagagcggcagctctgccagccttgccatctctggactgagaagcgaggacgaggccgactactactgtgccacctgggatgatagcctgagcggcttcgtgtttggcaccggcaccaaagtgacagtgcttggt

SEQ ID NO: 32967 - DNA, 321 bp, synthetic construct
  source 1..321: mol_type = other DNA
gacatccagatgacccagagccccagcagcctgtctgccagcgtgggcgacagagtgaccatcacctgtagagccagccaggacgtgaacaccgccgtggcctggtatcagcagaagcctggcaaggcccccaagctgctgatctacagcgccagcttcctggaaagcggcgtgcccagcagattcagcggaagcagaagcggcaccgacttcaccctgaccatcagctccctccagcccgaggacttcgccacctactactgccagcagcactacaccacccctcccaccttcggccagaccaaggtggaaatcaagaga

SEQ ID NO: 32968 - DNA, 315 bp, synthetic construct
  source 1..315: mol_type = other DNA
cagtctgccctgacacagcctcctagcgcctctggctctcccggccagagcatcaccatcagctgtaccggcaccagcaacaacttcgtgtcctggtatcagcagcacgccggcaaggcccccaagctcgtgatctacgacgtgaacaagcggcccagcggcgtgcccgatagattcagcggcagcaagagcggcaacaccgccagcctgacagtgtctggcctccagaccgatgacgaggccgtgtactactgcggcagcctcgtgggcaactgggacgtgatctttggcggaggcaccaagctgaccgtgctg

SEQ ID NO: 32969 - DNA, 321 bp, synthetic construct
  source 1..321: mol_type = other DNA
gagctggtgctgacacagagccctggcaccctgtctctgtctgccggcgaaagagccaccctgagctgtagagccagccagagcgtgtcctctggcagcctggcttggtatcagcagaagccaggccaggcccccagactgctgatctacggcgcttctaccagagccaccggcatccccgatagattcagcggctctggctccggcaccgacttcaccctgacaatcggcagactggaacccgaggacctggccgtgtactactgccagcagtacggcaccagcccctacacattcggccagggcaccaagctggaaatc

SEQ ID NO: 32970 - DNA, 291 bp, synthetic construct
  source 1..291: mol_type = other DNA
gacatccagatgacccagagccccagcagcctgtctgccagcgtgggcgacagagtgaccatcacctgtcaggccagccaggacatcaacaactacctgaactggtatcagcagaagcccggcaaggcccccaagctgctgatctacgacgccagcaatctgcagaccggcgtgcccagcagattttccggctctggcagcggcaccgacttcaccttcaccatcgaggacattgccacctactactgccagcagtacaccttcggccctggcaccaaggtggacatcaaa

SEQ ID NO: 32971 - DNA, 327 bp, synthetic construct
  source 1..327: mol_type = other DNA
gacatccagatgacccagagccccagcagcctgtctgccagcgtgggcgacagagtgaccatcacctgtaccgccagcctgagcgtgtccagcacctacctgcactggtatcagcagaagcccggcagcagccccaagctgtggatctacagcaccagcaacctggcctccggcgtgcccagcagattttctggcagcggctctggcaccagctacaccctgaccatcagctccctccagcccgaggacttcgccacctactactgccaccagtaccacagaagccccctgacctttggcggaggcaccaaggtggaaatcaagaga

SEQ ID NO: 32972 - DNA, 321 bp, synthetic construct
  source 1..321: mol_type = other DNA
gacatccagatgacccagagccccagcagcctgtctgccagcgtgggcgacagagtgaccatcacatgcaaggccagccaggacgtgggaacagccgtggcctggtatcagcagaagcctggcaaggcccccaagctgctgatctacagcgccagctacagatccaccggcgtgcccagcagattttccggctctggcagcggcaccgacttcaccctgaccatctctagcctccagcccgaggacttcgccacctactactgccagcaccactactccgccccctggacatttggcggaggcaccaaggtggaaatcaag

SEQ ID NO: 32973 - DNA, 324 bp, synthetic construct
  source 1..324: mol_type = other DNA
gacatccagatgacccagagcttcagcagcctgagcgccagcgtgggcgacagagtgaccatcacctgtagagccagccaggacatcagcaactacctgaactggtatcagcagaagcccggcaaggcccccaagctgctgatctactacaccagcagactgcacagcggcgtgcccagcagattttctggcagcggctccggcaccgactacaccctgacaatcagctccctgcagcccgaggacttcgctacctacttctgtcagcaaggcaacaccctgccctggacctttggcggaggcaccaagctggaaatcaagaga

SEQ ID NO: 32974 - DNA, 321 bp, synthetic construct
  source 1..321: mol_type = other DNA
gacatccagatgacccagagcccccctagcctgtctgcctctgtgggcggcaaagtgaccatcacatgcaaggccagccaggacatcgaccgctacatggcctggtatcaggacaagcccggcaagggacccaagctgctgatccacgataccagcaccctccagcccggcatccccagcagattttctggcagcggctccggcagagactacagcttcagcatcagcaacctggaacccgaggacattgccacctactactgcctccagtacgacaacctgtggaccttcggcggaggcaccaagctggaaatcaagaga

SEQ ID NO: 32975 - DNA, 321 bp, synthetic construct
  source 1..321: mol_type = other DNA
gacatccagatgacccagagccctgccagcctgtctgcctctgtgggcgagacagtgaccatcacctgtcgggtgtccggcaacatccacaactacctggcctggtatcagcagaagcagggcaagagcccccaactgctggtgtacaacgccaagaccctggccgatggcgtgcccagcagattttctggctctggcagcggcacccagtacagcctgaagatcaacagcctccagcccgaggacttcggcagctactactgccagcacttctggtccaacccctacaccttcggcggaggcaccaagctggaaatcaag

SEQ ID NO: 32976 - DNA, 321 bp, synthetic construct
  source 1..321: mol_type = other DNA
gacatccagatgacacagtctccggcgtcactgtccgcctccgtgggggagactgtgactattatttgtagggcatcagttaacatctactcttatttggcctggtaccagcagaagcaaggcaagagtcctcagctgctggtgtataatgcgaagatcctggcagagggcgtgccgagccggttctccggcagcggctcaggtacccaattttccctcaagatcaattcactgcagccagaggactttggcagttactattgtcaacaccactacggcacattcactttcgggtccggtacaaaattggagattaagcga

SEQ ID NO: 32977 - DNA, 321 bp, synthetic construct
  source 1..321: mol_type = other DNA
gacattgtgatgacccagtctcacaaattcatgtccacatcagtaggagacagggtcagcgtcacctgcaaggccagtcagaatgtgggtaataatgtagcctggtatcaacagaaaccagggcaatctcctaaagtactgatttactcggcatcctaccggtacagtggagtccctgatcgcttcacaggcagtggatctgggacagatttcactctcaccatcagtaatgtgcagtctgaagacttggcagagtatttctgtcagcaatataacacctatccattcacgttcggctcggggacaaagttggaaataaaa

SEQ ID NO: 32978 - DNA, 324 bp, synthetic construct
  source 1..324: mol_type = other DNA
gacatccagatgacccagagcagcagcagcttcagcgtgtccctgggcgacagagtgaccatcacatgcaaggccagcgaggacatctacatccggctggcctggtatcagcagaagcccggcaacgcccccagactgctgattagcgccgccacctctctggaaaccggcatccccagcagattctccggctctggcagcggcgaggactacaccctgacaatcaccagcctccagaccgaggacgtggcaacctactactgccagcagtattggaccaccccctggacctttggcggaggcaccaagctggaaatcaagaga

SEQ ID NO: 32979 - DNA, 321 bp, synthetic construct
  source 1..321: mol_type = other DNA
gatatccagatgacccagtccagcagcagcttcagcgtgtccctgggcgacagagtgaccatcacctgtatggcctccgaggacatctacatccggctggcctggtatcagcagaagcccggcaacgcccccagactgctgattagcgccgccacctctctggaaaccggcgtgccaagcagattcagcggctctggcagcggcaaggactacaccctgagcatcacctccttgcagaccgaggacgtgggcacctactattgccagcagtattggagcagcccctggacctttggcggaggcacaaagctggaaatcaac

SEQ ID NO: 32980 - DNA, 321 bp, synthetic construct
  source 1..321: mol_type = other DNA
gacatccagatgacccagagcagcagcagcttcagcgtgagcctgggcgacagagtgaccatcacctgcatggccagcgaggacatctacatcagactggcctggtaccagcagaagcccggcaacgcccccagactgctgatcagcgccgccaccagcctggagaccggcgtgcccagcagattcagcggcagcggcagcggcaaggactacaccctgagcatcaccagcctgcagaccgaggacgtgggcacctactactgccagcagtactggagcagcccctggaccttcggcggcggcaccaagctggagatcaac

SEQ ID NO: 32981 - DNA, 318 bp, synthetic construct
  source 1..318: mol_type = other DNA
cagatcgtgctgacccagtcccccgctattatgtccgcatcaccgggcgaaaaagtgacgatctcctgtagcgcttcatctagcgtctcctacatgtattggtatcaacagaaacctgggtctagcccaaagccgtggatctacagaaccagtaaccttgccagtggggtgccagcccgcttcagcggtagtggcagtggaacttcctatagcctcacaataagcaacatggaggctgaagatgccgctgcctattactgccagcagtaccacagttacccaaccacgttcggcgggggaactaagctcgaagtaaaa

SEQ ID NO: 32982 - DNA, 324 bp, synthetic construct
  source 1..324: mol_type = other DNA
gacatccagatgacccagagccccagcagcctgtctgccagcgtgggcgacagagtgaccatcacctgtagagccagccagagcatcagcagctacctgaactggtatcagcagaagcccggcaaggcccccaaactgctgatctacgacgccagcaacctggaaaccggcgtgcccagcagattttccggcagcggctctggcaccgacttcaccttcaccatcagctccctccagcccgaggacattgccacctactactgccagcagtacgacaacctgcccctgacctttggcggaggcaccaaggtggacatcaagaga

SEQ ID NO: 32983 - DNA, 339 bp, synthetic construct
  source 1..339: mol_type = other DNA
gacgtcgtgatgacccagagccctctgagcctgcctgtgtccctgggcgatcaggccagcatctcctgcagatccagccagagactggtgcacagcaacggcaacacctacctgcactggtatctgcagaagcccggccagagccccaagctgctgatctaccgggtgtccaacagattccccggcgtgcccgatagattcagcggctctggcagcggcaccgacttcaccctgaagatcagccgggtggaagccgaggacctgggcatctatttctgcagccagagcacccacgtgccctacacctttggcggaggcaccaagctggaaatcaagcgg

SEQ ID NO: 32984 - DNA, 327 bp, synthetic construct
  source 1..327: mol_type = other DNA
agctacgagctgacccagcctcctagcgtgtccgtgtctcctggacagaccgccaccatctcttgcagcggcgatcaactgggcgggaagtacggccactggtatcagaagaagcccggccagagccccgtgctggtgctgtaccaggacagaaaacggcctgccggcatccccgagagattcagcggaagcagcagcggcaacaccatcaccctgaccatcagcggcacccaggccgtggatgaggccgactactactgccaggcttgggacaccaatctgggcggcgtgttcggcggaggcaccaaagtgacagtgctgggacag

SEQ ID NO: 32985 - DNA, 339 bp, synthetic construct
  source 1..339: mol_type = other DNA
aacttcatgctgacccagccccacagcgtgtccgagagccctggcaagaccgtgaccatctcctgcaccagaagcagcggctctatcgccagcaaatacgtgcagtggtatcagcagaggcccggcagcagccctaccaccgtgatctacgaggacaaccagaggcctagcggcgtgcccgatagattcagcggcagcatcgacaccagcagcaacagcgccagcctgaccatcagcggcctgagaacagaggacgaggccgactactactgccacagctacgacagcaacaaccactccgtgttcggcggaggcaccaaagtgacagtgctgggacag

SEQ ID NO: 32986 - DNA, 324 bp, synthetic construct
  source 1..324: mol_type = other DNA
gacatccagatgaaccagagccccagcagcctgagcgccagcctgggcgataccatcaccatcacctgtcacgccagccagaacatcaacgtgtggctgagctggtatcagcagaagcccggcaacatccccaagctgctgatctacaaggccagcaacctgcacaccggcgtgcccagcagattttctggcagcggctctggcaccggcttcaccattaccatcagctccctccagcccgaggacattgccacctactactgccagcagggccagagctacccctggacatttggcggaggcaccaagctggaaatcaagaga

SEQ ID NO: 32987 - DNA, 324 bp, synthetic construct
  source 1..324: mol_type = other DNA
gacatcctgctgacacagagccccgccatcctgtccgtgtctccaggcgagagagtgtcctttagctgccgggccagccagaacatcggcaccagcatccactggtatcagcagcggaccaacggcagccccagactgctgattaagtacgccagcgagtccgtgtccggcatccccagcagattttctggcagcggctccggcaccgacttcaccctgagcatcaacagcgtggaaagcgaggacattgccgactactactgccagcacaccaatagctggcccaccacctttggcggaggcaccaagctggaaatcaagaga

SEQ ID NO: 32988 - DNA, 339 bp, synthetic construct
  source 1..339: mol_type = other DNA
gacatcgtgatgacccagagccccgatagcctggccgtgtctctgggagagagagccaccatcaactgcaagagcagccagagcctgctgaacagcggcgaccagaagaactacctgacctggtatcagcagaagcccggccagccccccaagctgctgatctactgggccagcaccagagaaagcggcgtgcccgatagattcagcggcagcggaagcggcaccgacttcaccctgaccatcagttctcttcaggccgaggacgtggccgtgtactactgccagaacgactacagctaccccctgaccttcggccagggcaccaaggtggaaatcaag

SEQ ID NO: 32989 - DNA, 321 bp, synthetic construct
  source 1..321: mol_type = other DNA
gacatccagatgacccagagccccagcagcctgtctgccagcgtgggcgacagagtgaccatcacatgcaaggccagccaggacgtgtccattgccgtggcctggtatcagcagaagcccggcaaggcccccaaggtgctgatctacagcgccagctacagatacaccggcgtgcccgacagattcagcggctctggcagcggcaccgacttcaccttcaccatcagctccctccagcccgaggatattgccgtgtactactgccagcagcactacatcacccccctgacctttggcggaggcaccaaggtggaaatcaag

SEQ ID NO: 32990 - DNA, 330 bp, synthetic construct
  source 1..330: mol_type = other DNA
caggctgtcgtgacacagcctcctagcgcctctggcacaccaggccagagagtgaccatctcctgtagcggcagcagcagcaacatcggcagcaacaccgtgaactggtatcagcaggtgcccggcaccgctcccaagctgctgatctacagcaacaaccagcggcccagcggcgtgcccgatagattttctggcagcaagagcggcaccagcgccagcctggctatctctggactccagtccgaggacgaggccgactactattgcgccgcctgggacgatagcctgaacggctgggtgttcggcggaggcaccaagctgacagtgctg

SEQ ID NO: 32991 - DNA, 321 bp, synthetic construct
  source 1..321: mol_type = other DNA
gacatccagatgacccagagccccagcacactgagcgccagcgtgggcgacagagtgaccatcacctgtcgggccagccagaacatcaacaagtggctggcctggtatcagcagaggcccggaaaagccccccagctgctgatctacaaggccagcagcctggaaagcggcgtgcccagcagattttctggcagcggctctggcaccgagtacaccctgaccatcagctccctccagcccgacgacttcgccacctactactgccagcagtacaacagctacgccaccttcggccagggcaccaaggtggaaatcaagaga

SEQ ID NO: 32992 - DNA, 327 bp, synthetic construct
  source 1..327: mol_type = other DNA
cagagcgtcgtgacacagcctcctagcgtgtcagtggcccctggcaagaccgccagaatcacctgtggccggaacaacatcggcagcaagagcgtgcactggtatcagcagaagcccggccaggctcctgtgctggtggtgtacgacgacagcgacagacccagcggcatccccgagagattcagcggcagcaactccggcaataccgccaccctgaccatcagcagagtggaagccggcgacgaggccgactactactgccaagtgtgggacagcagcagcgatcacgtggtgtttggcggaggcaccaagctgacagtgctgggt

SEQ ID NO: 32993 - DNA, 333 bp, synthetic construct
  source 1..333: mol_type = other DNA
gacatcgtgctgacacagagccctgcttctctggccgtgtctctgggacagagagccaccatcagctgtagagccagcgagagcgtggacaactacggcaacaccttcatgcactggtatcagcagaagcccggccagcctcctaagctgctgatctacagagccagcaacctggaaagcggcatccccgccagattttctggcagcggcagcagaaccgacttcaccctgaccatcaatcccgtggaagccgacgacgtggcaacctactactgccagcagagcaacgaggaccctcctacatttggagccggcaccaagctggaactgaaa

SEQ ID NO: 32994 - DNA, 324 bp, synthetic construct
  source 1..324: mol_type = other DNA
gagatcgtgctgacacagagccctggcaccctgagcctgtctccaggcgaaagagccacactgagctgtcgggccagccagagcgtgtccaatacctacctggcctggtatcaccagaggcccggacaggctccccggctgctgatctatggcgcttctagcagagccaccggcatccccgatagattcagcggctctggcagcggcaccgacttcgccctgacaatcagctccctggaacccgaggacttcgccgtgtactactgccagcagtacagcaactcctggaccttcggccagggcaccaaggtggaaatcaagaga

SEQ ID NO: 32995 - DNA, 324 bp, synthetic construct
  source 1..324: mol_type = other DNA
gagctgacacaggaccctgctgtgtctgttgccctgggccagacagtgcggattacctgtcaaggcgacagcctgagaagcaactacgccaactggtatcagcagaagcccggacaggctcccgtgctggttatctacggccagaacaacagacccagcggcatccccgatagattcagcggctctagctctggcaataccgccagcctgacaatcactggcgctcaggctgccgatgaggccgactactactgcgatagcagagtgtccaccggcaatcacgtggtgtttggcggcggaacaaagctgacagtgctcggacaa

SEQ ID NO: 32996 - DNA, 318 bp, synthetic construct
  source 1..318: mol_type = other DNA
gacatccagatgacacagagccctagcagcctgtctgccagcgtgggagacagagtgaccatcacctgtagcgccaccagcagcatcagctacatgcactggtatcagcagaagcccggcaaggcccctaaaggctggatctacgataccagcaaactggcccacggcgtgcccagcagattttctggttctggcagcggcaccgacttcaccctgacaatatctagcctccagcctgaggacttcgccacctactactgccaccagagaagaagctaccccttcaccttcggccagggcaccaaggtggaaatcaaa

SEQ ID NO: 32997 - DNA, 324 bp, synthetic construct
  source 1..324: mol_type = other DNA
gacatccagatgacacagagccctagcagcctgtctgccagcgtgggagacagagtgaccatcacatgcaaggccagccagggcttcaacaaatacgtggcctggtatcagcagaagcccggcaaggctcctaagctgctgatctactacaccagcacactccagcctggcgtgcccagcagattttctggctctggcagcggcagagactacaccctgacaatatccagcctccagccagaggacttcgccacctactactgtctccagtacggcaacctgctgtacgcctttggacagggcaccaaggtggaaatcaagaga

SEQ ID NO: 32998 - DNA, 321 bp, synthetic construct
  source 1..321: mol_type = other DNA
gacatccagatgacacagagccctagcagcctgtctgccagcgtgggagacagagtgaccatcacctgtagagccagccaggacatccggtactacctgaactggtatcagcagaagcccggcaaggcccctaagctgctgatctatgtggcctccagcctccagagcggagtgccttctagattttctggcagcggctccggcaccgagtttaccctgacagtgtctagcttgcagcccgaggacttcgccacctactactgcctgcaagtgtacagcacccctcggacctttggacagggcaccaaggtggaaatcaaa

SEQ ID NO: 32999 - DNA, 321 bp, synthetic construct
  source 1..321: mol_type = other DNA
gagatcgtgatgacccctagcagcgccacactgagtgtgtctccaggcgaaagagccacactgtcctgtagagccagccagagcgtgtccagaaacctggcctggtatcagcagaagcctggacaggctccccggctgttgatctacggcgcttctacaagagccaccggcattcccgccagattttctggctctggcagcggcaccgagttcaccctgacaatctctagcctccagagcgaggacttcgccgtgtactactgccaccagtacagcaactggatgtgcagcttcggccagggcaccaagctggaaatcaaa

SEQ ID NO: 33000 - DNA, 324 bp, synthetic construct
  source 1..324: mol_type = other DNA
gacatccagatgacccagagccccagcagcctgtctgccagcgtgggcgacagagtgaccatcacatgcaaggccagcaagaacatcagaagctacctggcctggtatcagcagaagcccggcaaggcccccaagctgctgatctacagcggcagcacactgcacagcggcgtgcccagcagattttccggctctggcagcggcaccgacttcaccctgaccatctctagcctccagcccgaggacttcgccacctactactgccagcagcaccacgagtaccccctgacattcggccagggcaccaaggtggaaatcaagaga

SEQ ID NO: 33001 - DNA, 330 bp, synthetic construct
  source 1..330: mol_type = other DNA
cagtctgtggtcacacagcctccatccgtgtctgctgcccctggacagaaagtgaccatctcctgtagcggcagcagcagcaacatcggcaacaactacgtgtcctggtatcagcagctccccggcacagctcccaaactgctgatctacgacaacaacaagcggcccagcggcatccccgatagattttctggcagcaagagcggcaccagcgccacactgggaattaccggacttcagacaggcgacgaggccgactactactgtggcacatgggatggcagcctgtacaccatgcttttcggcggaggcaccaagctgacagtgctt

SEQ ID NO: 33002 - DNA, 339 bp, synthetic construct
  source 1..339: mol_type = other DNA
cagtctgtgctgacacagcctcctagtgtgtctggcgctcctggacagagagtgaccatctcttgtaccggcagcagcagcaatatcggagccggctatgacgtgcactggtatcagcagctccctggcacagcccctaaactgctgatcttcggcaacagcaacagacccagcggcgtgcccgatagattcagcggctttaagagcggcacaagcgccagcctggctatcactggactgcaagccgaggacgaggccgactacttctgccagagctacgatagcagcctgagcggcagcggagtgtttggcacaggcaccaaagtgacagtgcttggc

SEQ ID NO: 33003 - DNA, 342 bp, synthetic construct
  source 1..342: mol_type = other DNA
ctgcctgttctgacacagcctccatctgcctctggcacacctggacagagagtgaccatcagctgtagcggcagaagcagcaacatcggcagcaacagcgtgaactggtacagacagcttcctggcgctgcccctaagctgctgatctacagcaacaaccagcggcctcctggcgtgccagtcagattttctggcagcaagagcggcacaagcgccagcctggctatttctggactccagtctgaggacgaggccacctactactgtgccacctgggacgacaacctgaacgtgcactacgtgttcggcaccggcaccaaagtgacagtgcttggaagtaga

SEQ ID NO: 33004 - DNA, 333 bp, synthetic construct
  source 1..333: mol_type = other DNA
gacatcgtgctgacacagagccctgcttctctggccgtgtctctgggagagagagccaccatcaactgtagagccagcgagagcgtgtccgtgattggagcccacctgatccactggtatcagcagaagcctggacagcctcctaagctgctgatctacctggcctccaacctggaaacaggcgtgccagccagattttctggcagcggctctggcaccgatttcaccctgacaatcagcagcctccaggccgaagatgccgccatctactactgcctccagagccggatcttccccagaacctttggacagggcaccaagctggaaatcaaa

SEQ ID NO: 33005 - DNA, 336 bp, synthetic construct
  source 1..336: mol_type = other DNA
gacatcgtgctgacacagtctcccgccacactgtcactgagccctggcgatagagccacactgagctgtagagccagcgagagcgtgacaatcctgggcagccacctgatctactggtatcagcagaagcccggacaggcccctagactgctgattcagctcgccagcaatgtgcagacaggcatccctgccagattttccggcagcggcagcagaaccgatttcaccctgaccataagcagcctggaacctgaggacttcgccgtgtactactgcctccagagccggacaatccccagaacctttggacagggcaccaagctggaaatcaagaga

SEQ ID NO: 33006 - DNA, 339 bp, synthetic construct
  source 1..339: mol_type = other DNA
gacttcgtgatgacacagagccctgatagcctggccgtgtctctcggcgagcgagtgaccatgagctgcaagtctagccagagcctgctgaacagcggcaaccagaagaactacctgacctggtatcagcagaagcccggccagcctcctaagctgctgatctactgggccagcaccagagaaagcggcgtgcccgatagattttctggctctggcagcggcaccgacttcaccctgacaatttctagcctgcaagccgaggacgtggccgtgtactactgccagaacgactacagctacccctacaccttcggccagggcaccaagctggaaatcaaa

SEQ ID NO: 33007 - DNA, 339 bp, synthetic construct; identical to SEQ ID NO: 33006
  source 1..339: mol_type = other DNA

SEQ ID NO: 33008 - DNA, 324 bp, synthetic construct
  source 1..324: mol_type = other DNA
gacgtgcagatcacacagagccctagctacctggctgcctctcctggcgagacaatcaccatcaactgtcgggccagcaagagcatcagcaaggacctggcctggtatcaagagaagcccggcaagaccaacaagctgctgatctacagcggcagcacactccagtctggcatccccagcagattttccggctctggcagcggcaccgatttcaccctgaccataagcagcctggaacctgaggacttcgccatgtactactgccagcagcacaacaagtacccctacacctttggcggaggcaccaagctggaaatcaagaga

SEQ ID NO: 33009 - DNA, 318 bp, synthetic construct
  source 1..318: mol_type = other DNA
gagatcgtgctgacacagagccctaccagcatgacagcctctccaggcgagcaagtgaccatcacctgtagagccagcagcagcatcaactacatgcactggtatcagcagaagcctggcgcaagccccagaccttggatctacgagacaagcaagctggcctccggcgtgcccgatagattttctggatctgccagcggcaccagctacagcctgaccatcaacaacatggaagccgaggacgccgccacctactactgccagcagtggaattacccctcctggacctttggcggaggcaccaagctggaacttaaa

SEQ ID NO: 33010 - DNA, 339 bp, synthetic construct
  source 1..339: mol_type = other DNA
gacatcgtgatgacacagagcccttctagcctggccgtgtctgagggcgagacagtgaccatcaactgcaagagcagccagagcttcctgtctagcggcgacggcaagaattacgtggcctggtatcagtacaagcccggacagagccccaagctgctgatctactgggccagcacaagacagagcggcgtgcccgatagattcatcggctctggcagcggcaccgacttcaccctgacaatctctacagtgcaggccgaggacctggctatctactactgccagcagtattacgacacccctctgacctttggctccggcaccaagctggaaatcaaa

SEQ ID NO: 33011 - DNA, 339 bp, synthetic construct
  source 1..339: mol_type = other DNA
gacgtgctgatgacccagacacctgtgtctctgccagtgtctctcggaggccaggtgtccatctcctgtagaagcagccagagcctggtgcactccgacggcgatacctacctgcactggtatctccagaagcctggacagagccctcagctcctgatctaccgggtgtccaacagattcagcggcgtgcccgatagattttccggcagcggctctggcaccgacttcaccctgaagatcagcagagtggaacccgaggacctgggcctgtactactgtctccagaccacacacttcccaccttggacctttggcggaggcaccaagctggaaatgaaa

SEQ ID NO: 33012 - DNA, 336 bp, synthetic construct
  source 1..336: mol_type = other DNA
gacatcgtgatgacacagagccccgccacactgtcactgtctccaggcgaaagagccacactgagctgtcggagcagcaagagcctccagaacgtgaacggcaacacctacctgtactggttccagcagaagcccggccagtctcctcagctcctgatctacagaatgagcaacctgaacagcggcgtgcccgacagattttctggcagcggaagcggcaccgagttcaccctgaccataagcagcctggaacctgaggacttcgccgtgtactactgtatgcagcacctggaataccccatcaccttcggagccggcaccaagctggaaatcaaa

SEQ ID NO: 33013 - DNA, 324 bp, synthetic construct; identical to SEQ ID NO: 339
  source 1..324: mol_type = other DNA

SEQ ID NO: 33014 - DNA, 333 bp, synthetic construct
  source 1..333: mol_type = other DNA
cagatcgtgctgtctcagtctcctgccatcctgagcgcttccccaggcgagaaagtgaccatgacctgtagagccagcagcagcgtgtcctacatgcactggtatcagcagaagcccggcagcagccctaagccttggatctacgccaccagcaatctggcctctggcgtgccagccagattttctggctctggcagcggcaccagctacagcttcacaatcagcagagtggaagccgaggacgccgccacctactattgtcagcagtggaccttcaatcctcctaccttcggcggaggcacccggctggaaatcaaaagaacagtggctgct

SEQ ID NO: 33015 - DNA, 321 bp, synthetic construct; identical to SEQ ID NO: 32922
  source 1..321: mol_type = other DNA

SEQ ID NO: 33016 - DNA, 321 bp, synthetic construct
  source 1..321: mol_type = other DNA
gacatccagatgacacagagccctagcagcctgtctgccagcgtgggagatagagtgaccatcaactgcaaggccagccaggacatcaacagctacctgagctggttccagcagaagcctggcaaggcccctaagacactgatctaccgggccaacagactggtggatggcgtgccaagcagattttctggcagcggcagcggccaggattacaccctgacaatatccagcctccagcctgaggacttcgccacctactactgcctccagtacgacgagttccctctgacctttggcggaggcaccaaggtggaaatcaaa

SEQ ID NO: 33017 - DNA, 336 bp, synthetic construct
  source 1..336: mol_type = other DNA
gacatcgtgatgacccagacacctctgagcctgagcgtgacacctggacagcctgccagcattagctgcaagagcagccagtctctgctggacggcgacggcaagacctacctgaattggctgctccagaagcctggacagagccctcagcggctgatctacctggtgtccaagctggatagcggcgtgcccgatagattttctggcagcggctctggcaccgacttcaccctgaagatcagcagagtggaagccgaggacgtgggcgtgtactactgttggcagggcacacacttccccagaacattcggccagggcacaaagctggaaatcaaa

SEQ ID NO: 33018 - DNA, 318 bp, synthetic construct
  source 1..318: mol_type = other DNA
gacatccagatgacacagagccctagcagcctgtctgccagcgtgggagacagagtgaccatcacatgcaaggccagccaggatgtgtctacagccgtggcctggttccagcagaagcctggaaaagcccctaagctgctgatctacagccccagctacagatacaccggcgtgcccagcagattttctggcagcggctctggcaccgacttcaccctgacaatatccagcctccagcctgaggacttcacctactactgccagcagctctacagcaccccttacacattcggccagggcaccaaggtggaaatcaaa

SEQ ID NO: 33019 - DNA, 333 bp, synthetic construct
  source 1..333: mol_type = other DNA
gacatccagatgacacagagccctagcagcctgtctgccagcgtgggagacagagtgaccatcacctgtagagccagccagagcgtgtccaccagcagctacaactacatgcactggtatcagcagaagcccggcaagcctcctaagctgctgattaagtacgccagcaacctggaaagcggcgtgcccagcagattttctggcagcggctctggcaccgacttcaccctgacaatatccagcctccagcctgaggacttcgccacctactactgtcagcactcctgggagatccctctgacattcggccagggcaccaaggtggaaatcaaa

SEQ ID NO: 33020 - DNA, 324 bp, synthetic construct
  source 1..324: mol_type = other DNA
gagatcgtgctgacacagtctccagccacactgagcgcttctccaggcgagagagtgaccctgacctgtagagccagcagcaacgtgatctccagctacgtgcactggtatcagcagaagcctggcagcagccccagactgtttctgtacagcaccagcaatctggcctccggcgtgccaagcagattttctggctctggcagcggcaccgacttcacctttaccatctctagcctggaagccgaggacgccgccacctactactgtcagcagtacagcggctaccctctgaccttcggccagggcacaagactggaaatcaaa

SEQ ID NO: 33021 - DNA, 324 bp, synthetic construct
  source 1..324: mol_type = other DNA
gagatcgtgctgacacagtctcccgccacactgtcactgtctccaggcgaaagagccacactgagctgtagagccagcagcaacgtgatctccagctacgtgcactggtatcagcagaagcctggacaggcccctcggctgctgatctacagcacaagcaatctggcctctggcatccccgccagattttctggctctggaagcggcaccgacttcaccctgaccataagcagcctggaacctgaggacttcgccgtgtactactgccagcagtatagcggctaccctctgaccttcggccagggcacaagactggaaatcaaa

SEQ ID NO: 33022 - DNA, 336 bp, synthetic construct
  source 1..336: mol_type = other DNA
gacgtggtcatgacacagaccccactgagcctgcctgtgtctctgggagatcaggccagcatctcctgtagaagcagccagagcctggtgcacagcaacggcaacacctacctgcggtggtatctccagaagcctggacagagccccaaggtgctgatctacaaggtgtccaacagagtgtccggcgtgcccgatagattttctggcagcggctctggcaccgacttcaccctgaagatcaatagagtggaagccgaggacctgggcgtgtacttctgtagccagagcacccatgtgccttggacctttggcggaggcaccaagctggaaatcaag

SEQ ID NO: 33023 - DNA, 330 bp, synthetic construct
  source 1..330: mol_type = other DNA
tctgtgctgacccagcctagctccgtgtctgctgctcctggacagaaagtgaccatctcctgtagcggcagcaccagcaacatcggcaacaactacgtgtcctggtatcagcagcaccccggcaaggcccctaagctgatgatctacgacgtgtccaagaggcccagcggcgtgccagatagattttccggcagcaagagcggcaacagcgccagcctggatattagcggactccagtctgaggacgaggccgactactattgcgccgcctgggatgatagcctgagcgagtttctgtttggcaccggcaccaagctgacagtgcttgga

SEQ ID NO: 33024 - DNA, 339 bp, synthetic construct
  source 1..339: mol_type = other DNA
cagtctgtggtcacacagcctccatctgtgtctggcgctccaggccagagagtgaccatctcttgtaccggcagcagcagcaatatcggagccggctatgacgtgcactggtatcagcagctccctggcacagcccctaaactgctgatctacggcaacagcaacagacccagcggcgtgcccgatagattttccggctctaagagcggcacaagcgccagcctggctattactggactccaggccgaggacgaggccgactactactgtcagagctacgacagcagcctgagcggcagctatgtgtttggcaccggcaccaagctgacagtgcttgga

SEQ ID NO: 33025 - DNA, 333 bp, synthetic construct
  source 1..333: mol_type = other DNA
cagtctgtggttacacagcctgcctccgtgtctggctctcctggccagagcatcaccatcagctgtaccggcaccagctctgatgtcggcggctacaattacgtgtcctggtatcagcagcaccccggcaaggcccctaagctgatgatctacgacgtgtccaagaggcccagcggcgtgtccaatagattcagcggcagcaagagcggcaacaccgccagcctgacaatttctggactgcaagccgaggacgaggccgactactactgtagcagctacaccagcagcagcacactggtgtttggcggaggcaccaagctgacagttcttgga

SEQ ID NO: 33026 - DNA, 324 bp, synthetic construct
  source 1..324: mol_type = other DNA
gacgtggtcatgacacagagcccttctagcctgtctgccagcgtgggcgacagagtgacaatcacctgtcagagcagcctggacatcagccactacctgaactggtatcagcagaagcccggcaaggcccctaagctgctgatctacgacgccagcaatctggaaaccggcgtgcccagcagattttctggcagcggaagcggcacccacttcaccttcacaatatccagcctccagcctgaggacttcgccacctactactgccagcagtacgacaacctgcctctgacctttggcggaggcaccaagctggaaatcaagaga

SEQ ID NO: 33027 - DNA, 372 bp, synthetic construct
  source 1..372: mol_type = other DNA
gacgtgatgctgacccagacaccactgagcctgcctgtgtctctgggcgatcaggccagcatctcctgtagaagcagccagagcatcctgcacagcaccggcgatacctacctggaatggtatctccagaagcctggacagagccccaagctgctgattaacaaggtgtccaaccggctgagcggcgtgcccgatagattttctggcagcggctctggcaccgacttcaccctgaagatcagcagagtggaagccgaggacctgggcgtgtactactgcttccaaggcagccatgttccttggacctttggcggaggcaccaagctggaaatcaagagagctgacgccgctcctaccgtgtccatctttcct

SEQ ID NO: 33028 - DNA, 324 bp, synthetic construct
  source 1..324: mol_type = other DNA
ctgcctgttctgacacagcctccatccgtgtctgtggcccctggaaagaccgccagaatcacatgcggcggcaacaacatcggcagcaagagcgtgcactggtatcagcagaagcctggacaggctcctgtgctggtggtgtacgacgacagcgatagacctagcggcatccccgagagattcagcggcagcaattccggcaataccgccacactgaccatcagcagagtggaagctggcgacgaggccgactactactgccaagtgtgggacagcagcagcgactacgtggtgtttggcggcggaacaaagctgacagtgctt

SEQ ID NO: 33029 - DNA, 333 bp, synthetic construct
  source 1..333: mol_type = other DNA
gagctggtcatgacacagagccctgcttctctggccgtgtcactgggacagagagccaccatctcttgcagagccagcgagagcgtggacagctacggcaagagcttcatgcactggtatcagctcaagcccggccagcctcctaagctgctgatctacagagcctccaacctggaaagcggcgtgccagccagattttctggcagcggcagcagaaccgacttcaccctgaccattgatcccgtggaagccgatgatgccgccacctactactgccagcagaacaacgaggacccctggacatttggcggaggcaccaagctggaaatcaaa

SEQ ID NO: 33030 - DNA, 321 bp, synthetic construct
  source 1..321: mol_type = other DNA
gacgtggtcatgacacagagcccttctagcctgtctgccagcgtgggcgacagagtgaccatcacctgtatggcctccgaggacatctacatccggctggcctggtatcagcagaagcctggaaacgcccctaagctgctgatctacgccgccacctctctggaaacaggcgtgccaagcagattttccggcagcggctctggcaccgatttcaccctgacaatatccagcctccagcctgaggacttcgccacctactactgccagcagtattggagcagcccctggacatttggcggaggcaccaaggtggaaatcaaa

SEQ ID NO: 33031 - DNA, 327 bp, synthetic construct
  source 1..327: mol_type = other DNA
gagatcgtgctgacacagtctcccgccacactgtcactgtctccaggcgaaagagccacactgagctgtagcgccagcagcagcgtgtcctacatgtactggtatcagcagaagcccggacaggcccctagactgctgatctacagaaccagcaacctggcctctggcatccccgccagattttctggctctggcagcggcaccgatttcaccctgaccataagcagcctggaacctgaggacttcgccgtgtactactgccagcagtaccacagctaccccaccacctttggacagggcaccaaggtggaaatcaagcggacagtt

SEQ ID NO: 33032 - DNA, 321 bp, synthetic construct
  source 1..321: mol_type = other DNA
gacgtggtcatgacacagagcccttctagcctgtctgccagcgtgggcgacagagtgaccatcacctgtaaagccagcgaggacatctacatccggctggcctggtatcagcagaagcctggaaaggcccctaagctgctgatctacgccgccacctctctggaaacaggcgtgccaagcagattttccggcagcggctctggcaccgatttcaccctgacaatatccagcctccagcctgaggacttcgccacctactactgccagcagtattggaccacaccttggacctttggcggaggcaccaaggtggaaatcaaa

SEQ ID NO: 33033 - DNA, 324 bp, synthetic construct
  source 1..324: mol_type = other DNA
gacatccagctgactcagagccctagctttctgagcgccagcgtgggcgacagagtgaccattacatgtagagccagccagggcatcagcaccgacctgaactggtatcagcagaagcctggcaaggcccctaagctgctgatctacgccgccagcaatctggaaagcggcgtgccaagcagattttccggctctggcagcggcaccgagttcaccctgacaatatctagcctccagcctgaggacttcgccacctactactgccagcagagctacaactggccctacacctttggcggaggcaccaaggtggaaatcaagaga

SEQ ID NO: 33034 - DNA, 324 bp, synthetic construct
  source 1..324: mol_type = other DNA
gacatccaactgactcagagccccagctttctgagcgcctctgtgggcgacagagtgaccatcacatgtagtctcagcctgggcatcagcacatggcgggattggtttccgccgaggcttggcaggggccttgagccgctgacctacgccgccagcacactgcaaagcggagtgcctagcagattttccggcagcggctctggcaccgagttcaccctgacaatatccagcctccagcctgaggacttcgccacctactactgccagcagctcaacagctaccctctgacctttggcggaggcaccaaggtggaaatcaagaga

SEQ ID NO: 33035 - DNA, 324 bp, synthetic construct
  source 1..324: mol_type = other DNA
gacatccagatgacccagaccacaagcagcctgtctgccagcctgggcgacagagtgaccatctcttgtagagccagccaggacatcagcaactacctgaactggtatcagcagaaacccgacggcaccgtgaagctgctgatctactacaccagcatcctgcacagcggcgtgcccagcagattttctggctctggcagcggcaccgactacagcctgaccatcagcaatctggaacaagaggacttcgctacctacttctgccagcaaggcaacaccctgccttggacatttggcggaggcaccaagctggaaatcaaagct

SEQ ID NO: 33036 - DNA, 348 bp, synthetic construct
  source 1..348: mol_type = other DNA
gacatcgtgatgacacagagccctgatagcctggccgtgtctctgggagagagagccaccatcaactgcaagagcagccagagcctgctgtacagaagcaaccagaagaactacctggcctggtatcagcagaagcccggccagcctcctaagctgctgatctactgggccagcaccagagaaagcggcgtgcccgatagattttctggctctggcagcggcaccgacttcaccctgacaatttctagcctgcaagccgaggacgtggccgtgtactactgccagcagtattacaactaccccagaaccttcggccagggcaccaaggtggaaatcaagagaacagtt

SEQ ID NO: 33037 - DNA, 339 bp, synthetic construct
  source 1..339: mol_type = other DNA
gacgtggtcatgacacagagccctctgagcctgcctgtgacacttggacagcctgccagcatcagctgtagaagcagccagagcctgctgcacagcagcggcaatacctacctggaatggtatcagcagaggcccggacagagccccagacctctgatctacaagatcagcacccggttcagcggcgtgcccgatagattttctggctctggcagcggcaccgacttcaccctgaagattagcagagtggaagccgaggacgtgggcgtgtactactgcttccaaggcagccacgtgccatacacctttggcggcggaacaaaggtggaaatcaagaga

SEQ ID NO: 33038 - DNA, 327 bp, synthetic construct
  source 1..327: mol_type = other DNA
gacatccagatgacacagagccctagcagcctgtctgccagcgtgggagacagagtgaccatcacctgtagagccagcgagaacatctacagcaacctggcctggtatcagcagaagcctggcaaggcccctaagctgctgatctacgccgccaccaatctggctgatggcgtgccaagcagattttccggctctggcagcggcaccgatttcaccctgacaatatccagcctccagcctgaggacttcgccacctactactgccagcacttttggggcacccctacattcggccagggcaccaaggtggaaatcaagagaacagtt

SEQ ID NO: 33039 - DNA, 339 bp, synthetic construct
  source 1..339: mol_type = other DNA
gacttcgtgatgacacagagccctctgagcctgcctgtgacacctggcgaacctgccagcatcagctgtagaagcagccagagcatcgtgcacagcaacggcaacacctacctggaatggtatctccagaagcctggacagagcccacagctgctgatctacaaggtgtccaacagattcagcggcgtgcccgacagattttctggcagcggctctggcaccgacttcaccctgaagattagcagagtggaagccgaggacgtgggcgtgtactactgcttccaaggctctcacgtgcccctgacctttggacagggcaccaagctggaaatcaagaga

SEQ ID NO: 33040 - DNA, 318 bp, synthetic construct
  source 1..318: mol_type = other DNA
gacatccagctgactcagagccctagctttctgagcgccagcgtgggcgacagagtgaccatcacatgtagcgccagatccagcatcagcttcatgtactggtatcagcagaagcccggcaaggcccctaagctgctgatctacgacaccagcaatctggcctctggcgtgcccagcagattttctggaagcggcagcggcaccgagttcaccctgacaatctctagcctggaagccgaggatgccgccacctactattgccagcagtggtccagctatcccctgacatttggacagggcaccaagctggaaatcaaa

SEQ ID NO: 33041 - DNA, 336 bp, synthetic construct
  source 1..336: mol_type = other DNA
cagctggtgctgacacagtctccaagcgcctctgccagcctgggatctagcgtgaagctgacctgtacactgagcagcggccacaagaccgacaccatcgactggtatcagcagcagcctggcaaggcccctagatacctgatgaagctggaaggcagcggcagctacaacaaaggctctggcgtgcccgatagattcagcggcagttcttctggcgctgattggtatctgaccatcagcagcctccagagcgaggacgaggccgattactactgcggcacagactaccccggcaactacctgtttggcggcggaacacagctgacagtgcttggc

SEQ ID NO: 33042 - DNA, 324 bp, synthetic construct
  source 1..324: mol_type = other DNA
gatatccagctcactcaaagcccctctagtctctctgcctcagtgggggatcgggtcagttttacttgtcaagcttcacaggatatcaacaacttccttaattggtatcagcagaagccaggaaaagcacccaagctgctcatctatgatgcctcaaatttggagacgggtgttcccagtcgattctctgggtcagggtccgggaccgactttacgtttacgatctcctctctgcagcccgaagacatcgccacatactattgtcaacagtacggcaacttgcctttcacatttgggggcgggactaaggttgaaatcaagagg

SEQ ID NO: 33043 - DNA, 324 bp, synthetic construct
  source 1..324: mol_type = other DNA
gatattcaactgacacaatcccccagctcactcagcgccagcgtgggggacagggttagctttacctgtcaagcctctcaggatataaataactttctgaactggtatcaacagaagcctgggaaggcgcccaaactcctgatctatgatgcgtccaacctggaaactggcgtgccttcacgctttagcggctctggcagtggtacagacttcacttttaccatctcttcacttcagccggaggacatcgccacatattactgtcaacagtacggaaacttgccctttacttttggaggcggcaccaaagttgaaatcaaaaga

SEQ ID NO: 33044 - DNA, 324 bp, synthetic construct
  source 1..324: mol_type = other DNA
gacattcagatgacccaaagcccgtccagcctgtccgccagcctgggagatagagtgacaatcacgtgtagagcttcccaagggataagaaatgatctcgggtggtatcagcagaagcccggcaaagcccccaaaaggcttatatatgctagtagtacactgcagtctggagttccttcccgattttcaggtagcggctccggtacagagttcaccctcacgataagctcactccagcctgaggatttcgcaacgtactactgcctccagcacaacaattttccctggactttcggccagggcaccaaggtggagatcaagagg

SEQ ID NO: 33045 - DNA, 327 bp, synthetic construct
  source 1..327: mol_type = other DNA
gagattgtgttgacacagtctcccgataccctgtcactgtcacccggcgagaaggcaacgctgagttgcagagcaagccagtcagtctcctcttcttttctggcctggtatcagcaaaaaccaggtcaggcaccatctctcctgatttacgttgccagcagacgggcggctggcattcccgacaggttctctggaagcggatctgggaccgattttaccctgacaattagccgcttggagcccgaagactttggtatgttttactgccagcactacggaaggacacctttcacatttggcccgggcacgaaagtcgatataaaacgc

SEQ ID NO: 33046 - DNA, 324 bp, synthetic construct
  source 1..324: mol_type = other DNA
gacatccaactgactcagagccccagctttctgagcgcctctgtgggcgacagagtgaccatcacatgtagagccagccagggcatcagcagctacctggcttggtatcagcagaagcctggcaaggcccctaaactgctgatctacgccgccagcacactccagtctggcgtgccaagcagattttctggcagcggctctggcaccgagttcaccctgacaatatccagcctccagcctgaggacttcgccacctactactgccagcaagtgaacagctaccctctgacctttggcggaggcaccaaggtggaaatcaagaga

SEQ ID NO: 33047 - DNA, 336 bp, synthetic construct
  source 1..336: mol_type = other DNA
cagtctgctctgacccagcctagatccgtgtctggctctcctggacacagcgtgaccatcagctgtaccggcacctcttccgacgtgggcgactacaattacgtgtcctggtatcagcagaggcccggcaaggtgccaaagctgctgatctacgacgtgtccaagaggccaagcggcgtgcccgatagattttccggcagcaagtctggcaacaccgccagcctgacaatctctggactgcaagccgaggacgaggccatctacttttgtgccagctacgccggcaactacaacgtggtgtttggcggaggcaccaagctgacagtgcttggacaa

SEQ ID NO: 33048 - DNA, 324 bp, synthetic construct
  source 1..324: mol_type = other DNA
gacatccagatgacacagagccctagcagcctgtctgccagcgtgggagacagagtgaccatcacatgtagcgccagccagggcatcaacaactacctgaactggtatcagcagaagcccggcaaggcccctaagctgctgatccactacacatctggactgcacgctggcgtgcccagcagattttctggctctggcagcggcaccgactacaccctgacaatatctagcctccagcctgaggacgtggcaacctactactgccagcagtacagcatcctgccttggacctttggcggaggcaccaaggtggaaatcaagaga

SEQ ID NO: 33049 - DNA, 339 bp, synthetic construct
  source 1..339: mol_type = other DNA
gacattcagatgacacagagccctagcagcctgagcgcctctgtgggagacagagtgaccatcacatgcaagagcagccagagcgtgctgtactccagcaatcagaagaactacctggcctggttccagcagaagcctggcaaggctcctaagctgctgatctactgggccagcaccagagaaagcggcgtgccaagcagattttctggcagcggctctggcaccgacttcaccctgacaatatccagcctccagcctgaggacttcgccacctacttttgccaccagtacctgagcagctacacattcggacagggcaccaaggtggaaatcaagcgg

SEQ ID NO: 33050 - DNA, 324 bp, synthetic construct; identical to SEQ ID NO: 351
  source 1..324: mol_type = other DNA

SEQ ID NO: 33051 - DNA, 327 bp, synthetic construct
  source 1..327: mol_type = other DNA
gacatccagatgacacagagccctagcagcctgtctgccagcgtgggagacagagtgaccatcacctgtaccgccagcagcagagtgtccagcagctacctgcactggttccagcagaagcctggcaaggcccctaagctgctgatctacagcaccagcaatctggcctctggcgtgcccagcagattttctggctctggcagcggcaccgacttcaccctgacaatatctagcctccagcctgaggacttcgccacctactactgccaccagtaccacagaagcccctacacattcggccagggcaccaaggtggaaatcaagaga

SEQ ID NO: 33052 - DNA, 318 bp, synthetic construct
  source 1..318: mol_type = other DNA
gacatccagatgacacagagccctagcagcctgtctgccagcgtgggagacagagtgaccatcacatgtagcgccagcagcagcgtgacctacatgtactggtatcagcagaagcccggcaaggcccctaagctgctgatctacgacaccagcaatctggcctctggcgtgcccagcagattttctggctctggcagcggcaccgactacaccctgacaatatctagcctccagcctgaggacttcgccacctactactgccagcagtggtccaactatcccctgacattcggccagggcaccaaggtggaaatcaaa

SEQ ID NO: 33053 - DNA, 321 bp, synthetic construct
  source 1..321: mol_type = other DNA
gagatcgtgctgacacagagcccttctagcctgtctgccagcgtgggcgacagagtgaccatcacatgtagagccagcgagaacatctacagctacctggcctggtatcagcagaagcctggcaaggcccctaagctgctgatctacaacaccaagacactcggcgagggcgtgcccagcagattttctggttctggcagcggcaccgacttcaccctgaccatatctagcctgcagcctgaggacttcgccacctactactgccagcaccactacggcacccctttcacatttggccctggcaccaaggtggacatcaaa

SEQ ID NO: 33054 - DNA, 321 bp, synthetic construct
  source 1..321: mol_type = other DNA
caaattgtgctgacacagagccccgccatcatgagcgcttctccaggcgagaaagtgaccatgacctgtagcgccagcagctccgtgtcttacatgcactggtatcagcagaagtccggcacaagccccaagcggtggatctacgataccagcaaactggcctccggcgtgcccgatagattttctggcagcggcagcggaaccagctacttcctgaccatcaacaacatggaagccgaggacgccgccacctactactgccagcagtggaacatcaaccctctgacctttggagccggcaccaagctggaactgaagaga

SEQ ID NO: 33055 - DNA, 324 bp, synthetic construct
  source 1..324: mol_type = other DNA
gacatccagatgacacagagcagcgcctacctgagcgtgtcccttggaggcagagtgaccatcacatgcaaggccagcgaccacatcaacaactggctggcctggtatcagcacaagcccggcaatgcccctagactgctgatctctggcgctaccacactggaaacaggcgtgcccagcagattttctggcagcggctctggcaaggactacaccctgagcatcaccagcctccagaccgaggatgtggctacctactactgccagcagagctggaacaccccttggacatttggcggaggcaccaagctggaaatcaagaga

SEQ ID NO: 33056 - DNA, 324 bp, synthetic construct; identical to SEQ ID NO: 19768
  source 1..324: mol_type = other DNA

SEQ ID NO: 33057 - DNA, 327 bp, synthetic construct
  source 1..327: mol_type = other DNA
gagatcgtgctgacacagagccctggcacactgtcactgtctccaggcgaaagagccacactgagctgtagagccagccagagcgtgtccagctcttacctggcttggtatcagcagaagcccggacaggctcccagactgctgatctacggtgcctctagcagagccacaggcatccccgatagattttctggcagcggctccggcaccgacttcaccctgacaatcagcagactggaacccgaggacttcgccgtgtactactgccagcagtaccaccactctccactgacctttggcggaggcaccaaggtggaaatcaagaga

SEQ ID NO: 33058 - DNA, 324 bp, synthetic construct
  source 1..324: mol_type = other DNA
gagatcgtgctgacacagagccctggcacactgtcactgtctccaggcgaaagagccacactgagctgtagagccagccagagcgtgtccagcgattacctggcttggtatcagcagaagcccggacaggctcccagactgctgatctatggtgcctctcggagagccacaggcatccccgatagattttctggcagcggctccggcaccgacttcaccctgacaatcagcagactggaacccgaggacttcgccgtgtactactgccagcagtacgtgtcctactggacctttggcggaggcaccaaggtggaaatcaagaga

SEQ ID NO: 33059 - DNA, 327 bp, synthetic construct
  source 1..327: mol_type = other DNA
gacatccagatgacacagagccctagcagcctgtctgccagcgtgggagacagagtgaccatcacctgtagagccagccaggacgtgaacacagccgtggcttggtatcagcagaagcctggcaaggcccctaagctgctgatctacagcgccagctttctgtacagcggcgtgcccagcagattcagcggaagcagaagcggcaccgacttcaccctgacaatatccagcctccagcctgaggacttcgccacctactactgccagcagcactacaccacacctccaacattcggccagggcaccaaggtggaaatcaagagaaca

SEQ ID NO: 33060 - DNA, 321 bp, synthetic construct
  source 1..321: mol_type = other DNA
gatattcagatgacacagagccccagcagcgtgtccgcctctgtgggagatagagtgaccatcacctgtagagccagccagggcatcacaagatggctggcctggtatcagcagaagccaggcaaggcccctaagctgctgatctacgccgcttctgtgctccagagcggagtgcctagcagattttctggcagcggctccggcaccgatttcaccctgacaatatccagcctccagcctgaggacttcgccacctactactgccagcagagcaacagcttccccagaacattcggacagggcaccaaggtggaaatcaag

SEQ ID NO: 33061 - DNA, 321 bp, synthetic construct
  source 1..321: mol_type = other DNA
gatattcagatgacacagagccccagcagcgtgtccgcctctgtgggagatagagtgaccatcacctgtcgggccagccaggacattagcagatggctggcttggtatcagcagaagccaggcaaggcccctaagctgctgatttcagccgccagcagactccagagcggagtgcctagcagattttctggctctggcagcggcaccgacttcaccctgacaatatctagcctccagcctgaggacttcgccatctactattgccagcaggccaagagcttccccagaacatttggacagggcaccaaggtggaaatcaag

SEQ ID NO: 33062 - DNA, 336 bp, synthetic construct
  source 1..336: mol_type = other DNA
gataccgtgatgacccagacacctctgagcagccacgtgacacttggacagcctgccagcatcagctgtagaagcagccagagcctggtgcacagcgacggcaatacctacctgtcttggctccagcagaggccaggacagcctcctagactgctgatctaccggatcagcagacggttcagcggcgtgcccgatagattttctggaagcggagccggcaccgacttcaccctggaaatcagcagagtggaagccgaggatgtgggcgtctactactgtatgcagagcacccacgtgccacggacctttggacagggcaccaaggtggaaatcaag

SEQ ID NO: 33063 - DNA, 321 bp, synthetic construct
  source 1..321: mol_type = other DNA
gatattcagctgactcagagccccagcttcctgtctgcctctgtgggcgacagagtgaccatcacatgttgggccagccagggcatcaacaactacctggcctggtatcagcagaagcccggcaaggctcctaagctgctgatctacgccgccagcacactgcaaacaggcgtgccaagcagattttccggctctggcagcggcaccgagttcaccctgacaatatctagcctccagcctgaggacttcgccacctactactgccagcagctgaacagctaccctctgacctttggaggcggcaccaaggtggaaatcaag

SEQ ID NO: 33064 - DNA, 324 bp, synthetic construct
  source 1..324: mol_type = other DNA
gaaattgtgctgacacagagccccggcacactgtcactttctccaggcgaaagagccacactgagctgtagagccagccagagcgtgaacaagaactacctggcttggtatcagcagaagcccggacaggctcccagactgctgatctacggtgcctctagcagagccacaggcatccccgatagattttctggcagcggctccggcaccgacttcaccctgacaatcagcagactggaacccgaggacttcgccgtgtattattgccagcagtacgacagaagccctctgacctttggaggcggcaccaaggtggaaatcaag

SEQ ID NO: 33065 - DNA, 336 bp, synthetic construct
  source 1..336: mol_type = other DNA
gatgtggtcatgacacagacccctctgagcctgcctgtgacacttggacagcctgccagcatcagctgtagatccagccagagcctggtgtacagagatggcaacacctacctgagctggttccagcagaggcctggacagtctcctcggcggctgatctacaaggtgtccaactggcagagcggcgtgcccgatagattttctggcggtggcagcggcaccgacttcaccctgaagatcagcagagtggaagccgaggacgtgggcgtgtactactgtatgcagggcacacactggcctccaacattcggccagggaacaaaggtggaaatcaag

SEQ ID NO: 33066 - DNA, 318 bp, synthetic construct
  source 1..318: mol_type = other DNA
atcgtgatgacccagactcctaagttcctgctggtgtctgccggcgacagagtgaccatcacctgtaaagccagccagagcgtgaacaacgacgtgtcctggttccagcagaagcccggccaatctcctacactgctgatctactacgccagcaacagatacaccggcgtgcccgatagattcaccggctctggctacggcaccgacttcacctttaccatcagcaccgtgcaggccgaggacctggctgtgtacttctgccagcaagactacagcagcccttacacctttggaggcggcaccaagctggaaatcaag

SEQ ID NO: 33067 - DNA, 318 bp, synthetic construct
  source 1..318: mol_type = other DNA
gacattcagatgacacagagccctagcagcctgagcgcctctgtgggagacagagtgacaattacctgtcgggccagccagtctatcaacaactacctgaactggtatcagcagaagcccggcaaggcccctacactgctgatctatgccgccagctctctccagagcggagtgcctagcagattcagcggaagcagaagcggcaccgacttcaccctgacaatatccagcctccagcctgaggacttcgccgcctacttttgccagcagacctacagcaaccccacctttggccagggcaccaaggtggaagtgaag

SEQ ID NO: 33068 - DNA, 324 bp, synthetic construct
  source 1..324: mol_type = other DNA
agctacgagctgacacagcctccaagcgtgtccgtgtctcctggacagacagccagcatcacctgtagcggcgataagctgggcgataagtacgccagctggtatcagcagaagcccggccagtctcctgtgctggtcatctaccaggacaacagaaggcccagcggcatccccgagagattcagcggcagcaatagcggcaataccgccacactgaccatcagcggcacccaggctatggacgaggccgactactattgccaggcttgggacagcgacacctacgtgttcggcaccggcaccaaagtgacagtgcttggacaa

SEQ ID NO: 33069 - DNA, 321 bp, synthetic construct
  source 1..321: mol_type = other DNA
gatattcagatgacacagagccccagcagcctgtctgcctctgtgggagacagagtgaccatcacctgtagagccagccagagcatcagcagctacctgaactggtatcagcagaagcccggcaaggcccctaaactgctgatctatgccgcctccagtctgcagagcggagtgcctagcagattttctggctctggcagcggcaccgacttcaccctgacaatatctagcctgcagcctgaggacttcgccacctactactgccagcagagctacatcacccctctgacattcggtggcggcaccaaggtggaaatcaag

SEQ ID NO: 33070 - DNA, 339 bp, synthetic construct
  source 1..339: mol_type = other DNA
gacatcgtgctgacacagagccctgcttctctggccgtgtctcttggacagggcgctaccatcagctgtagagccagcaagagcgtgtccaccagcggctacacctacatgcactggtatcagcagaagcccggccagcctcctaagctgctgatctacctggcctccaacctggaaagcggagtgcctgccagattttctggcagcggctctggcaccgacttcaccctgaatatccatcctgtggaagaagaggacgccgccacctactactgtcagcactctggcgaactgccacctagctttggcggaggcaccaagctggaaatcaagagagct

SEQ ID NO: 33071 - DNA, 336 bp, synthetic construct
  source 1..336: mol_type = other DNA
gacatccagatgacacagagccctagcagcctgtctgccagcgtgggagacagagtgaccatcacatgtagcgccagccagggcatcagaaactacctgaactggtatcagcagaaacccggcaaggtgcccaagctgctgatctactacaccagcagactgcacagcggcgtgcccagcagattttctggctctggcagcggcaccgacttcaccctgacaatatctagcctccagcctgaggacgtggcaacctactactgtcagcagtacggcaagctgccctacacattcggccagggcaccaagctggaaatcaagagaacagtggctgcc

SEQ ID NO: 33072 - DNA, 348 bp, synthetic construct
  source 1..348: mol_type = other DNA
gacatcgtgatgacacagagccccgatagcctggccgtgtctctgggagaaagagccaccatcaactgtagagccggcgagagcgtggacatcttcggcgtgggatttctgcactggtatcagcagaagcccggccagcctcctaagctgctgatctacagagccagcaacctggaaagcggcgtgcccgatagattttctggcagcggctctggcaccgacttcaccctgacaatcagacctctccaggccgaggatgtggccgtgtattattgccagcagaccaacgaggacccctacacatttggacagggcaccaagctggaaatcaagagaacagtggccgcc

SEQ ID NO: 33073 - DNA, 336 bp, synthetic construct
  source 1..336: mol_type = other DNA
gacatcgtgctgacacagtctcccgccacactgtcactgtctccaggcgaaagagccacactgagctgtagagccagccagaacatcgtgttcaacctggcctggtatcagcagaagcctggacaggctccccggctgctgatctacgatgccagcaatagagccaccggcgtgcccgccagattttctggttctggcagcggcaccgacttcaccctgaccatatctagcctggaacctgaggacttcgccgtgtactactgccagcagaaaaagtccatgcctctgaccttcggccagggcaccaaggtggaaatcaagagaacagtggctgcc

SEQ ID NO: 33074 - DNA, 339 bp, synthetic construct
  source 1..339: mol_type = other DNA
cagacagtggtcacccaagagcctagcctgacagtgtctcctggcggaaccgtgacactgacatgtggcagttctaccggcgctgtgaccaccagcaattacgccaactgggtgcagcagaagccaggccaagctcctagaggactgatcggcggcacaaacaagagagcccctggcacaccagccagattttctggctctctgctcggcggaaaggccgctcttacactgtctggtgtccagcctgaggacgaggccgagtattattgcgccctgtggtacagcaacctgtgggttttcggcggaggcaccaagctgacagtgctgactgttgctgct

SEQ ID NO: 33075 - DNA, 342 bp, synthetic construct
  source 1..342: mol_type = other DNA
gaaattgtgctgacacagagccccggcacactgtcactttctccaggcgaaagagccacactgagctgtagagccagccagagcgtgtccagctcttacctggcttggtatcagcagaagcccggccaggctcctagactgctgatctacggtgccagcagcagagccacaggcatccccgatagattttctggcagcggctccggcaccgacttcaccctgacaatcagcagactggaacccgaggactttgccgtgtattattgccagcagtacaccaacgagcactactacaccttcggccagggcaccaaggtggaaatcaagagaacagtggccgcc

SEQ ID NO: 33076 - DNA, 339 bp, synthetic construct
  source 1..339: mol_type = other DNA
gagatcgtgctgacacagtctcccgccacactgtcactgtctccaggcgaaagagccacactgagctgtagcgtgtccagcagcatcagcagcagcaacctgcactggtatcagcagaagcctggacaggcccctcggctgctgatctacggcacatctaatctggcctctggcatccccgccagattttctggctctggaagcggcaccgacttcaccctgaccataagcagcctggaacctgaggacttcgccgtgtactactgccagcagtggtccagctatccccacacatttggcggaggcaccaaggtggaaatcaagagaacagtggctgcc

SEQ ID NO: 33077 - DNA, 336 bp, synthetic construct
  source 1..336: mol_type = other DNA
gacatccagatgacacagagccctagcagcctgtctgccagcgtgggagacagagtgaccatcacctgtaaagccggccagaacgtgggcacaagcgtggcatggtatcagcagaagcctggcaaggcccctaagctgctgatctacagcgccagctacagatacagcggcgtgcccagcagattttctggcagcggctctggcaccgacttcaccctgacaatatccagcctccagcctgaggacttcgccacctactactgccagcagtacatcacatacccctacaccttcggccagggcaccaaggtggaaatcaagagaacagtggctgcc

SEQ ID NO: 33078 - DNA, 336 bp, synthetic construct
  source 1..336: mol_type = other DNA
gacatccagatgacacagagccctagcagcctgtctgccagcgtgggagacagagtgaccatcacatgtagcgccagccaggacatcggcaactttctgaactggtatcagcagaagcccggcaaggcccctaagctgctgatctactacacctccagcctgtacagcggcgtgcccagcagattttctggcagcggctctggcaccgacttcaccctgacaatatccagcctccagccagaggacttcgccacctactactgccagcagtacagcaagctgcccctgacctttggacagggcaccaagctggaaatcaagagaacagtggctgcc

SEQ ID NO: 33079 - DNA, 336 bp, synthetic construct
  source 1..336: mol_type = other DNA
gatgtgcaagtgacacagagccctagcagcctgtctgcctctgtgggcgacagagtgacaatcacctgtcggagcagccagagcctggctaactcctacggcaataccttcctgagctggtatctgcacaagcccggaaaggctccccagctgctgatctacggcatcagcaacagattcagcggcgtgcccgataggtttagcggctctggaagcggcaccgacttcaccctgacaatatccagcctccagcctgaggactttgccacctactactgtctgcaaggcacccaccagccttacacattcggacagggcaccaaggtggaaatcaag

SEQ ID NO: 33080 - DNA, 321 bp, synthetic construct
  source 1..321: mol_type = other DNA
gacatccagatgacacagagccctagcagcctgtctgccagcgtgggagacagagtgaccatcacctgtagagccagccaggacatcagcaactacctgaactggtatcagcagaaacccggcaaggccgtgaagctgctgatctactacaccagcatcctgcacagcggcgtgcccagcagattttctggctctggcagcggcaccgactacaccctgacaatatctagcctccagcctgaggacttcgctacctacttctgccagcaaggcaacaccctgccttggacatttggcggaggcaccaaggtggaaatcaaa

SEQ ID NO: 33081 - DNA, 324 bp, synthetic construct
  source 1..324: mol_type = other DNA
gacatccagatgacacagagccctagcagcctgtctgccagcgtgggagacagagtgaccatcacctgtagagccagccaggacatcagcaactacctgaactggtatcagcagaagcccggcaaggcccctaagctgctgatctactacaccagcatcctgcacagcggcgtgcccagcagattttctggctctggcagcggcaccgacttcaccctgacaatatctagcctccagcctgaggacttcgccacctactattgccagcagggcaacaccctgccttggacctttggacagggcaccaaggtggaaatcaagaga

SEQ ID NO: 33082 - DNA, 324 bp, synthetic construct; identical to SEQ ID NO: 32026
  source 1..324: mol_type = other DNA

SEQ ID NO: 33083 - DNA, 324 bp, synthetic construct
  source 1..324: mol_type = other DNA
agctacgtgctgacacagcctccatccgtgtctgtggctccaggacagaccgccagaatcacatgcggcggcaacaacatcggcagcaagagcgtgcactggtatcagcagccacctggacaggctccagtggtggtggtgtacgacgacagcgatagacctagcggcatccccgagagattcagcggcagcaattccggcaataccgccacactgaccatcagcagagtggaagctggcgacgaggccgtgtactactgccaagtgtgggacagcagcagcgatcacgtggtgtttggcggcggaacaaagctgacagtgctt

SEQ ID NO: 33084 - DNA, 324 bp, synthetic construct
  source 1..324: mol_type = other DNA
gacatccagatgacacagagccctagcagcctgtctgccagcgtgggagacagagtgaccatcacctgtatggcctccgaggacatctacatccggctggcctggtatcagcagaagcctggaaaggcccctaagctgctgatctacgccgccacctctctggaaacaggcgtgccaagcagattttccggcagcggctctggcaccgatttcaccctgaccataagcagcctgcagcctgaggacttcgccacctactactgccagcagtattggagcagcccctggacctttggacagggcaccaaggtggaaatcaagaga

SEQ ID NO: 33085 - DNA, 336 bp, synthetic construct
  source 1..336: mol_type = other DNA
gacatccagatgacacagagccctagcagcgtgtccgcctctgtgggagacagagtgaccatcacctgtagagccagcgagagcgtggacaactacggcatcagcttcatgaactggtatcagcagaagcccggcaaggcccctaagctgctgattagcgccgccagcaatagagccacaggcgtgccaagcagattttccggctctggcagcggcaccgatttcaccctgacaatatccagcctccagcctgaggacttcgccatctactactgccagcagagcaaagaggtgccctggacctttggacagggcaccaaggtggaaatcaagaga

SEQ ID NO: 33086 - DNA, 336 bp, synthetic construct
  source 1..336: mol_type = other DNA
gacatccagctgacacagagcccttctagcctgtctgccagcgtgggcgacagagtgaccatcacatgtagagccagcaagagcgtgtccaccagcggctacagctacatgcactggtatcagcagaagcccggcaaggcccctaagctgctgatctacctggtgtccaacctggaaagcggcgtgcccagcagattttctggcagcggctctggcaccgacttcaccctgacaatatccagcctccagcctgaggacttcgccacctactactgccagcagttcagcgagctgccttggacctttggacagggcaccaaggtggaaatcaagaga

SEQ ID NO: 33087 - DNA, 327 bp, synthetic construct
  source 1..327: mol_type = other DNA
gacatccagatgacacagagccctagcagcgtgtccgcctctgtgggagacagagtgaccatcacctgtcgggccagccagttcatcagcagcagctacctgagctggtatcagcagaagcctggcaaggcccctaagctgctgatctctggcagctctagcagagccacaggcgtgccaagcagattttctggcagcggctctggcaccgacttcaccctgacaatatccagcctccagcctgaggacttcgccatctactactgccagcagctgtactctagccccatgacattcggccagggcaccaaggtggaaatcaagaga

SEQ ID NO: 33088 - DNA, 321 bp, synthetic construct; identical to SEQ ID NO: 32055
  source 1..321: mol_type = other DNA

SEQ ID NO: 33089 - DNA, 339 bp, synthetic construct
  source 1..339: mol_type = other DNA
gacatcgtgatgacacagagccctgatagcctggccgtgtctctgggagagagagccaccatcaactgcaagagcagccagagcgtgctgtactccagcaacaacaagaactacctggcctggtatcagcagaagcccggccagcctcctaagctgctgatctactgggccagcaccagagaaagcggcgtgcccgatagattttctggcagcggctctggcaccgacttcaccctgacaattagcagcctccaggccgaggatgtggccgtgtactactgccagcagtattacagcacccctctgaccttcggccagggcaccaaggtggaaatcaaa

SEQ ID NO: 33090 - DNA, 324 bp, synthetic construct
  source 1..324: mol_type = other DNA
gacatccagatgacacagagccctagcagcctgtctgccagcgtgggagacagagtgaccatcacctgtagagccagccagagcatcaacaagtggctgaactggtatcagcagaagcccggcaaggcccctaagctgctgatctatgccgccagctctctccagagcggagtgcctagcagattttctggcagcggctccggcaccgatttcaccctgacaatatccagcctccagcctgaggacttcgccacctactactgccagcaggactacaacttcccctacaccttcggccagggcaccaaggtggaaatcaaaaga

SEQ ID NO: 33091 - DNA, 321 bp, synthetic construct
  source 1..321: mol_type = other DNA
gatattcagctgacccagagccacaagtttctgagcaccagcgtgggcgacagagtgtccatcacctgtaaagccagccaggacgtgtacaacgccgtggcctggtatcagcagaagcctggacagagccccaagctgctgatctacagcgccagcagcagatacacaggcgtgcccagcagattcaccggctctggatctggccccgacttcacctttaccatcagctctgtgcaggccgaggacctggccgtgtacttttgtcagcagcacttcagaacccctttcaccttcggcagcggcaccaagctggaaatcaag

SEQ ID NO: 33092 - DNA, 318 bp, synthetic construct
  source 1..318: mol_type = other DNA
gacatccagctgacacagagcccttctagcctgtctgccagcgtgggcgacagagtgaccatcacctgtaaagccagccaggacgtgggcacaagcgtggcatggtatcagcagaagcctggcaaggcccctaagctgctgatctactggaccagcaccagacacacaggcgtgcccagcagattttctggcagcggctctggcaccgacttcaccttcacaatatccagcctccagcctgaggacattgccacctactactgccagcagtacagcctgtaccgctctttcggccagggcaccaaggtggaaatcaaa

SEQ ID NO: 33093 - DNA, 315 bp, synthetic construct
  source 1..315: mol_type = other DNA
gacatccagctgacacagagcccttctagcctgtctgccagcgtgggcgacagagtgaccatcacctgtagcacaagcagcagcgtgtcctacatgcactggtatcagcagaagcccggcaaggcccctaagctgctgatctacagcaccagcaatctggcctctggcgtgcccagcagattttctggctctggcagcggcaccgacttcaccttcacaatatccagcctccagcctgaggacattgccacctactactgccaccagtggtctagctaccccacattcggccagggcaccaaggtggaaatcaaa

SEQ ID NO: 33094 - DNA, 327 bp, synthetic construct; identical to SEQ ID NO: 353
  source 1..327: mol_type = other DNA

SEQ ID NO: 33095 - DNA, 333 bp, synthetic construct
  source 1..333: mol_type = other DNA
gagatcgtgctgacacagagccctggcacactgtcactgtctccaggcgaaagagccacactgagctgtagagccagccagagcgtgtccagcgattacctggcttggtatcagcagaagcccggacaggctcccagactgctgatctacggtgcctctagcagagccacaggcatccccgatagattttctggcagcggctccggcaccgacttcaccctgacaattagcagactgcccgaggacttcgccgtgtactactgccagcagtacgtgtcctactggacctttggcggaggcaccaaggtggaaatcaaaagaacagtggctgcc

SEQ ID NO: 33096 - DNA, 327 bp, synthetic construct
  source 1..327: mol_type = other DNA
agctacgagctgatccagcctccttctgccgctgtgacactgggcaataccgtgtctctgacctgtgtgggagatgagctgcccaagagatacgcctactggtatcagcagaagcccgaccagagcatcgtgcgcgtgatctacgaagatagcgtgcggcctcctggcatcagcgatagattttctggcagcagcagcggcaccaccgccacactgacaattagagatgcccagaacgaggacgaggccgactactactgtcagagcacctacggcgacgacaagctgtacatctttggcggaggcaccaagctgacagtgcttgga

SEQ ID NO: 33097 - DNA, 327 bp, synthetic construct
  source 1..327: mol_type = other DNA
agcgtgatcgagctgacacagagccccaagttcatgagcaccagcgtgggcgacagagtgaacgtgacatacaaggccagccagaacgtgggcaccaacgtggcatggttccagcagaagcctggacagagccctaaggtgctgatctacagcgccagctacagatacagcggcgtgcccgatagattcacaggctctggcagcggcaccgacttcaccctgacaatcagcaacgtgcagagcgaggacctggccgagtatttctgccagcagtaccacacataccctctgacctttggcggaggcaccaagctggaaatcaagaga

SEQ ID NO: 33098 - DNA, 324 bp, synthetic construct
  source 1..324: mol_type = other DNA
gacatccagatgacacagagccctagcagcgtgtccgcctctgtgggagacagagtgaccatcacctgtagagccagccagagcgtgtccagctacctgaactggtatcagcagaagcccggcaaggcccctaagctgctgatctatgctgccagctctctgcagtctggcgtgcccagcagattttctggcagcggctctggcaccgacttcaccctgaccatatctagcctgcagcctgaggacttcgccacctactactgccagcagagctacagcaccccttggacctttggacagggcaccaagctggaaatcaagaga

SEQ ID NO: 33099 - DNA, 333 bp, synthetic construct
  source 1..333: mol_type = other DNA
cagtctgctctgacccagcctagatccgtgtctggctctcctggacagagcgtgaccatcagctgtaccggcacctcttctgacgtgggcagctacaactacgtgtcctggtatcagcagagccccggcaaggcccctaagctgatgatctacgacgtgtccaacagacccagcggcgtgtccaatagattctccggcagcaagagcggcaacaccgccagcctgacaatctctggactccagtctgaggacgaggccgactactactgtaccagctacggcagctacgacatccccgtgatttttggcggaggcaccaaggtggaaatcaaa

SEQ ID NO: 33100 - DNA, 324 bp, synthetic construct
  source 1..324: mol_type = other DNA
gacgtggtcatgacacagagcccttctagcctgtctgccagcgtgggcgacagagtgaccatcacctgtaaagccagccagagcgtgtccagctacctgaactggtatcagcagaagcccggcaaggcccctaagctgctgatctatgctgccagcagcctggaaacaggcgtgcccagcagattttctggcagcggctctggcaccgacttcaccctgacaatatccagcctccagcctgaggacttcgccacctactactgtcagcagagctacagcaccccttggacctttggccagggcaccaaggtggaaatcaagaga

SEQ ID NO: 33101 - DNA, 324 bp, synthetic construct
  source 1..324: mol_type = other DNA
gacatccagatgacacagagccctagcagcgtgtccgcctctgtgggagacagagtgaccatcacctgtagagccagccagagcatcagcagctacctgaactggtatcagcagaagcccggcaaggcccctaaactgctgatctatgccgccagctctctccagagcggagtgcctagcagattttctggcagcggctccggcaccgatttcaccctgacaatatccagcctccagcctgaggacttcgccacctactactgccagcagagctacagcaccccttggacctttggacagggcaccaaggtggaaatcaagaga

SEQ ID NO: 33102 - DNA, 321 bp, synthetic construct
  source 1..321: mol_type = other DNA
gacacagtgctgacacagtctccagctctggctgtgtctcctggcgagagagtgaccatctcttgcaaggccagcgagagcgtgtccaccagaatgcactggtacagacagaagcccggccagcagccaaagctgctgatctacaagaccagcaacctggcctctggcgtgccagccagattttctggctctggcagcggcaccgacttcaccctgaccattgatcccgtggaagccgacgacaccgccacctacttttgtcagcagtcctggaacggccctctgacatttggaagcggcaccaagctggaaatcaagaga

SEQ ID NO: 33103 - DNA, 342 bp, synthetic construct
  source 1..342: mol_type = other DNA
gacctggtcatgacacagagcccttttagcctggccgtgtccgagggcgagatggtcacaatcaagtgcaagagcagccagagcctgctgagcagcagacaccagaagaactttctggcctggtacagacagaagcccggacagtctcccaagctgctgatctaccacgccagcacaagacagagcggcgtgcccgatagattcatcggctctggcagcggcaccgacttcaccctgacaatctctgatgtgcaggccgaggacctggccgactactattgtctccagcactacacaagcccctacacctttggagccggcaccaagctggaactgaaaaga

SEQ ID NO: 33104 - DNA, 327 bp, synthetic construct
  source 1..327: mol_type = other DNA
gacatccagctgactcagagccctagctttctgagcgccagcgtgggcgacagagtgaccattacatgtagagccagccaggacatcagcagctacctggcctggtatcagcagaagcctggcaacgcccctaaactgctgatctacgccgccagcctgctgcaatctggcgtgccaagcagattcagcgcctttggcagcggcaccgagttcaccctgacaatatctagcctccagccagaggacttcgccacctactactgccagcacctgaagtcttaccctctgttcaccttcggacccggcaccaaggtggacatcaaaaga

SEQ ID NO: 33105 - DNA, 321 bp, synthetic construct
  source 1..321: mol_type = other DNA
gaactccagatgacacagagccctagcagcctgtctgccagcgtgggagacagagtggctatcacctgtagagccagccagagcatcagcagccacctgaactggtatcagcagaagcctggcaaggcccctaagctgctgatctatgccgccagctctctccagagcggagtgcctagcagattttctggcagcggctccggcaccgatttcaccctgacaatatccagcctccagcctgaggacttcgccacctactactgccagcagagctacagcaccccttacacattcggccagggcaccaagctggaaatcaaa

SEQ ID NO: 33106 - DNA, 324 bp, synthetic construct
  source 1..324: mol_type = other DNA
gacatcgtgatgacccagagccacaagttcatgagcaccagcgtgggcgacagagtgtccatcatctgcaaggccagccaggatgtgggcacagccgtggattggtatcagcagaagcctggacagagccccaagctgctgatctactgggccagcacaagacacaccggcgtgcccgatagattcacaggctctggcagcggcaccgatttcaccctggccatcacaaacgtgcagagcgaggacctggccgactacttctgccagcagtacaacagctaccctctgacctttggagccggcaccaagctggaaatcaagaga

SEQ ID NO: 33107 - DNA, 324 bp, synthetic construct; identical to SEQ ID NO: 352
  source 1..324: mol_type = other DNA

SEQ ID NO: 33108 - DNA, 324 bp, synthetic construct; identical to SEQ ID NO: 352
  source 1..324: mol_type = other DNA

SEQ ID NO: 33109 - DNA, 324 bp, synthetic construct; identical to SEQ ID NO: 33106
  source 1..324: mol_type = other DNA

SEQ ID NO: 33110 - DNA, 321 bp, synthetic construct
  source 1..321: mol_type = other DNA
gagatcgtgctgacacagtctcccgccacactgtcactgtctccaggcgaaagagccacactgagctgtagcgccaccagcagcgtgtcctacatccactggtatcagcagaagcccggacaggcccctagactgctgatctacagcaccagcaatctggcctctggcatccccgccagattttctggctctggaagcggcaccgacttcaccctgacaatcggcagactggaacccgaggacttcgccgtgtactactgccagcagagaagcagcagccccttcacctttggacagggcaccaaggtggaaatcaagaga

SEQ ID NO: 33111 - DNA, 318 bp, synthetic construct
  source 1..318: mol_type = other DNA
cagatcgtgctgacacagagccctgccatcatgagtgcctctccaggcgaggaagtgaccctgacctgtagcgccaccagcagcgtgtcctacatccactggtttcagcagaggcccggcacaagccctaagctgtggatctacagcaccagcaatctggcctctggcgtgccagtgcggtttagcggatctggctacggcaccagctacagcctgaccatcagcagaatggaagccgaggatgccgccacctactactgccagcagagaagcagcagccccttcacatttggcagcggcaccaagctggaaatcaaa

SEQ ID NO: 33112 - DNA, 339 bp, synthetic construct
  source 1..339: mol_type = other DNA
gacatcgtgctgacacagagccctgcttctctggccgtttctcctggacagagggccaccatcacatgcagagccagcaagagcgtgtccaccagcggctacagctacatgcactggtatcagcagaagcccggccagcctcctaagctgctgatctacctggcctccaacctggaaagcggagtgcctgccagattttctggcagcggctctggcaccgacttcaccctgacaatcaaccccgtggaagccaacgacaccgccaactactactgccagcacagcagagagctgcccttcacatttggcggaggcaccaaggtggaaatcaagagaaca

SEQ ID NO: 33113 - DNA, 324 bp, synthetic construct
  source 1..324: mol_type = other DNA
gacatccagatgacacagagccctagcagcctgtccgtgtccgtgggagacagagtgaccatcacatgcaaggccagccagaacgtgcggacagtggtggcttggtatcagcagaagcctggactggcccctaagacactgatctacctggcctccaacagacacaccggcgtgccaagcagattttctggcagcggctctggcaccgacttcaccttcacaatatccagcctccagcctgaggacattgccacctacttttgccagcagcactggtcttaccctctgacctttggacagggcaccaaggtggaagtgaagaga

SEQ ID NO: 33114 - DNA, 339 bp, synthetic construct
  source 1..339: mol_type = other DNA
gacattcagatgacacagagccctagcagcctgagcgcctctgtgggagacagagtgaccatcacatgcaagagcagccagagcctgctgtactccagcaatcagaagaactacctggcctggttccagcagaagcctggcaaggctcctaagctgctgatctactgggccagcaccagagaaagcggcgtgccaagcagattttctggcagcggctctggcaccgacttcaccctgacaatatccagcctccagcctgaggacttcgccacctacttttgccaccagtacctgagcagctacacattcggacagggcaccaaggtggaaatcaagcgg

SEQ ID NO: 33115 - DNA, 339 bp, synthetic construct; identical to SEQ ID NO: 33049
  source 1..339: mol_type = other DNA

SEQ ID NO: 33116 - DNA, 339 bp, synthetic construct; identical to SEQ ID NO: 33114
  source 1..339: mol_type = other DNA

SEQ ID NO: 33117 - DNA, 324 bp, synthetic construct; identical to SEQ ID NO: 351
  source 1..324: mol_type = other DNA

SEQ ID NO: 33118 - DNA, 324 bp, synthetic construct
  source 1..324: mol_type = other DNA
gacatccagatgacacagagccctagcagcctgtctgccagcgtgggagacagagtgaccatcacctgtagagccagccaggacatcagcagctacctgaactggtatcagcagaagcccggcaaggcccctaagctgctgatctactacaccagcagactgcacagcggcgtgcccagcagattttctggctctggcagcggcaccgacttcaccctgacaatatctagcctccagcctgaggacttcgccacctactattgccagcagggcaacaccctgccttacacatttggacagggcaccaaggtggaaatcaagaga

SEQ ID NO: 33119 - DNA, 324 bp, synthetic construct
  source 1..324: mol_type = other DNA
gacatccagatgacacagagccctagcagcctgtctgccagcgtgggagacagagtgaccatcacctgtagagccagccaggacatcagcaactacctgaactggtatcagcagaagcccggcaaggcccctaagctgctgatctactacaccagcagactgcacagcggcgtgcccagcagattttctggctctggcagcggcaccgacttcaccctgacaatatctagcctccagcctgaggacttcgccacctactattgccagcagggcaacaccctgccttggacatttggacagggcaccaaggtggaaatcaagaga

SEQ ID NO: 33120 - DNA, 324 bp, synthetic construct; identical to SEQ ID NO: 354
  source 1..324: mol_type = other DNA

SEQ ID NO: 33121 - DNA, 375 bp, synthetic construct
  source 1..375: mol_type = other DNA
gggggaggcggctctcaggtgcaactccagcagtctggcgctgagcttgtgaagcctggggccagcgtgaagattagctgcaaggccagcggctacgccttcagcagctactggatgaactgggtcaagcagcggcctggcaagggcctggaatggatcggccaaatctaccccggcgacggcgacaccacctacaacggcaagttcaagggcaaggccaccctgacagccgacaagagcagcagcaccgtgtacatgcaactgaacagcctgaccagcgaggacagcgccgtgtacttctgcgtgcggtactactacggcagctccggctacttcgactattggggccagggcaccacactgaccgtgtcctct

SEQ ID NO: 33122 - DNA, 360 bp, synthetic construct
  source 1..360: mol_type = other DNA
gctctccagctccagcagtctggcgcagaactcgtgcggcctggcgcttctgtgaccctgagctgtaaagccagcggctacaccttcaccgactacgagatgcactgggtcaagcagacccctgtgcacggcctggaatggatcggagccatcgaccctgagacaggcggcaccgcctacaaccagaagttcgagggcaaggccatcctgaccgccgacaagagcagcagcacagcctacatggaactgcggagcctgacctccgaggacagccccgtgtactactgtgccagacggcggtactacggcagcagctccttcgactattggggccagggcaccaccctgaccgtgtctagt

SEQ ID NO: 33123 - DNA, 351 bp, synthetic construct; identical to SEQ ID NO: 19785
  source 1..351: mol_type = other DNA

SEQ ID NO: 33124 - DNA, 363 bp, synthetic construct
  source 1..363: mol_type = other DNA
caggtgcagctggtccagagcggcgccgaagtgaagaagcccggcagctccgtgaaagtgagctgcaaggccagcggcggcaccttcagcaactactggatgcactgggtgaggcaggcccccggacagggcctggagtggatgggcgccacctacaggggccacagcgacacctactacaaccagaagttcaagggccgggtgaccatcaccgccgacaagagcaccagcaccgcctacatggaactgagcagcctcaggagcgaggacaccgctgtgtattactgcgccaggggcgccatctacgacggctacgacgtgctggacaactggggccagggcacactggtgaccgtgtccagc

SEQ ID NO: 33125 - DNA, 360 bp, synthetic construct
  source 1..360: mol_type = other DNA
gaagtgcagctggtgcagtctggggccgaagtgaagaagcctggcgagagcctgaagatcagctgcaagggcagcggctacagcttcaccgactactacatgaagtgggccagacagatgcccggcaagggcctggaatggatgggcgacatcatccccagcaacggggccaccttctacaaccagaaattcaagggccaagtgaccatctccgccgacaagagcatcagcaccacctacctccagtggtccagcctgaaggccagcgacaccgccatgtactattgcgccagaagccatctgctgcgggccagttggttcgcctattggggccagggaacaatggtcacagtgtccagc

SEQ ID NO: 33126 - DNA, 366 bp, synthetic construct
  source 1..366: mol_type = other DNA
caggtgcaactccagcagtccggaagcgagcttatgatgccaggggcatcagtgaagatcagctgcaaggctactggctacaccttctctaattactggatagagtgggttaaacaaaggccagggcacggcctggaatggatcggcgagatcctgcctgggacaggccgaaccatttataacgagaagttcaaaggcaaggctactttcaccgcagatataagctctaatacagtgcaaatgcagctctcttccctgacaagtgaggatagtgccgtgtattattgcgcacgaagagattactatggaaatttttattacgctatggattattggggtcaaggaacaagtgtgaccgttagcagc

SEQ ID NO: 33127 - DNA, 354 bp, synthetic construct
  source 1..354: mol_type = other DNA
gaagtgcaactccagcagagcggccctgagcttgtgaagcctggcgcttccgtgaagatgagctgcaaggccagcggctacaccttcaccgactactacatgaagtggatgaagcagagccacggcaagtccctggaatggatcggcgacatcaaccccaacaacggcggcaccacctacaaccagaagttcaagggcaaggccaccctgaccgtggacaagagcagcagcaccgcctacatgcaactgaacagcctgaccagcgaggacagcgccgtgtactactgcgccagagactacggctacggctatttcgactactggggccagggcacaaccctgacagtgtcctct

SEQ ID NO: 33128 - DNA, 360 bp, synthetic construct
  source 1..360: mol_type = other DNA
caggtgcagctccaggaatctggccctggcctcgtgaagcctagccagaccctgagcctgacctgtaccgtgtctggcggcagcatcagcacaagcggcatgggcgtgggctggatcagacagcaccctggcaagggcctggaatggatcggccacatttggtgggacgacgacaagcggtacaaccccgccctgaagtccagagtgaccatcagcgtggacaccagcaagaaccagttcagcctgaagctgagcagcgtgacagccgccgataccgccgtgtattattgcgcccggatggaactgtggtcctactacttcgactactggggccagggaaccctcgtgaccgtgtctagt

SEQ ID NO: 33129 - DNA, 360 bp, synthetic construct
  source 1..360: mol_type = other DNA
gaggtgaaactgcaggagtcaggacctggcctggtggcgccctcacagagcctgtccgtcacatgcactgtctcaggggtctcattacccgactatggtgtaagctggattcgccagcctccacgaaagggtctggagtggctgggagtaatatggggtagtgaaaccacatactataattcagctctcaaatccagactgaccatcatcaaggacaactccaagagccaagttttcttaaaaatgaacagtctgcaaactgatgacacagccatttactactgtgccaaacattattactacggtggtagctatgctatggactactggggtcaaggaacctcagtcaccgtctcctca

SEQ ID NO: 33130 - DNA, 360 bp, synthetic construct
  source 1..360: mol_type = other DNA
caggtgcaactccaggaatctggccctggcctcgtgaagcccagcgagacactgagcctgacctgtaccgtgtccggcgtgtccctgcctgactatggcgtgtcctggatcagacagccccctggcaagggcctggaatggatcggagtgatttggggcagcgaaaccacctactacaacagctccctgaagtccagagtgaccatctccaaggacaactccaagaaccaggtgtccctgaagctgagcagcgtgacagccgccgacaccgccgtgtattactgcgccaagcactactactacggcggcagctacgctatggactactggggccagggaaccctcgtgaccgtgtctagt

SEQ ID NO: 33131 - DNA, 366 bp, synthetic construct
  source 1..366: mol_type = other DNA
gaagtgcagctggtggaatcaggcggcggactggtgcagcctggcagaagcctgagactgagctgtgccgccagcggcttcaccttcaacgactacgccatgcactgggtgcgccaggcccctggaaaaggactggaatgggtgtccacaatcagctggaacagcggcagcatcggctacgccgatagcgtgaagggccggttcaccatcagccgggacaacgccaagaagtccctgtacctccagatgaacagcctgcgggccgaggacacagccctgtactattgcgccaaggacatccagtacggcaactactactacggcatggacgtgtggggccagggaaccaccgtgaccgtgtcatct

SEQ ID NO: 33132 - DNA, 357 bp, synthetic construct
  source 1..357: mol_type = other DNA
caggtgcaactggtgcagagcggagccgaagtgaaaaagcccggcagcagcgtgaaggtgtcctgcaaggccagcggctacgccttcagctactcctggatcaactgggtgcgccaggcccctggacagggcctggaatggatgggcagaatcttccccggcgacggcgacaccgactacaacggcaagttcaagggcagagtgaccatcaccgccgacaagagcaccagcaccgcctacatggaactgagcagcctgcggagcgaggataccgccgtgtactattgtgccagaaacgtgttcgacggctactggctggtgtactggggccagggaacacttgtgaccgtgtccagc

SEQ ID NO: 33133 - DNA, 360 bp, synthetic construct
  source 1..360: mol_type = other DNA
gaagtgcaactggtggaaagcggaggcggcctggtgcagcctggcggatctctgagactgagctgtgccgccagcggctacgagttcagccggtcctggatgaactgggtgcgccaggcccctggcaagggactggaatgggtgggaagaatctaccccggcgacggcgacaccaactacagcggcaagttcaagggccggttcaccatcagcgccgacaccagcaagaacaccgcctacctccagatgaacagcctgcgggccgaggataccgccgtgtactactgtgccagagatggcagctcctgggactggtacttcgacgtgtggggacagggaacccttgtgaccgtgtccagc

SEQ ID NO: 33134 - DNA, 351 bp, synthetic construct
  source 1..351: mol_type = other DNA
caggtgcaactggtgcagagcggagccgaagtgaagaaacccggcagcagcgtgaaggtgtcctgcaaggcttccggcggcaccttcagcagctacgccatttcttgggtgcgccaggctcctggacagggcctggaatggatgggcggcatcatccctatcctgggcaccgccaactacgcccagaaattccagggcagagtgaccatcaccgccgacgagagcaccagcaccgcctacatggaactgagcagcctgcggagcgaggacacagccgtgtattattgcgccagatggggcggaggggccttcgacatttggggccagggaacaatggtcaccgtgtccagc

SEQ ID NO: 33135 - DNA, 336 bp, synthetic construct
  source 1..336: mol_type = other DNA
caggtgcaactgcagcagtggggagccggactgctgaagcctagcgagacactgagcctgacctgcgccgtgtacggcggcagcttcagcgcctactattggagctggatcagacagccccctggcaagggcctggaatggatcggcgacatcaatcacggcggaggcaccaactacaaccccagcctgaagtcccgcgtgaccatctccgtggacaccagcaagaaccagttctccctgaagctgaacagcgtgacagccgccgacacagccgtgtactactgtgccagcctgaccgcctattggggccagggatctcttgtgaccgtgtccagc

SEQ ID NO: 33136 - DNA, 351 bp, synthetic construct
  source 1..351: mol_type = other DNA
caggtgcaactggtgcagtccggcgctgaagtgaagaaacctggggccagcgtgaaggtgtcctgcaaggtgtccggctacacctttaccgactactacattacctgggtgcgccaggcccctggacaggccctggaatggatgggctggatctaccccggcagcggcaacaccaagtacagccagaagttccagggcagattcgtgttcagcgtggacaccagcgccagcaccgcctacctgcaactgtctagcctgaaggccgaagataccgccgtgtactactgcgccaactacggcaactattggttcgcctattggggccagggaacccttgtgaccgtgtcctct

SEQ ID NO: 33137 - DNA, 357 bp, synthetic construct
  source 1..357: mol_type = other DNA
gaagtgcaactggtgcagtctggcggagggctggtgcatcctgggggaagcctgagactgagctgtgccggctctggcttcgccttcagcagcagcaccatgcactggatcagacaggcccctggcaagggcctggaatggatcagcctgatcggaagcggagggggcatctactacggcgacagcgtgaagggccggttcaccatcagccgggacaacgccaagaacagcctgtacctccagatgaactccctgcgggccgaggacatggccgtgtactattgtgtgcggggctacttcgactgggtggactacttcgattactggggccagggcaccctcgtgaccgtgtcatct

SEQ ID NO: 33138 - DNA, 360 bp, synthetic construct
  source 1..360: mol_type = other DNA
gaagtgcaactggtggaatcaggcggcggactggtgcagcctggcggatctctgagactgagctgtgccgccagcggcttcaccttcagcagctacggaatgcactgggtgcgccaggcccctggcaaaggactggaatgggtggcctacatcaccaccagaagcagcaccatctactacgccgacagcgtgaagggccggttcaccatctccagagacaacgccaagaacagcctgtacctccagatgaactccctgcgggccgaggacaccgccgtgtactattgcaccagagagcccctgaccggctactacgctatggactattggggccagggcaccagcgtgaccgtgtctagt

SEQ ID NO: 33139 - DNA, 348 bp, synthetic construct
  source 1..348: mol_type = other DNA
gatgtgcaactccaggaaagcggccctggccttgtgaagcctagccagagcctgtccctgacctgtaccgtgaccggcttcagcatcaccagcgactactcttggaactggatcagacagttccctggcaacaaactggaatggatgggctacatcagctactccggccacacctcctacaaccccagcctggaaagccggatctccatcaccagagacaccagcaagaaccagttcttcttgcaactgaacagcgtgaccaccgaggataccgccacatattactgtaccagaggcaactgggacgtggtgtactggggccagggcacacttgtgaccgtgtctgct

SEQ ID NO: 33140 - DNA, 354 bp, synthetic construct
  source 1..354: mol_type = other DNA
caggtgcaactgcagcagcctggcgctgaggtcgtgaagccaggcgcttccgtgaagatgtcctgcaaggccagcggctacaccttcaccagctactacatccactggatcaagcagacccctggacagggcctggaatgggtgggagtgatctaccccggcaacgacgacatcagctacaaccagaagttccagggcaaggccaccctgaccgccgacaagtctagcaccaccgcctacatgcaactgtccagcctgaccagcgaggacagcgccgtgtactactgcgccagagaagtgcggctgcggtacttcgatgtgtggggccagggaaccaccgtgaccgtgtcatct

SEQ ID NO: 33141 - DNA, 366 bp, synthetic construct
  source 1..366: mol_type = other DNA
caggtgcagctggtgcagagcggtgccgaagtgaagaaaccaggtgcatccgttaaagtttcatgtaaggctagtggatataccttcaccaattacggaatgaactgggtgaaacaggcccctggccagggactgaagtggatggggtggattaacacctacaccggggagccgacttatgcagacgactttaaggggcgggtcacgatgacctccgacacctccaccagtaccgcctacctggagctgcacaaccttaggtcagacgataccgccgtgtattactgtgcccgatggtcttggtccgacggatactatgtctacttcgactattggggccaggggaccacagttaccgtgtcctct

SEQ ID NO: 33142 - DNA, 366 bp, synthetic construct
  source 1..366: mol_type = other DNA
cagatccaactggtgcagagcggcagcgagctgaagaaacctggggccagcgtgaaggtgtcctgcaaggccagcggctacacctttaccaactacggcatgaactgggtgcgccaggcccctggacagggcctgaaatggatgggctggatcaacaccaacaccggcgagcctaagtacgccgaagagttcaagggcagattcgccctgagcctggacaccagcgtgtccacagcctacctccagatcaacagcctgaaggccgaggataccgccgtgtacttctgcgccagaggctacggcaactacgccagaggggcttggctggcctattggggccagggaacactcgtgaccgtgtcctct

SEQ ID NO: 33143 - DNA, 363 bp, synthetic construct
  source 1..363: mol_type = other DNA
caggtgcagctgaaagagagcggccctgagctggaaaagcctggggccagcgtgaagattagctgcaaggccagcggctacagcttcaccgcctacagcatgaactgggtcaagcagaacaacggcatgagcctggaatggatcggcagcatcgacccctactacggcgacaccaaatacgcccagaagttcaagggcaaggccaccctgaccgtggataaggccagcagcaccgcctacctccagctgaagtctctgaccagcgaggacagcgccgtgtactactgcgccagacggatgattaccaccggcgactggtacttcgacgtgtggggagccggaaccaccgtgacagtgtctagc

SEQ ID NO: 33144 - DNA, 363 bp, synthetic construct; identical to SEQ ID NO: 33143
  source 1..363: mol_type = other DNA

SEQ ID NO: 33145 - DNA, 354 bp, synthetic construct
  source 1..354: mol_type = other DNA
caggtgcagctggtgcagtctggggccgaagtgaagaaacctggggccagcgtgaaggtgtcctgcaaggccagcggatacacctttaccaactacggcatgaactgggtgcgccaggcccctggacagggcctggaatggatgggctggatcaacacctacaccggcgagcccacatacgccgacgccttcaagggcagattcgccttcagcctggacaccagcacctccaccgcctacctccagatcaacagcctgcggagcgacgacaccgccgtgtattattgcgccagagattacggcgactacgggatggactattggggccagggaaccaccgtgaccgtgtcctct

SEQ ID NO: 33146 - DNA, 339 bp, synthetic construct
  source 1..339: mol_type = other DNA
caggtgcaactgcagcagcctggcgctgaacttgtgcggccaggcgcctctgtgaagctgagctgtaaagccagcggctacaccttcaccagctactggatgaactgggtcaagcagcgcccaggccagggcctggaatggatcggaatgatcgaccccagcgacagcgagacacactacaaccacatcttcaaggacaaggccaccctgaccgtggacaagtccagcagcacagcctacctgcaactgtccagcctgaccagcgaggacagcgccgtgtactactgcgcccggaacctgtatctgtggggccagggaacaagcgtgaccgtgtctagc

SEQ ID NO: 33147 - DNA, 351 bp, synthetic construct; identical to SEQ ID NO: 32091
  source 1..351: mol_type = other DNA

SEQ ID NO: 33148 - DNA, 369 bp, synthetic construct
  source 1..369: mol_type = other DNA
gaagtgcaactccagcagagcgtggccgagcttgtgaagcctggcgcttccgtgaagatgtcctgcaaggtgtccggctacaccctgacagaccacaccatccactggatgaagcagcggcctgagcagggcctggaatggatcggctacatctaccccagggacggcatcaccggctacaacgagaagttcaagggcaaggccacactgaccgccgacaccagcagcagcacagcctacatgcaactgaacagcctgaccagcgaggacagcgccgtgtacttctgtgccagatggggctacagctacagaaactacgcctactactacgactactggggccagggcacaaccctgaccgtgtctagt

SEQ ID NO: 33149 - DNA, 375 bp, synthetic construct
  source 1..375: mol_type = other DNA
caggtgcaactccaggaatctggccccggactggctaagcccagcgagacactgagcctgacctgtaccgtgtccggcgacagcatcaccagctactactggtcctggatcagacagccccctggcaagggcctggaatggatcggctacatctactacagcggcagcaccaactacaaccccagcctgaagtccagagtgaccatcagcgtggacaccagcaagaaccagttctccctgaagctgagcagcgtgacagccgccgacaccgccgtgtattattgcgccagagatcagcggagaatcgccgctgccggcacccacttttacggcatggatgtgtggggccagggcaccaccgtgaccgtgtcatct

SEQ ID NO: 33150 - DNA, 348 bp, synthetic construct
  source 1..348: mol_type = other DNA
caggtgcaactgctggaatctggcggcggactggtgcagcctggcggatctctgagactgagctgtgccgccagcggcttcaccttcagcagctacgccatgagctgggtgcgccaggcccctggaaaaggactggaatgggtgtccgtgatccggtccagcggcagcagcacctattacgccgatagcgtgaagggccggttcaccatcagccgggacaacagcaagaacaccctgtacctccagatgaacagcctgcgggccgaggacaccgccgtgtactattgtgctaggggaggcggctacttcgactactggggccagggaacactcgtgaccgtgtcctct

SEQ ID NO: 33151 - DNA, 354 bp, synthetic construct
  source 1..354: mol_type = other DNA
caggtgcaactgctggaatctggcggcggactggtgcagcctggcggatctctgagactgagctgtgccgccagcggcttcaccttcagcagccacggaatgcactgggtgcgccaggcccctggaaagggactggaatgggtgtccgtgatctccggcagcggcagcaataccggctacgccgatagcgtgaagggccggttcaccatcagccgggacaacagcaagaacaccctgtacctccagatgaacagcctgcgggccgaggacaccgccgtgtactattgtgccagacagtggggcagctacgccttcgattcttggggccagggcaccctcgtgaccgtgtcatct

SEQ ID NO: 33152 - DNA, 354 bp, synthetic construct
  source 1..354: mol_type = other DNA
caggtgcagctggaagagtctggacccgagcttgtgaagcctggggccagcgtgaagctgtcctgtaaagccagcggctacaccttcaccgagtacatcatccactgggtcaagcagcggagcggccagggcctggaatggatcggctggttttaccctggctccggcagcatcaagtacaacgagaagttcaaggacaaggccaccctgaccgccgacaagtccagcagcaccgtgtacatggaactgagcggcctgaccagcgaggacagcgccgtgtatttctgcgccagacacgacggctacagctacttcgactattggggccagggcaccacactgaccgtgtcctct

SEQ ID NO: 33153 - DNA, 345 bp, synthetic construct
  source 1..345: mol_type = other DNA
gaatctggaagaggactggtgcagcctggcggcagcagaaagctgtcttgtgccgccagcggcttcaccttcagcaccagcggaatgcactgggtgcgccaggcccctgagaagggactggaatgggtggcctacatcagctccggcagcaccaccatctaccacgccgataccgtgaagggccggttcaccatcagccgggacaaccccaagaataccctgttcctccagatgaccagcctgcggagcgaggacaccgccatgtactattgctgcgccagaagcggccagttcggcaactacttcgactactggggccagggcaccaccctgaccgtgtcatct

SEQ ID NO: 33154 - DNA, 360 bp, synthetic construct
  source 1..360: mol_type = other DNA
gaggtgcaactgcagcagtctggccccgagcttgtgaagcctggcgcctccgtgaagatgagctgcaaggccagcggctacacctttaccagctacttcatccactgggtcaagcagaaacccggccagggcctggaatggatcggcttcatcaacccttacaacgacggcagcaagtacaacgagaagttcaagggcaaggccaccctgaccagcgacaagagcagcagcaccgcctacatggaactgtccagcctgacatccgaggacagcgccgtgtactactgcaccagggacgacggctactacggctacgccatggactactggggccagggaacaagcgtcaccgtgtcctct

SEQ ID NO: 33155 - DNA, 360 bp, synthetic construct
  source 1..360: mol_type = other DNA
gaagtgcaactccagcagagcggccctgagcttgtgaagcctggcgcttccgtgaagatgagctgcaaggccagcggctacaccttcaccagctacgtgatgcactgggtcaagcagaaacctggacagggcctggaatggatcggctacatcaacccctacaacgacggcaccaagtacaacgagaagttcaagggcaaggccaccctgacaagcgacaccagcagcagcaccgcctacatggaactgaacagcctgaccagcgaggacagcgccgtgtacttctgcgccagacccatctacttcgacaacgactacttcgattactggggccagggcaccaccctgaaggtgtcctct

SEQ ID NO: 33156 - DNA, 357 bp, synthetic construct
  source 1..357: mol_type = other DNA
gaagtgcaactggtggaatcaggcggcggactggtgcagcctggcggatctctgagactgagctgtgccgccagcggcttcgacttcagccggtactggatgagctgggtgcgccaggcccctggcaaaggactggaatggatcggcgagatcaaccccgacagcagcaccatcaactacgcccccagcctgaaggacaagttcatcatcagccgggacaacgccaagaacagcctgtacctccagatgaactccctgcgggccgaggacaccgccgtgtactattgcgccagacccgacggcaactactggtacttcgacgtgtggggccagggaaccctcgtgaccgtgtcatct

SEQ ID NO: 33157 - DNA, 360 bp, synthetic construct
  source 1..360: mol_type = other DNA
caggtgcagctgcagcagcccggcgccgagctggtgagacccggcgccagcgtgaagctgagctgcaaggccagcggctacagcttcaccacctactggatgaactgggtgaagcagagacccggccagggcctggagtggatcggcatgatccaccccagcgacagcgagaccagactgaaccagaagttcaaggacaaggccaccctgaccgtggacaagagcagcagcaccgcctacatgcagctgagcagccccaccagcgaggacagcgccgtgtactactgcgccagaagcaccatgatcgccaccagagccatggactactggggccagggcaccagcgtgaccgtgagcagc

SEQ ID NO: 33158 - DNA, 360 bp, synthetic construct
  source 1..360: mol_type = other DNA
caggtgcaactggtgcagagcggagccgaagtgaagaaacctggggccagcgtgaaggtgtcctgcaaggtgtccggctacaccctgaccgagctgagcattcactgggtgcgccaggcccctggcaagggactggaatggatgggcggcttcgaccccgaagagaacgagatcgtgtacgcccagcggttccagggcagagtgacaatgaccgaggacaccagcaccgacaccgcctacatggaactgagcagcctgcggagcgaggataccgccgtgtactactgtgccatcgtgggcagcttcagcggaatcgcctacagaccttggggccagggcacaatggtcaccgtgtctagc

SEQ ID NO: 33159 - DNA, 360 bp, synthetic construct
  source 1..360: mol_type = other DNA
caggtgcaactggtgcagagcggagccgaagtgaagaaacctggggccagcgtgaaggtgtcctgcaaggtgtccggctacaccctgaccgagctgagcattcactgggtgcgccaggcccctggcaagggactggaatggatgggcggcttcgaccccgaagagaacgagatcgtgtacgcccagcggttccagggcagagtgacaatgaccgaggacaccagcaccgacaccgcctacatggaactgagcagcctgcggagcgaggataccgccgtgtactactgcgccatcgtgggcagcttcagccctctgacactgggcctgtggggccagggaactatggtcaccgtgtccagc

SEQ ID NO: 33160 - DNA, 372 bp, synthetic construct
  source 1..372: mol_type = other DNA
cagatcaccctgaaagagtccggccccaccctcgtgaagcctacccagaccctgacactgacctgcaccttcagcggcttcagcctgagcacaagcggcatgggcgtgggctggatcagacagcctcctggaaaggccctggaatggctggcccacatttggtgggacgacgtgaagcggtacagccccagcctgaagtcccggctgaccattaccaaggacaccagcaagaaccaggtggtgctgaccatgacaaacatggaccccgtggacaccgccacatattactgcgcccggatcgtgtccttcgacaacgacgtggtgtccgctatggactactggggccagggaaccctcgtgaccgtgtctagt

SEQ ID NO: 33161 - DNA, 354 bp, synthetic construct
  source 1..354: mol_type = other DNA
caggtgcaactggtgcagagcggagccgaagtgaagaaacctggggccagcgtgaaggtgtcctgcaaggccagcggctacacctttaccaactacggcatgaactgggtgcgccaggctcctggacagggcctggaatggatgggctggatcaacacctacaccggcgagcccacctacgccgacgacttcaagggcagagtgaccatgaccaccgacaccagcacctccaccgcctacatggaactgcggagcctgagaagcgacgacaccgccgtgtattattgcgcccggatcggcgacagcagccccagcgattattggggccagggaaccctcgtgaccgtgtcctct

SEQ ID NO: 33162 - DNA, 357 bp, synthetic construct
  source 1..357: mol_type = other DNA
caggtgcagctgaagcagagcggacctggcctggtgcagcctagccagagcctgtccatcacctgtaccgtgtccggcttcagcctgaccaactacggcgtgcactgggtgcgccagagccctggaaaaggactggaatggctgggagtgatttggagcggcggcaacaccgactacaacacccccttcaccagcagactgtctatcaacaaggacaacagcaagagccaggtgttcttcaagatgaacagcctccagagcaacgacaccgccatctactactgtgctagagccctgacctactatgactacgagttcgcctactggggccagggcacactcgtgacagtgtctgct

SEQ ID NO: 33163 - DNA, 342 bp, synthetic construct
  source 1..342: mol_type = other DNA
gagatccagctggtgcagagcggagccgaagtgaagaagcctggcgagagcctgcggatcagctgcaagggcagcggcttcaacatcgaggactactacatccactgggtgcgccagatgcccggcaagggcctggaatggatgggcagaatcgaccccgagaacgacgagactaagtacggccccatcttccagggccacgtgaccatcagcgccgacaccagcatcaacaccgtgtacctccagtggtccagcctgaaggccagcgacaccgccatgtactactgcgcctttagaggcggcgtgtactggggccagggcaccacagtgacagtgtctagc

SEQ ID NO: 33164 - DNA, 381 bp, synthetic construct
  source 1..381: mol_type = other DNA
gaggtgcaactgctggaatctgggggcggagtggtgcagcctggcagaagcctgagactgagctgtgccgccagcggcttcaccttcagctcctacggaatgcactgggtgcgccaggcccctggcaaaggactggaatgggtggccgtgatctcctacgacggcagcaacaagtactacgccgacagcgtgaagggccggttcaccatcagccgggacaacagcaagaacaccctgtacctgcagatgaacagcctgcgggccgaggacaccgccgtgtactactgcgccaaggatatgggctggggcagcggctggcggccttactactactacggcatggacgtgtggggccagggcaccaccgtgacagtgtcatct

SEQ ID NO: 33165 - DNA, 360 bp, synthetic construct
  source 1..360: mol_type = other DNA
gaagtgcagctgctggaacagtctggcgccgaacttgtgcggcctggcaccagcgtgaagatcagctgtaaagccagcggctacgccttcaccaactactggctgggctgggtcaagcagaggcctggacacggcctggaatggatcggcgacatctttcccggctccggcaacatccactacaacgagaagttcaagggcaaggccaccctgaccgccgacaagtctagcagcaccgcctacatgcagctgtccagcctgacctttgaggacagcgccgtgtatttctgtgcccggctgcggaactgggacgagcccatggattattggggccagggcaccaccgtgaccgtgtctagt

SEQ ID NO: 33166 - DNA, 372 bp, synthetic construct
  source 1..372: mol_type = other DNA
gtgcacgaggtccagcttgtgcagtccggggcagaggtcaagaagcctggttctagcgtaaaagtgagttgcaaagcctcaggtgggacattttcatcctacgcgatcagttgggttagacaggctcctggtcaagggctggaatggatgggcggaattattccaatcttcggaacagcgaattacgcgcagaagttccagggtagagtaaccatcactgctgacaagtccacctccaccgcatacatggaattgtctagtctccggagcgaggatacggcggtgtattattgtgctacgttcgccctgtttggcttccgcgaacaggctttcgacatctgggggcagggcacgacagtcacggttagtagt

SEQ ID NO: 33167 - DNA, 366 bp, synthetic construct
  source 1..366: mol_type = other DNA
agggcacacctggtgcagtctggcaccgccatgaagaaacctggcgcttccgtcagagtgtcctgtcagacaagcggctacaccttcacagcccacatcctgttctggttcagacaggccccaggcagaggactggaatgggtcggatggatcaagccccagtacggggccgtgaatttcggcggaggcttcagagacagagtgaccctgaccagggacgtgtaccgggaaatcgcctacatggacatccggggcctgaagcctgatgacaccgccgtgtactactgcgccagggatagaagctacggcgacagctcttgggctctcgatgcttggggacagggcacaacagtggtggtgtctgct

SEQ ID NO: 33168 - DNA, 354 bp, synthetic construct
  source 1..354: mol_type = other DNA
caggtccaactggtgcagagcggagccgaggtcgtgaagcctggcgcttccgtgaagattagctgcaaagccagcggctacacctttaccggctactttatgaactgggtcaagcagagccctggccagagcctggaatggatcggcagaatccacccctacgacggcgacaccttctacaaccagaagttccagggcaaggccaccctgacagtggacaagagcagcaacaccgcccacatggaactgctgagcctgaccagcgaggacttcgccgtgtactactgcaccagatacgacggcagccgggctatggactattggggccagggcaccaccgtgaccgtgtctagt

SEQ ID NO: 33169 - DNA, 339 bp, synthetic construct
  source 1..339: mol_type = other DNA
gaagtgcagctggtgcagtctggcgctgaggtggaaaagcctggggccagcgtgaagattagctgcaaggccagcggcagcagcttcaccggctacaacatgaactgggtgcgccagaacatcggcaagagcctggaatggatcggagccatcgacccctactacggcggcaccagctacaaccagaagttcaagggcagagccaccctgaccgtggacaagagcaccagcaccgcctacatgcacctgaagtccctgcggagcgaggacaccgccgtgtactactgtgtgtccggcatggaatattggggccagggcaccagcgtgaccgtgtctagt

SEQ ID NO: 33170 - DNA, 363 bp, synthetic construct
  source 1..363: mol_type = other DNA
caggtgcagctggtggaatctggacctggcgtggtgcagcctggcagaagcctgagaatcagctgtgccgtgtccggcttcagcgtgaccaactacggcgtgcactgggtgcgccagccacctggaaaaggactggaatggctgggcgtgatctgggctggcggcatcaccaactacaacagcgccttcatgtcccggctgaccatctccaaggacaacagcaagaacaccgtgtacctccagatgaacagcctgcgggccgaggacaccgccatgtactactgtgcttccagaggcggccactacggctacgccctggattattggggccagggaaccctcgtgaccgtgtcctctacgcgt

SEQ ID NO: 33171 - DNA, 357 bp, synthetic construct
  source 1..357: mol_type = other DNA
gaagtgaccctggtggaaagcggcggagacttcgtgaagcctggcggctctctgaaggtgtcctgtgccgccagcggcttcgcctttagccactacgccatgagctgggtgcgccagacccctgccaagagactggaatgggtggcctacatcagcagcggcggctccggcacctactactccgatagcgtgaagggccggttcaccatcagccgggacaacgccaagaacaccctgtacctccagatgcggagcctgcggagcgaggacagcgccatgtatttctgcaccagagtgaagctgggcacctattacttcgactcttggggccagggcaccaccctgaccgtgtcatct

SEQ ID NO: 33172 - DNA, 354 bp, synthetic construct
  source 1..354: mol_type = other DNA
gagcaactgaaagagtctggcggcggactgttcaagcccaccgataccctgaccctgacctgcaccgtgtccggcttcagcctgagctactacggcgtgaactgggtgcgccaggcccctggcaatggcctggaatggatcggcacaatcggcggcagcggcgacacctactatgcctcttgggccaagtccagaagcaccatcatcagaaacaccaacgagaacaccgtgaccctgaagatgaccagcctgacagccgccgacaccgccacctacttttgcgtcagatacgccaacatcggctacgagtatttcaacgtgtggggacccggcaccctcgtgaccgtgtcatct

SEQ ID NO: 33173 - DNA, 363 bp, synthetic construct
  source 1..363: mol_type = other DNA
gaagtgcaactggtggaatcaggcggcggactggtgcagcctggcgagtctctgagactgagctgtgtggcctccggcttcaccttcagccggtacaagatgaactgggtgcgccaggcccctggcaagggactggaatgggtgtcctacatcagccgcagcggcagagacatctactacgccgacagcgtgaagggccggttcaccatcagcagagacaacgccaagaacagcctgtacctccagatgaactccctgcgggacgaggacaccgccgtgtactactgtgccggaaccgtgaccacctattactacttcggcatggacgtgtggggccacggcaccaccgtgacagtgtcatct

SEQ ID NO: 33174 - DNA, 348 bp, synthetic construct
  source 1..348: mol_type = other DNA
gaagtgcagctcgttgagtctggcggcggactgattcaacctggcggaagcctgagactgagctgtgccgcttccggcttcaccttcagcaactacgccatgaactgggttcgacaggcccctggcaaaggactggaatgggtgtccaccatcaacggcagaggcagcagcaccatctacgccgattctgtgaagggcagattcaccatcagccgggacaacagcaagaacaccctgtacctccagatgaactccctgagagccgaggacaccgccacctattactgtgcccggtacatcagcagaggactgggcgattcttggggccagggcacactggttacagtg

SEQ ID NO: 33175 - DNA, 351 bp, synthetic construct
  source 1..351: mol_type = other DNA
gaagttcagctggttgaatctggcggcggactggttaagcctggcggatctctgagactgtcttgtgccgccagcggcttcaccttcagcgattactacatgagctggatcagacaggcccctggcaaaggactggaatgggtgtcctacatcagcagcagcggctccaccatctactacgccgatagcgtgaagggcagattcaccatcagccgggacaacgccaagaacagcctgtacctccagatgaactccctgagagccgaggacaccgccgtgtactattgcgccagaggctacggcaaagcctacgatcaatggggccagggcacactggtcaccgtttcttct

SEQ ID NO: 33176 - DNA, 360 bp, synthetic construct
  source 1..360: mol_type = other DNA
gaagtgcaactggtggaatctggcggcggactggtgcagcctggcggatctctgagactgagctgtgccgccagcggcttcaacatcaaggacacctacatccactgggtgcgccaggcccctggaaagggactggaatgggtggcccggatctaccccaccaacggctacaccagatacgccgacagcgtgaagggccggttcaccatcagcgccgacaccagcaagaataccgcctacctccagatgaacagcctgcgggccgaggataccgccgtgtactactgctcaagatggggaggcgacggcttctacgctatggacgtgtggggccagggcacccttgtgaccgtgtcatct

SEQ ID NO: 33177 - DNA, 405 bp, synthetic construct
  source 1..405: mol_type = other DNA
cagccccagctccaggaatctggccccacactggtggaagccagcgagacactgagcctgacctgtgccgtgtccggcgattctaccgccgcctgcaatagcttctggggctgggtgcgccagcctcctggaaagggactggaatgggtgggaagcctgagccactgcgccagctattggaaccggggctggacctaccacaaccccagcctgaagtccagactgaccctggccctggacacccccaagaacctggtgttcctgaagctgaacagcgtgacagccgccgacaccgccacctactactgtgccagatttggcggcgaggtgctgcggtacaccgactggcctaaacctgcctgggtggacctgtggggcagaggaacactcgtgaccgtgtccagc

SEQ ID NO: 33178 - DNA, 384 bp, synthetic construct
  source 1..384: mol_type = other DNA
ctggaacagagcggagccgaagtgaagaaacccggcagcagcgtgcaggtgtcctgcaaagcaagcggcggcaccttctctatgtacggcttcaactgggtgcgccaggctcctggacacggcctggaatggatgggcggcatcatccccatcttcggcacctccaactacgcccagaaattccggggcagagtgaccttcaccgccgaccaggccacaagcaccgcctacatggaactgaccaacctgcggagcgacgacaccgccgtgtattattgcgccagagacttcggccccgactgggaggatggcgacagctacgatggcagcggcagaggcttcttcgacttctggggccagggaacccttgtgaccgtgtcctca

SEQ ID NO: 33179 - DNA, 354 bp, synthetic construct
  source 1..354: mol_type = other DNA
gaagtgcaactgctggaatctggcggcggactggtgcagcctggcggatctctgagactgagctgtgccgccagcggcttcacctttagctggtacagcatgacctgggtgcgccaggcccctggcaaaggactggaatgggtgtccagcatcgtgccctggggcgatttcacccagtacgccgatagcgtgaagggccggttcaccatcagccgggacaacagcaagaacaccctgtacctgcagatgaacagcctgcgggccgaggacaccgccgtgtactattgtgccaagggacctggctggggcagcttcgatctgtggggcagaggaacccttgtgaccgtgtccagc

SEQ ID NO: 33180 - DNA, 348 bp, synthetic construct
  source 1..348: mol_type = other DNA
gaagtgcaactggtggaatctggcggcggactggtgcagcctggcggatctctgagactgagctgtgccgccagcggcttcagcctgaccaaatacggcgtgcactgggtgcgccaggcccctggaaaaggactggaatgggtgggagtgaagtgggctggcggctccaccgactacaacagcgccctgatgagccggttcaccatcagcaaggacaacgccaagaacagcctgtacctccagatgaactccctgcgggccgaggacaccgccgtgtactactgtgccagagatcaccgggacgctatggactactggggccagggaacactcgtgaccgtgtcctct

SEQ ID NO: 33181 - DNA, 366 bp, synthetic construct
  source 1..366: mol_type = other DNA
gaagtgcaactggtggaatcaggcggcggactggtgcagcctggcggatctctgagactgagctgtgccgccagcggcttcaccttcagcagaaacggcatgagctgggtgcgccaggcccctggaaaaggactggaatgggtggcaaccgtgtccagcggcggcagctacatctactacgccgacagcgtgaagggccggttcaccatctccagagacaacgccaagaacagcctgtacctccagatgaactccctgcgggccgaggacaccgccgtgtactattgtgccagacagggcaccaccgccctggctaccagattcttcgatgtgtggggccagggcaccctcgtgaccgtgtcatct

SEQ ID NO: 33182 - DNA, 351 bp, synthetic construct
  source 1..351: mol_type = other DNA
gaagtgcaactggtgcagtccggcggagggctggtgcagagcggaggatctctgagactgagctgcagagccagcggctacaccttcacccggtactggatgctgtgggtgcgccagaggccaggcaagggactggaatgggtggccgagatcaacccccggaacgaccggaccaactacaacgagaagttcaagacccggttcaccatcagcgtggacagaagcaagaacaccctgtacctgcagatggacagcctgcgggccgaggataccgccgtgtacttttgtgctctgggaggcggctacgctatggactactggggccagggaacccttgtgaccgtgtcctct

SEQ ID NO: 33183 - DNA, 354 bp, synthetic construct
  source 1..354: mol_type = other DNA
caggtgcaactggtgcagagcggagccgagcttgtgaagcctggcgcttccgtgaagatgagctgcaaagccagcggctacatcttcaccaactacaacatccactgggtcaagaagtccccaggccagggcctggaatggatcggagccatctaccccggaaacggcgacgccccttacagccagaagttccaggacagagccaccctgaccgccgacaccagcagcagcaccacctacatggaactgagcagcctgaccagcgaggacagcgccgtgtactattgcgtgcgggccaactgggatgtggccttcgcctattggggccagggcacactggtgtccgtgtcctct

SEQ ID NO: 33184 - DNA, 357 bp, synthetic construct
  source 1..357: mol_type = other DNA
caggtgcaactccagcagtctggcgcttccgtgaaggtgtcctgcaaggccagcgaactcgtgcggcctggcacaggctacgccttcaccaattacctgatcgagtgggtcaagcagaggcccggacagggcctggaatggatcggagtgattaacccaggcagcggcggcaccaactacaacgagaagttcaagggcaaggccaccctgaccgccgacaagagcagcagcacagcctacatgcaactgagcagcctgaccagcgacgacagcgccgtgtacttctgcgcccggtacagaagctacgactggtacttcgacgtgtggggagccggcaccaccgtgacagtgtcatct

SEQ ID NO: 33185 - DNA, 357 bp, synthetic construct
  source 1..357: mol_type = other DNA
caggtacagttgaaagaaagcgggcctggactggtagcgccttcccaatctctctccatcacgtgcaccatctctggcttctccctgacttcctatggagttcactgggtgaggcagccccccggcaagggactggaatggctggtcgtcatctggtccgacgggtccacaacctacaactccgctctgaaaagtcggctctctatttctaaagataatagcaagagccaggtgtttctgaaaatgaactctctgcagaccgatgatacggccatttactactgcgcttcacactatggctcaaccttggcattcgcttcctggggccacggaacactggtgaccgtttccgcagcc

SEQ ID NO: 33186 - DNA, 381 bp, synthetic construct
  source 1..381: mol_type = other DNA
gaggtacagctggaggaaagcggtggaggactggtgcaacctggagggtctatgaagctctcttgcgtagcttctgggttcacgttctccaattactggatgaactgggtgcggcagtcccccgagaaaggcctggaatgggtagcagaaattcggttcaagtcccataactatgctacacactttgccgagtctgtcaaaggccggttcactattagtcgagacgacagcaagtcttcagtctacctgcagatgaataacttgcgggcagaggacacaggtatctactactgcaccaggagaatcggcaactccgactatgactggtggtactttgacgtctggggagcaggcaccagcgtgacggtgagttcagcctca

SEQ ID NO: 33187 - DNA, 354 bp, synthetic construct
  source 1..354: mol_type = other DNA
gatgtgcagctccaggaatctggccccggactcgtgaagcctagccagagcctgagcctgacatgcaccgtgaccggctacagcatcaccatcgactacacctggaactggatcagacagttccccggcaacaaactggaatggatgggctacatcacctacagcggcagcaccgactacaaccccagcctgaagtccagaagctccatcaccagagacacctctatgaaccagttcttcttgcagctgaacagcgtgaccaccgaggacaccgccacctactattgcgccagactgggcagaagatacgccctggactattggggccagggcaccagcgtgacagtgtcctct

SEQ ID NO: 33188 - DNA, 354 bp, synthetic construct
  source 1..354: mol_type = other DNA
gatgtgcagctccaggaaagcggccctggcctcgtgaagcctagccagagcctgagcctgacatgcaccgtgaccggctacagcatcaccagcgactacacctggaactggatcagacagttccccggcaacaagctggaatggatgggctacatcacctacagcggcagcaccagctacaaccccagcctgaagtcccggaactccatcaccagagacaccagcaagaaccagttcttcttgcagctgaacagcgtgaccaccgaggacaccgccacctactactgcgccagactgggcagacggtacaccatggactattggggccagggcacctccgtgaccgtgtctagc

SEQ ID NO: 33189 - DNA, 354 bp, synthetic construct
  source 1..354: mol_type = other DNA
gacgtgcagctgcaggagagcggccccggcctggtgaagcccagccagagcctgagcctgacctgcaccgtgaccggctacagcatcaccagcgactacacctggaactggatcagacagttccccggcaacaagctggagtggatgggctacatcacctacagcggcagcaccagctacaaccccagcctgaagagcagaaacagcatcaccagagacaccagcaagaaccagttcttcctgcagctgaacagcgtgaccaccgaggacaccgccacctactactgcgccagactgggcagaagatacacaatggactactggggccagggcaccagcgtgaccgtgagcagc

SEQ ID NO: 33190 - DNA, 360 bp, synthetic construct
  source 1..360: mol_type = other DNA
gaggtgcagctggtggaatctgggggcggcctggtccaacctaagggatcactcaagctctcttgtgcggccagcggattctctttcaatacctatgctatgaattgggtgagacaggcgcccggaaagggcctcgaatggatagcccatatccggtcaaaatcaaacaatttcgcaacctactatgcggactccgtgaaggaccgattttccatctcccgagatgcctccgagaatattctgttcctgcagatgaataacctcaagacagaggacaccgccatgtactactgtgtgcgccagggcggtgactttcccatggattactgggggcaggggaccagcgtgaccgtgagctct

SEQ ID NO: 33191 - DNA, 360 bp, synthetic construct
  source 1..360: mol_type = other DNA
caggtgcaactggtggaatctggcggcggagtggtgcagcctggcagaagcctgagactgagctgtgccgccagcggcttcacctttagcagctacgccatgcactgggtgcgccaggcccctggaaaaggcctggaatgggtggccgtgatctcctacgacggctccaacaagtattacgccgacagcgtgaagggccggttcaccatctccagagacaacagcaagaacaccctgtacctccagatgaacagcctgcgggccgaggacaccgccgtgtactattgtgccagggctcacaacagcagctcttggagcttcgactactggggccagggcaccctcgtgaccgtgtcatct

SEQ ID NO: 33192 - DNA, 372 bp, synthetic construct
  source 1..372: mol_type = other DNA
gaagtgcggctgcagcagtctggccccgacctgattaagcctggggccagcgtgaagatgagctgcaaggccagcggctacaccttcaccggctacgtgatgcactgggtcaagcagaggccaggccagggcctggaatggatcggcttcatcaacccctacaacgacgacatccagagcaacgagcggttccggggcaaggccaccctgaccagcgataagagcagcaccaccgcctacatggaactgagcagcctgacctccgaggacagcgccgtgtactactgtgctaggggagccggctacaacttcgacggggcctacagattcttcgacttttggggccagggcaccacactgaccgtgtcctct

SEQ ID NO: 33193 - DNA, 357 bp, synthetic construct
  source 1..357: mol_type = other DNA
caggtgcaactggtggaaagcggagccgaagtgaagaaacctggggccagcgtgaaggtgtcctgcaaggccagcggctacacctttaccggctactacatgcactgggtgcgccaggctccaggccagggactggaatggatgggccggatcaaccccaatagcggcggcaccaactacgcccagaaattccagggcagagtgaccatgaccagagacaccagcatcagcaccgcctacatggaactgagccggctgagaagcgacgacaccgccgtgtactactgcgccagccctagaggcagaggcagcgccttcgatatttggggccagggcacactcgtgaccgtgtcctct

SEQ ID NO: 33194 - DNA, 354 bp, synthetic construct
  source 1..354: mol_type = other DNA
gaagtgcaactggtggaaagcgggggaggcgtggtgcagccaggcggatctctgagactgagctgtgccgccagcggcttcaccttcagcagctacgccatgagctgggtgcgccaggcccctggaaaaggcctggaatgggtgtccgccatctctggctctggcggcagcacctactacgccgatagcgtgaagggccggttcagcatcagccgggacaacagcaagaacaccctgtacctccagatgaacagcctgcgggccgaggacaccgccgtgtactactgtgccagaaccagaagctccggggccttcgacatctggggccagggaacactcgtgaccgtgtcctct

SEQ ID NO: 33195 - DNA, 357 bp, synthetic construct
  source 1..357: mol_type = other DNA
gaagtgcaactccagcagagcggcccagagcttgtgaagcctggcgcttccgtgaagattagctgcaaagccagcggctacagcttcaccggctacttcatgaactgggtcaagcagagccacggcaagagcctggagtacatcggcagattcaacccctacaacggcgagacactgtacaaccagaagttcaagggcaaggccaccctgaccgtggacaagagcagcagcaccgtgcacatggaactgctgagcgtgaccagcgaggacagcgccgtgtactactgtggcagaagcggcaacgacgacgctatggactattggggccagggcaccagcgtgaccgtgtctagtgct

SEQ ID NO: 33196 - DNA, 348 bp, synthetic construct
  source 1..348: mol_type = other DNA
caggtgcaactccagcagtccgacgccgagcttgtgaagcctggcgcttccgtgaagattagctgcaaggccagcggctacaccttcaccgaccacgccattcactgggtcaagcagaagcccgagcagggcctggaatggatcggctacttcagccccggcaacggcgacatcaagtacaacgagaagttcaagggcaaggccaccctgaccgccgacaagagcagcagcacagcctacatgcaactgaacagcctgaccagcgaggactccgccgtgtacttctgcaagcggagctacggcaactacgactactggggccagggcaccacactgaccgtgtctagt

SEQ ID NO: 33197 - DNA, 348 bp, synthetic construct
  source 1..348: mol_type = other DNA
caggtgcagctggtgcagtctggggccgaagtgaagaaaaccggcagcagcgtgaaggtgtcctgcaaggccagcggctacacctttaccgaccacgccattcacgtgtggcggcaggctccaggacaggccctggaatggatgggccacttcagccccggcaacaccgacatcaagtacaacgacaagttcaagggcagagtgaccctgaccgtggaccgcagcatgagcaccgcctacatggaactgagcagcctgcggagcgaggacaccgccatgtactattgcaagaccagcaccttctttttcgactactggggccagggaacaatggtcaccgtgtccagc

SEQ ID NO: 33198 - DNA, 363 bp, synthetic construct
  source 1..363: mol_type = other DNA
cagatccaactggtgcagagcggccacgaagtgaagaaacctggggccagcgtgaaggtgtcctgcaaagccagcggctacacctttaccaactacggcatgaactgggtgcgccaggcccctggacagggcctggaatggatgggctggatcaacaccaagaccggcgagcccacctacgccgaagagttcaagggcagattcgtgttcagcctggaaaccagcgcctccaccgcctacctccagatcagctctctgaaggccgaggacaccgccatgtacttttgcggcagaggcggctacggcagcagctactggtacttcgatgtgtggggccagggcaccaccgtgaccgtgtcatct

SEQ ID NO: 33199 - DNA, 363 bp, synthetic construct
  source 1..363: mol_type = other DNA
cagatgcaactggtgcagagcggagccgaagtgaaagagcctggcgagagcctgcggatctcctgcaagggcagcggctacagcttcaccaatttctggatctcttgggtgcgccagatgcccggcaagggcctggaatggatgggcagagtggaccccggctactcctacagcacctacagccctagcttccagggccacgtgaccatcagcgccgacaagagcaccagcaccgcctacctccagtggaacagcctgaaggccagcgacaccgccatgtactactgcgccagagtgcagtacagcggctattacgattggttcgacccctggggccagggcacactcgtgacagtgtcaagc

SEQ ID NO: 33200 - DNA, 354 bp, synthetic construct
  source 1..354: mol_type = other DNA
caggtgcagctggtgcagtctggggccgaagtgaagaagcctggcgagagcctgaagatcagctgcaagggctccggctacaacttctctaacaagtggatcggctgggtgcgccagctgcctggcagaggactggaatggatcgccatcatctaccccggctacagcgacatcacctacagccccagcttccagggccgcgtgacaatcagcgccgacaccagcatcaacaccgcctacctgcactggcacagcctgaaggccagcgacaccgccatgtactactgcgtgcggcatacagccctggctggcttcgattattggggcctgggcaccctcgtgaccgtgtctagt

SEQ ID NO: 33201 - DNA, 363 bp, synthetic construct
  source 1..363: mol_type = other DNA
gaagtgcaactggtgcagtctggcggaggggtcatgcggcctggcggatctctgagactgtcttgtgccgccagcggcttcaccttcgacgactacggcatgagctgggtgcgccaggcccctggaaaaggcctggaatgggtgtccggcatcaactggaatggcggcagcaccggctacgccgattctgtgcggggcagattcaccatcagccgggacaacgccaagaacagcctgtacctgcagatgaactccctgcgggccgaggacaccgccctgtactattgcgccagagagcggggctacggctaccacgaccctcacgattattggggccagggcacccttgttaccgtgtcctct

SEQ ID NO: 33202 - DNA, 354 bp, synthetic construct
  source 1..354: mol_type = other DNA
cagattcagctggtgcagtctggccccgagctgaagaaacctggcgagacagtgaagatcagctgcaaggccagcggctacatcttcaccaattacggcatgaactgggtcaagcaggcccctggcaagagcttcaagtggatgggctggatcaacacctacaccggcgagagcacatacagcgccgacttcaagggcagattcgccttcagcctggaaaccagcgccagcacagcctacctgcacatcaacgacctgaagaacgaggacaccgccacctacttttgcgccagaagcggcggctacgaccctatggattattggggccagggcaccagcgtgaccgtttcttct

SEQ ID NO: 33203 - DNA, 357 bp, synthetic construct
  source 1..357: mol_type = other DNA
caggtgcaactggtggaatctggcgggggagtggtgcagcctggcagaagcctgagactgtcttgtgccgccagcggcttcaccttcagcagctacgacatgcactgggtgcgccaggcccctggcaaaggactggaatgggtggccgtgatctcctacgacggcaccaacgagtattacgccgacagcgtgaagggccggttcaccatctccagagacaccagcaagaacaccctgtacctccagatgaacagcctgcgggccgaggacacagccgtgtattattgcgccagagagcggtacttcgactggtccttcgactactggggccagggaaccctggtgtccgtgtctagt

SEQ ID NO: 33204 - DNA, 354 bp, synthetic construct
  source 1..354: mol_type = other DNA
gaagttcagctggtgcagagcggagccgaagtgaagaaacctggggcctctgtgaaggtgtcctgcaaggcttccggctacacctttaccagctacgccatgcactgggtccgacaggcacctggacaacggcttgaatggatgggctggatcaacgccggcaacggcaacaccaagtacagccagaaattccagggccgcgtgaccatcaccagagatacaagcgccagcaccgcctacatggaactgtctagcctgagatccgaggacaccgccgtgtactactgtgccagagacatcagctacggcagcttcgactattggggccagggcacactggtcaccgttagctct

SEQ ID NO: 33205 - DNA, 348 bp, synthetic construct
  source 1..348: mol_type = other DNA
gaagtgcaactggttcagagcggagccgaagtgaagaaacctggggcctctgtgaaggtgtcctgcaaggcttccggctacacctttaccaatttctggattcactgggtccgacaggctccaggccaaggactggaatggatcggagagatcgaccccagcgacagctacaccaactacaaccagaaattcaaaggccgggtcaccatcaccagagacaccagcacaagcaccgcctacctggaactgagcagcctgagaagcgaggacaccgccgtgtactactgcgccagggaaatcaccaccgtggattattggggccagggaaccctggtcaccgtgtcatct

SEQ ID NO: 33206 - DNA, 363 bp, synthetic construct
  source 1..363: mol_type = other DNA
gaagttcagcttgtgcagagcggagccgaagtgaagaaacctggggcctctgtgaaggtgtcctgcaaagccagcggctacacctttaccagctactggatcggctgggtccgacaggctcctggacaaggactggaatggatcggcgacatctatcccggcggaggctacaccaactacaacgagaagttcaagggccgcgtgacaatcaccagagacacctctacaagcaccgcctacctggaactgagcagcctgagaagcgaggacaccgccgtgtactactgcgccagactggatggcagcagctacagaggcgctatggattcttggggccagggcacactggtcaccgtttcttct

SEQ ID NO: 33207 - DNA, 354 bp, synthetic construct
  source 1..354: mol_type = other DNA
gaagtgcagcttgttgaatctggcggcggactggctaagcctggcggatctctgagactgtcttgtgccgccagcggcttccggttcaccttcaacaactactacatggactgggtccgacaggcccctggacaaggacttgaatgggtgtccagaatcagcagcagcggcgaccctacttggtacgccgattctgtgaagggcagattcaccatcagcagagagaacgccaagaacaccctgttcctccagatgaactccctgagagccgaggacaccgccgtgtactattgtgcctctctgaccaccggcagcgattcttggggacagggcgtgctggttaccgtgtcatct

SEQ ID NO: 33208 - DNA, 360 bp, synthetic construct
  source 1..360: mol_type = other DNA
gaagttcagctccttgagtcaggtggcggcctggttcaacctggcggatctctgagactgagctgtgccgccagcggcttcacctttagcagatacgccatgaactgggtccgacaggcccctggcaaaggactggaatgggtgtccggcatctctggaagcggcggcagaacctactacgccgattctgtgaagggcagattcaccatcagccgggacaacagcaagaacaccctgtacctccagatgaacagcctgagagccgaggacacagccgtgtattattgcgccaaggaccgggacttttggagcggcccttttgactattggggccagggaaccctggtcaccgttagctct

SEQ ID NO: 33209 - DNA, 372 bp, synthetic construct
  source 1..372: mol_type = other DNA
caggtgcaactccaggaatctggccccggactcgtgaagcccagcgagacactgagcctgacctgtaccgtgtccggctacaccatcaccagcggctacgactggtcctggatcagacagcctcctggcaagggcctggaatggatcggctacatcaactacggcggctccaccaactacaagcccagcctgggaagccgcgtgacaatcagcgtggacacctccaagaaccagttcagcctgaagctgagcagcgtgacagccgccgataccgccgtgtactactgcgcccggtacaacgagtacaagagctacatctacgattggtacttcgacttctggggccagggaaccctcgtgaccgtgtctagt

SEQ ID NO: 33210 - DNA, 372 bp, synthetic construct
  source 1..372: mol_type = other DNA
gaagtgcaactggtggaatctggcggcggactggttaagcctggcggatctctgagactgtcttgtgccgccagcggcttcaccttcagcaatgcctggatgagctgggttcgacaggcccctggaaaaggactggaatgggtcggattcatccggtccaaagcctacggcggcaccacagaatatgccgcctctgtgaagggcagattcaccatcagccgggacgacagcaagtctatcgcctacctccagatgaacaacctgaaaaccgaggacaccgccgtgtactactgcgccagagatggcctgtacagcagctcttggtacgacagcgattactggggccagggcacactggtcacagtgtcatct

SEQ ID NO: 33211 - DNA, 378 bp, synthetic construct
  source 1..378: mol_type = other DNA
caaatgcaactggttcaaagcggcggtggcctggtgcaacctggaagaagtctgagactgagctgtgccgccagcggcttcaccttcgatgattacgccatgcactgggtccgacaggcccctggaaaaggactggaatgggtgtccggcatctcctggaatagcggctctatcggctacgccgacagcgtgaagggcagattcaccatcagccgggacaacgccaagaacagcctgtacctccagatgaactccctgagagccgaggatacagccctgtactactgcgccaaggacatccacagcggcagctactacggcctgctgtactacgctatggacgtgtggggccagggcacaaccgtgacagtttcttct

SEQ ID NO: 33212 - DNA, 375 bp, synthetic construct
  source 1..375: mol_type = other DNA
cttgaaatggctcaggtgcagctggtgcagagcggagccgaagtgaagaaacctggcagcagcgtgaaggtgtcctgcaaagcttctggcggcaccttcagcagctacgccatctcttgggttcgacaggcccctggacaaggactggaatggatgggcagaatcatccccatcctgggaatcgccaactacgcccagaaattccagggcagagtgacaatcaccgccgacaagagcaccagcaccgcctacatggaactgagcagcctgagaagcgaggacaccgccgtgtactattgtgcaagaggcggctactacagccacgacatgtggagcgaagattggggccagggcacactggtcacagtgtcatct

SEQ ID NO: 33213 - DNA, 351 bp, synthetic construct
  source 1..351: mol_type = other DNA
caagttcagctggtgcagtctggctccgagctgaagaaacctggcgagtccgtgaagatcagctgcaaggccagcggctacaccttcaccgactacagcatcaactgggtcaagcaggcccctggacagggactgaaatggatgggctggatcaacaccgagacaagagagcccgcctacgcctacgacttcagaggcagattcgtgttctccctggacaccagcgccagcacagcctatctccagatcagctctctgaaggccgaggataccgccgtgtacttctgcgccctggactacagctacgctatggactattggggccagggcaccctggtcacagtctcttct

SEQ ID NO: 33214 - DNA, 351 bp, synthetic construct
  source 1..351: mol_type = other DNA
caagttcaactggtgcagagcggctccgagctgaagaaacctggcgagtccgtgaagattagctgcaaggccagcggctacaccttcacacactacagcatgaactgggtccgacaggctccaggccaaggactggaatggatgggcagaatcaacaccgagacaggcgagcccctgtacgccgacgatttcaagggcagattcgtgttcagcctggacaccagcgccagcacagcctatctccagatcagctctctgaaggccgaggacaccgccgtgtattattgcagcaacgactacctgtactccctggactattggggccagggcacactggtcacagtgtctagt

SEQ ID NO: 33215 - DNA, 360 bp, synthetic construct
  source 1..360: mol_type = other DNA
gaagtgcaactggttcagagcggagccgagctgaagaaacctggggccagcgtgaaggtgtcctgtaaagccagcggctacacctttaccgactactacatgaaatgggtccgacaggccccaggccagggactcgaatggatcggcgatattatccccagcaacggggccaccttctacaaccagaaattcaagggccgcgtgaccatcaccgtggacaagagcacaagcaccgcctacatggaactgagcagcctgagaagcgaggacaccgccgtgtattattgcgccagaagccatctgctgcgggccagttggttcgcctattggggacagggaaccctggtcaccgttagctct

SEQ ID NO: 33216 - DNA, 360 bp, synthetic construct
  source 1..360: mol_type = other DNA
caagtgcaactggttcagagcggagccgagctgaagaaacctggggccagcgtgaaggtgtcctgtaaagccagcggctacacctttaccgactactacatgaaatgggtccgacaggccccaggccagggactcgaatggatcggcgatattatccccagcaacggggccaccttctacaaccagaaattcaagggccgcgtgaccatcaccgtggacaagagcacaagcaccgcctacatggaactgagcagcctgagaagcgaggacaccgccgtgtattattgcgccagaagccatctgctgcgggccagttggttcgcctattggggacagggaaccctggtcaccgttagctct

SEQ ID NO: 33217 - DNA, 345 bp, synthetic construct
  source 1..345: mol_type = other DNA
caagttcaactgcaacagcctggggccgagcttgttagacctggcgcttctgtgaagctgagctgcaaggccagcggctacaccttcaccagctactggatgaactgggtcaagcagcggcctgaccagggcctcgaatggatcggcagaatcgacccctacgacagcgagacacactacaaccagaagttcaaggacaaggccatcctgaccgtggacaagagcagctccaccgcctacatgcaactgagcagcctgacctctgaggatagcgccgtgtactattgcgccagaggcaactgggacgactattggggccagggcacaaccctgacagtgtctagt

SEQ ID NO: 33218 - DNA, 357 bp, synthetic construct
  source 1..357: mol_type = other DNA
gaagtgcagctcgttgagtctggtggcggactggttcagcctggaagaagcctgaagctgagctgtgccgccagcggcttcaccttcagcgactacaatatggcctgggtccgacaggcccctaagaaaggactggaatgggtcgccaccatcctgtacgatggcggcagaacctactaccggggcagcgtgaagggcagattcaccatcagcagagacaacgccaagagcaccctgtacctgcggatggactctctgagaagcgaggataccgccacatattactgtgccacacacagccggggcaccgactactttgattattggggccagggcgtgatggttaccgtgtctagt

SEQ ID NO: 33219 - DNA, 363 bp, synthetic construct
  source 1..363: mol_type = other DNA
gaagtgaagctgcaagagtctggccccagcctggtgcagagtagccaaacactgagcctgacctgtaccgtgtccggctttagcctgaccagctaccacatccactgggtccgacagacccctggcaaaggactggaatggatgggcgtgatgtggagcgacggcgacaccagctataacagcgccctgaagtcccggctgagcatcagcagagatacaagccagagccaggtgttcctgaagatgaacagcctccagaccgaggacaccgccacctactattgtgccagaggctactacagcagctacctgtacctttggttcgcctattggggccagggcaccctggttacagtcagctct

SEQ ID NO: 33220 - DNA, 375 bp, synthetic construct
  source 1..375: mol_type = other DNA
caggttcagctccagcagtctggacccgagcttagaaggccaggatctagcgtcagactgagctgcaaggccagcggctaccggatcaaggacttcctgatccactggattaagaacagacccgagcacggcctggaatggatcggatggattgaccctgaggacggcgagactaagtacgcccagaagttccagaccaaggccacactgaccgccgacacctctagcaacaccgcctacatgcaactgagcagcctgaccagcgaggacaccgccacctacttttgtgctagatggggcgacgtgtactacggcctgatgagaggccatgtgatggatgcctggggccagggaacaagcgtgacagtctcttct

SEQ ID NO: 33221 - DNA, 363 bp, synthetic construct
  source 1..363: mol_type = other DNA
gaagtgcaactggttgaatctggcggcggactggttaagcctggcggatctctgaagctgagctgtgccgccagcggctacacctttaccagctacgtgatgcactgggtccgacaggcccctggcaaaggacttgagtggatcggctacatcaacccctacaacgatggcaccaagtacaacgagaagttccagggcagagtgaccatcagctccgacaagagcatcagcaccgcctacatggaactgagcagcctgagaagcgaggataccgccatgtactattgcgccagaggcacctactactacggcaccagagtgttcgactactggggccagggaaccctggtcacagtctcttct

SEQ ID NO: 33222 - DNA, 363 bp, synthetic construct; identical to SEQ ID NO: 363
  source 1..363: mol_type = other DNA

SEQ ID NO: 33223 - DNA, 360 bp, synthetic construct
  source 1..360: mol_type = other DNA
caagttcagctggttcagtctggggccgaagtgaagaaacctggggcctctgtgaaggtgtcctgcaaggcttccggctacacctttaccagctacaatatgcactgggtccgacaggctcccggccagagacttgaatggatgggcggcatctaccccggcaatggcgacacctcctacaaccagaaattcaagggccgcgtgacaatcaccagagacacctctgccagcaccgcctacatggaactgagcagcctgagaagcgaggacaccgccgtgtactactgcgccagatacgactacaactacgctatggactactggggccagggaaccctggtcacagtgtctagtgcttcc

SEQ ID NO: 33224 - DNA, 366 bp, synthetic construct
  source 1..366: mol_type = other DNA
gaggtgcagcttgttgagtctggcggaggactggtgcagcccgatagaagcctgagactgtcttgtgccgccagcggcttcaccttccacgattatgccatgcactgggtccgacaggcccctggcaaaggacttgaatgggtgtccaccatctcttggaacagcggcacaatcggctacgccgactctgtgaagggcagattcaccatcagccgggacaacgccaagaacagcctgtacctccagatgaactccctgagagccgaggacacagccctgtactactgcgccaaggacatccagtacggcaactactactacggcatggacgtgtggggccagggcacaacagtgacagtctcttct

SEQ ID NO: 33225 - DNA, 351 bp, synthetic construct
  source 1..351: mol_type = other DNA
caggtgcaactggtgcagtctggggccgaagtgaagaaacctggggcctctgtgaaggtgtcctgcaaagccagcggctacacctttaccaactacgacatcaactgggtccgacaggctccaggccaaggactggaatggatcggctggatctatcctggcgacggcagcaccaagtacaacgagaagttcaaggccaaggccacactgaccgccgataccagcacaagcaccgcctacatggaactgcggagcctgagaagcgacgacaccgccgtgtactattgtgcctccggctacgaggacgctatggactattggggccagggcaccaccgtgacagtgtctagt

SEQ ID NO: 33226 - DNA, 342 bp, synthetic construct
  source 1..342: mol_type = other DNA
caagtgcaactggttcagagcggagccgaagtgaagaaacctggggcctctgtgaaggtgtcctgcaaggccagcggctacaccttcaaggacacctacatccactgggtccgacaggcccctggacaaggacttgagtggatgggcagaatcgaccccgccaacggcaacaccaaatacgaccccaagttccagggcagagtgaccatgaccagagacaccagcatcagcaccgcctacatggaactgagccggctgagatccgatgacaccgccgtgtactattgcgctagaagaggcggagtggattggggccagggaacactggttaccgtgtctagt

SEQ ID NO: 33227 - DNA, 363 bp, synthetic construct
  source 1..363: mol_type = other DNA
gaagtgcaactggttcagagcggagccgaagtgaagaaacctggggcctctgtgaaggtgtcctgcaaagccagcggctacacctttaccgactactacctggacgtggtcgtgcggcaagctcctggacaaggactggaatggatcggcagagtgaacccctacaacggcggcaccatctacaaccagaaattcaagggaagagtgaccctgaccagagacaccagcacctccacagcctacctggaactgagcagcctgagaagcgaagataccgccgtgtactactgcgccagggaccactacagatatgaccctctgctggactactggggccagggaaccctggttacagtgtctagt

SEQ ID NO: 33228 - DNA, 366 bp, synthetic construct
  source 1..366: mol_type = other DNA
gaagtgcaactggttcagagcggagccgaagtgaagaaacctggggcctctgtgaaggtgtcctgcaaggccagcggctacagcttcaccgactattatatgcactgggtccgacaggctccaggccagggacttgagtggatcggcagaatcaacccctacaacggcgctgccttctacagccagaacttcaaggatagagtgaccctgaccgtggacaccagcaccagcacagcctacctggaactgagcagcctgagaagcgaggacaccgccgtgtactactgcgccattgagagaggcgctgacctggaaggctacgctatggattattggggccagggaaccctggtcaccgtgtcatct

SEQ ID NO: 33229 - DNA, 369 bp, synthetic construct
  source 1..369: mol_type = other DNA
caagttcagctgcaagagtctggccctggcctggtcaagcctagcgaaacactgagcctgacctgcgccgtgtctggctactctatcaccagcgcctactattggaactggatcagacagcctcctggcaaaggactggaatggatcggctacatcagctacgacggcagaaacaactacaaccccagcctgaagaaccggatcaccatcaatcccgacaccagcaagaaccagttcagcctccagctgaacagcgtgacccctgaggataccgccgtgtactactgtgccagagaaggcgactacgacgtgggcaactactacgctatggactactggggccagggaaccctggtcacagtctcttct

SEQ ID NO: 33230 - DNA, 369 bp, synthetic construct
  source 1..369: mol_type = other DNA
gaagtgcaactggtggaaagtggcggcggactggtgcaacctggaagaagcctgagactgtcctgtgccgccagcggctactctatcacaagcgcctactactggaactgggtccgacaggctcctggcaaaggactggaatgggtgtcctacatcagctacgacggcagaaacaactacaaccccagcctgaagaaccgcttcaccatcagccgggacaacgccaagaagtccctgtacctccagatgaacagcctgagagccgaggacacagccctgtactattgcgccaaagagggcgactacgacgtcggcaactactacgctatggactactggggccagggaaccaccgtgactgtctcttct

SEQ ID NO: 33231 - DNA, 354 bp, synthetic construct
  source 1..354: mol_type = other DNA
ggcgtgaagctggacgagacaggcggaggacttgttcaacctggcggagccatgaagctgagctgtgtgaccagcggctttaccttcggccactactggatgaactgggtccgacagtcccctgagaaaggactggaatgggtcgcccagttcagaaacaagccctacaactacgaaacctactacagcgacagcgtgaagggcagattcaccatcagccgggacgacagcaagtccagcgtgtacctccagatgaacaacctgcgcgtggaagataccggcatctactactgtaccggggccagctacggcatggaatatctcggccagggcaccagcgtgaccgtgtctaca

SEQ ID NO: 33232 - DNA, 378 bp, synthetic construct
  source 1..378: mol_type = other DNA
caggtgcaactggtggaatctggcggcaatctggttcagcctggcggctctctgagactgtcttgtgccgccagcggcttcaccttcggcagcttttctatgagctgggtccgacaagctcctggcggaggacttgaatgggtggcaggactgtctgccagaagcagcctgacacactacgccgactctgtgaagggcagattcaccatcagccgggacaacgccaagaacagcgtgtacctccagatgaacagcctgagagtggaagataccgccgtgtactactgcgccagaagaagctacgacagcagcggctactggggccacttctacagctacatggatgtgtggggccagggcaccctggttacagtttct

SEQ ID NO: 33233 - DNA, 342 bp, synthetic construct
  source 1..342: mol_type = other DNA
gaagttcaactggtggaaaccggcggcaacctggttcaacctggcgcttctctgagactgagctgtgccgccagcggctttagctttagcggaacagccatgcactgggtccgacaggcacctggcaaaggactggaatgggtgtccaccatcagcagcacaggcagaagcacctactaccgggacagcgtgaagggcagattcaccatctccagagacaacagcaagaacaccctgtacctccagatgaacagcctgagaggcgaggacaccgccgtgtactattgtgccagagtgtccttcgactactggggccagggaaccctggtcacagtctcttct

SEQ ID NO: 33234 - DNA, 354 bp, synthetic construct
  source 1..354: mol_type = other DNA
gaagttcagctggttgaaagcggcggagcctttgttcagcctggcggatctctgagactgagctgtgccgccagcggcttcacattttccagctacgccatgacctgggtccgacaggctcctggcaaaggactggaatgggtgtccaccatctccggcagaggcagaagcaccttctacgccgatagcgtgaagggcagattcacaatcagccgggacaacagcaagaacaccctgtacctccagatgaacagcctgagagccgaggataccgccgtgtactactgtgcccggtactatcacgctggcgcctttgatctttggggccagggaacactggtcaccgtgtcatct

SEQ ID NO: 33235 - DNA, 369 bp, synthetic construct
  source 1..369: mol_type = other DNA
caagttcaactggttcaatcaggcggaggcgtggtgcaacctggtggctctctgagagtgtcttgtgctgcctctggcgtgaccctgagcgactatggaatgcactgggtccgacaggcccctggcaaaggacttgagtgggtcgccttcatcagaaacgacggcagcgacaagtattacgccgacagcgtgaagggcagattcaccatcagccgggacaacagcgagaaaaccgtgtctctccagatgtctagcctgagagccgaggacaccgccgtgtactactgtgccaagaatggcgagagcggccctctggactactggtatctggatctgtggggcagaggcaccctggtcacagtctcttct

SEQ ID NO: 33236 - DNA, 342 bp, synthetic construct
  source 1..342: mol_type = other DNA
caagtgaagctccagcagagcggccctagccttgtgaaacctggcgcttccgtgaagatgagctgcaaggccagcggctacaccttcaccgatttctacatgaaatgggtcaagcagagccacggcaagtctctggaatggatcggcgacatcaaccccaacatcggagacaccttctacaaccagaagttcaagggcaaagccacactgaccgtggacaagagcagcagcaccgcctacatgcagctcaacagcctgaccagcgaggacagcgccgtgtacttttgttccgtgggctacttcgacgtgtggggagccggaacaaccgtgacagtctcttct

SEQ ID NO: 33237 - DNA, 390 bp, synthetic construct
  source 1..390: mol_type = other DNA
gaagttcaactggtgcagagcggagccgaagtgaagaagccaggcgagagcctgaagattagctgcaaaggcagcggctacagcttcaccagctactggatcggctgggtccgacagatgcctggcaaaggactggaatggatgggcatcatctaccccggcgacagcgacaccagatacagccctagctttcagggccaagtgaccatctccgccgacaagagcatcagcacagcctacctccagtggtcctctctgaaggccagcgataccgccatgtactactgcgccagacaagtctggggatggcaaggcggcatgtaccccaggtctaactggtggtacaacctggactcttggggccagggcacactggtcacagtctcttct

SEQ ID NO: 33238 - DNA, 360 bp, synthetic construct
  source 1..360: mol_type = other DNA
gaagtgcagctcgaacagtctggccccgagcttgtgaaacctggcgcttccgtgaagatgagctgcaaggccagcggctacaccttcaccaactactacatgaaatgggtcaagcagagccacggcaagtccctggaatggatcggcgatctgaaccccaacaacggcgacaccttctacaaccagaagttcaagggcaaagccacactgaccgtggacaagagcagcaacaccgcctacatgcagctcaactccctgaccagcgaggacagcgccgtgtactactgtgccagaaccggcagatacgaagagaacgctatggactactggggccagggcacaagcgtgacagtctcttct

SEQ ID NO: 33239 - DNA, 354 bp, synthetic construct
  source 1..354: mol_type = other DNA
caggttcagctgcaagagtctggccccggactggtcaagcctagccaaacactgagcctgacctgtaccgtgtccggctacagcatcaccagcgactacacctggaactggatcagacagcctcctggcaacggactggaatggatcggctacatcacctacagcggcagcaccagctacaaccccagcctgaaaagccgggtgctgatctccgtggacaccagcaagaatcaggtgtccctgaagctgagcagcgtgacagccgctgataccgccgtgtactactgtgccagactggggagaagatacacaatggactactggggccagggcaccaccgtgacagtttcttct

SEQ ID NO: 33240 - DNA, 360 bp, synthetic construct
  source 1..360: mol_type = other DNA
gaagtgcagctggttgaatcaggtggcggcctggttcaacctggcggatctctgagactgtcttgtgccgccagcggcttcagcttcaacacctacgccatgaactgggtccgacaggctcctggcaaaggactggaatgggtgtcccacatcagaagcaagagcaacaacttcgccacctactacgccgacagcgtgaaggacagattcaccatcagccgggacaacgccaagaacagcctgtacctccagatgaactccctgagagccgaggacaccgccgtgtattattgcgccagacaaggcggcgacttccctatggattattggggccagggcaccctggtcaccgtttcttct

SEQ ID NO: 33241 - DNA, 354 bp, synthetic construct
  source 1..354: mol_type = other DNA
caggtgcagctccaagagtctggccctggactggtcaagcctagccagacactgagcctgacctgtaccgtgtccggctacagcatcaccatcgactacacctggaactggatcagacagcctcctggcaaaggactggaatggatcggctacatcacctacagcggcagcaccgactacaaccccagcctgaaaagccgggtgctgatctccgtggacaccagcaagaatcaggtgtccctgaagctgagcagcgtgacagccgctgataccgccgtgtactactgtgccagactgggcagaagatacgccctggattattggggccagggcaccaccgtgacagtgtcatct

SEQ ID NO: 33242 - DNA, 366 bp, synthetic construct
  source 1..366: mol_type = other DNA
gaagttcagctggttgaatcaggcggaggactcgtgaaacctggcggctctctgagactgtcttgtgccgccagcggcttcaccttcagcaacttcgagatgaactgggtccgacaggccccaggcaaaggactggaatgggtgtccggcatcagctccaatggccggtacatcaactacgccgacagcgtgaagggcagattcaccatcagccgggacaacgccaagaacagcctgtacctccagatgaactccctgagagccgaggacaccgccgtgtactattgtgccagagtggtggacttcgaccaggactacaacggcttcgactattggggccagggcaccctggttaccgttagctct

SEQ ID NO: 33243 - DNA, 360 bp, synthetic construct
  source 1..360: mol_type = other DNA
gaagttcaactggttgagtctggtggcggcctggttaagcctggcggatctctgagactgagctgtgccgccagcggcttcacctttagcacatacggcatgagctgggtccgacaggcccctggaaaaggacttgagtgggtcgcctacatcaacaacggctccggctacatctactacgccgacagcgtgaagggcagattcaccatcagccgggacaacgccaagaacagcctgtacctccagatgaactccctgagagccgaggacaccgccgtgtactattgtgccagaggacagtggtggagcggcggagactttgattattggggccagggcaccctggtcaccgtttcttct

SEQ ID NO: 33244 - DNA, 366 bp, synthetic construct
  source 1..366: mol_type = other DNA
gaagtgcaactggttgaatctggcggcggactggttaagcctggcggatctctgaagctgagctgtgccgcctctggcttcgccttcagcatctacgatatgagctgggtccgacagacccctgagaagagactggaatgggtcgcctacatctctagcggcggagggacctactatcccgacacagtgaagggcagattcaccatctccagagacaacgccaagaacaccctgtacctccagatgagcagcctgaagtccgaggacaccgccatgtactactgcgccagacacagcggctatggcacacattggggagtgctgtttgcctactggggccagggaacactggtcacagtttctgct

SEQ ID NO: 33245 - DNA, 372 bp, synthetic construct
  source 1..372: mol_type = other DNA
gaagttcagctgcttgaatcaggcggcggactggttcaacctggcggatctctgagactgagctgtgccgccagcggctacagcatcacaagcgactatgcctggaactgggtccgacaggcccctggcaaaggactggaatgggtgtcctacatcagcaacagcggcagcaccagctacaaccccagcctgaagtcccggttcaccatcagcagagacaacagcaagaacaccctgtacctccagatgaacagcctgagagctgaggacaccgccgtgtattattgcgccaaagagcggaactacgactacgacgattactactacgctatggactactggggccagggaaccctggtcacagtctcttct

SEQ ID NO: 33246 - DNA, 360 bp, synthetic construct
  source 1..360: mol_type = other DNA
caagttcagctggttcagagcggagccgaagtgaagaaacctggggcctctgtgaaggtgtcctgcaaagcctctggcctgaccatcgaggactactacatgcactgggtccgacaggcccctggacaaggacttgaatggatgggctggatcgaccccgagaacggcgatacagagtacggccctaagttccagggcagagtgaccatgaccagagacaccagcatcaacaccgcctacatggaactgagccggctgagatccgatgacaccgccgtgtactattgcgccgtgcacaatgcccactacggcacttggtttgcctattggggccagggcacactggtcaccgttagctct

SEQ ID NO: 33247 - DNA, 348 bp, synthetic construct
  source 1..348: mol_type = other DNA
gaagtgcagctggttgaatcaggtggcggcctggttcaacctggcggatctctgagactgagctgtgccgcctctggcttcagcctgacaaattacggcgtgcactgggtccgacaggcccctggaaaaggactggaatgggtgtccgtgatttggagcggcggcagcaccgattacaacgccgccttcatcagccggttcaccatcagcgccgacaccagcaagaataccgcctacctccagatgaactccctgagagccgaggacaccgccgtgtactattgcgccagagaactgatccacgctatggacaactggggccagggaaccctggtcacagtctcttct

SEQ ID NO: 33248 - DNA, 357 bp, synthetic construct
  source 1..357: mol_type = other DNA
gaagtgcagctggttgaaagcggagccgaagtgaagaaacctggggcctctgtgaaggtgtcctgcaaggccagcggctacacctttaccagctactggattcactgggtccgacaggcccctggacaaggacttgagtggatgggcgagaacgacccctccaacggcaggaccaactacaacgagaagttcaagaaccgcgtgaccctgaccgtggacaccagcatctctaccgcctacatggaactgagccggctgagatccgatgacaccgccgtgtactattgcgccagaggacccaactacttttacagcatggactactggggccagggcacaatggtcaccgttagctct

SEQ ID NO: 33249 - DNA, 357 bp, synthetic construct
  source 1..357: mol_type = other DNA
caggttcagctggttcagtctggggccgaagtgaagaaacctggggcctctgtgaaggtgtcctgcaaggcttccggctacacctttaccggctcttggatgaactgggtccgacaggctcctggacagggactcgaatggatcggcagaatctatcctggcgacggcgagacaaactacaacggcaagttcaaggaccgcgtgacaatcaccgccgacaagagcacaagcaccgcctacatggaactgagcagcctgcggagcgaagataccgccgtgtactactgcgcccggatctacggcaacaacgtgtacttcgatgtgtggggccagggcacaaccgtgacagtctcttct

SEQ ID NO: 33250 - DNA, 363 bp, synthetic construct
  source 1..363: mol_type = other DNA
caagaacagctggttgaaagcggcggaggactggttcaacctggcggttctctgagactgagctgtgccgccagcggcttcaccttcagcgactactacatgagctggatcagacaggccccaggcaaaggactggaatgggtcgccacaatctaccccagcagcggcaagacctactacgccgattctgccaagggcagactgaccatctccagcgacaacgccaaggacagcctgtacctccagatgaacagcctgagagccgaggacaccgccgtgtactactgcaccagagatagctacgccgacgacgccgctctgtttgacatttggggccagggcaccaccgtgaccgtttcttct

SEQ ID NO: 33251 - DNA, 372 bp, synthetic construct
  source 1..372: mol_type = other DNA
caggtacagctgcaggaatctgggcccggacttgtcaagccaagtcagacactttctcttacatgtaccgtgagcggcggaagtataagcagtggaggcttttactggtcttggatacggcagcacccaggcaaaggcttggagtggattggatacattcatcattcaggatctacacactataatccatcccttaagtcccgggtcaccattagcattgatacgtctaagaatctgttcagtctcaggctgtcctccgtcactgctgccgacacagccgtgtactactgcgcctccttggtttactgcggaggcgactgttatagcggctttgattattgggggcaggggaccctcgtaaccgtgagctct

SEQ ID NO: 33252 - DNA, 366 bp, synthetic construct
  source 1..366: mol_type = other DNA
caggtccaactgcaagaaagcggacccggactggtgaagccttctgagacacttagtctgacgtgcacggtcagtggcggctccatctcctcctattattggtcatggatacgacaacccccaggtaagggcctggaatggattggctatatctactattcaggaagcacgaactacaatcccagcctgaagtcccgagtgacaatttcagtagataccagtaaaaaccagttcagtcttaaactgtcaagcgtgacagctgccgacaccgctgtgtattactgcgtctcactggtgtattgtggaggggattgttatagcgggttcgattattggggacagggaaccctggtgactgtatcttcc

SEQ ID NO: 33253 - DNA, 381 bp, synthetic construct
  source 1..381: mol_type = other DNA
caagttactttgaaggagtctggacctgtactggtgaagccaaccgagacactgacactcacgtgtacagtgagtggtttttccttgatcaacgcaaggatgggcgtcagctggatcaggcaaccccctggcaaggctctggaatggctcgctcacatattcagcaatgccgaaaaaagctaccggacaagcctgaaatcccgcctgactatttccaaggacacttctaagtctcaggtggtgctgaccatgaccaacatggacccggtggacaccgccacctattactgcgcaagaatccctgggtatggtgggaatggtgactaccattattatgggatggatgtgtgggggcaaggcacaaccgtaacggtctcaagc

SEQ ID NO: 33254 - DNA, 360 bp, synthetic construct
  source 1..360: mol_type = other DNA
cagatccagttggtggaatcagggggcggtgtggtgcagccgggtaggagcctgagactgtcatgcgtggcgtctggcttcacattcaagaactacggcatgcactgggtgcgacaggcccccggaaagggtttggagtgggtcgccgtgatctggtacgacggatctaatgagtattacggagatcctgtgaagggaaggttcaccatctcccgcgacaatagcaaaaatatgctctacctgcaaatgaactcactcagggcggatgatacggcggtctactattgcgctcgctcagggattgctgtggccggcgcattcgattactggggacagggtaccctggtgacagtatcaagc

SEQ ID NO: 33255 - DNA, 366 bp, synthetic construct
  source 1..366: mol_type = other DNA
caactgcaactgcaagagtctggccctggcctggtcaagcctagcgaaacactgagcctgacctgtaccgtgtctggcggcagcatcagctccagcacatattactggggctggatcagacagcctcctggcaaaggactggaatggatcggctccatctacttcaccggcagcaccgactacaaccccagcctgaagtccagggtgtccatctccgtggacaccagcaagaaccagttctccctgaagctgagcagcgtgacagccgctgataccgccgtgtactactgcgccaaagaggacgatagcagcggctactacagcttcgactattggggccagggcaacctggtcaccgttagctct

SEQ ID NO: 33256 - DNA, 363 bp, synthetic construct
  source 1..363: mol_type = other DNA
caagttcagctggtgcagtctggcagcgagctgaagaaacctggggcctctgtgaaggtgtcctgcaaggcttccggctacaccttcaacacctacgccatgaattgggtccgacaggctccaggccaaggactggaatggatgggctggatcaacaccaacaccggcaatcccacatacgcccagggcttcaccggcagattcgtgttctctctggacacctccgtgtccaccgcctacctccagatcagctctctgaaggccgaggataccgccgtgtactactgcgccagacggtacttcgattggctgctgggagccttcgacatctggggccagggaacaatggtcaccgtgtctagt

SEQ ID NO: 33257 - DNA, 351 bp, synthetic construct
  source 1..351: mol_type = other DNA
caagttcagcttgttcagagcggagccgaagtgaagaaacccggcagctctgtgaaggtgtcctgcaaggcttccggctacgcctttagcagcagctggatgaactgggtccgacaggctcctggacagggccttgaatggatgggcagaatctatcccggcgacggcaatacccactacgcccagaaattccagggccgcgtgacactgacagccgacaagtctacaagcaccgcctacatggaactgagcagcctgagaagcgaggacaccgccgtgtactattgcggcgaaggctatctggaccctatggactattggggccagggcacactggtcaccgttagctct

SEQ ID NO: 33258 - DNA, 345 bp, synthetic construct
  source 1..345: mol_type = other DNA
gaggtgcagctggttgaatctggcggaggactggttcagcctggcggatctctgagactgtcttgtgccgccagcggctacaccttcaccacctattggatgcactgggtccgacaggcccctggcaaaggacttgagtgggtcggatatatcaggcccagcaccggctacacagagtacaaccagaagttcaaggaccgcttcaccatcagcgccgacaccagcaagaataccgcctacctccagatgaacagcctgagagccgaggacaccgccgtgtactactgtgccagatccagatggctgctggactattggggccagggcacactggttacagtttct

SEQ ID NO: 33259 - DNA, 351 bp, synthetic construct
  source 1..351: mol_type = other DNA
gaagtgcagctggttgaatcaggtggcggcctggttcaacctggcggatctctgagactgagctgtgccgccagcggcttcaccttcagcgactactttatgagctgggtccgacaggcccctggcaaaggacttgaatgggtcgccaccatcagcaatggcggcacctacacttactaccccgacagcgtgaagggcagattcaccatctccagagacaacagcaagaacaccctgtacctccagatgaactccctgagagccgaggacaccgccgtgtactactgcgccagattcgacggctacatcttcgactattggggccagggcaccctggtcacagtctcttct

SEQ ID NO: 33260 - DNA, 369 bp, synthetic construct
  source 1..369: mol_type = other DNA
gaagttcagctggttgaatctggcggcggactggttcaacctggcggatctctgagactgagctgtgccgcctctggctacgccttcagcaacagctggatcaactgggtccgacaggcccctggcaaaggactggaatgggtcggacaaatctaccccggcgactacgacaccaactacaacggcaagttcaagggcagattcaccatcagccgggacaagagcaagaacaccgcctacctccagatgaactccctgagagccgaggacaccgccgtgtactattgtgctagaggcggctccatctactacggcaacctgggcttcttcgacgtgtggggacagggcacactggtcacagtctcttct

SEQ ID NO: 33261 - DNA, 348 bp, synthetic construct
  source 1..348: mol_type = other DNA
caagttcagctggttcagagcggagccgaagtgaagaaacctggggcctctgtgaaggtgtcctgcaaggccagcggctacagcttcatcgagtacaccatcaactgggtccgacaggcccctggacaaggcctggaatggatcggcaacatcgacccctactacggcacaacctactacaaccagatgttcaccggcagagccacactgaccgtggacacctctatcagcaccgcctacatggaactgagccggctgagatccgatgacaccgccgtgtactattgtgccagaggcagcgcctggtttccctattggggacagggaaccctggtcaccgttagctct

SEQ ID NO: 33262 - DNA, 345 bp, synthetic construct
  source 1..345: mol_type = other DNA
caagttcagctggttcagagcggagccgaagtgaagaaacctggggcctctgtgaaggtgtcctgcaaggccagcggctacaccttcagcgactattgggtgcactgggtccgacaggctccaggacaaggactggaatggatgggagccatcgacggcagcgataccttcaacgattacagccagaaattcaaaggccgcgtgaccatgaccagagacaccagcatcagcaccgcctacatggaactgagccggctgagatccgatgacaccgccgtgtactattgtgccagaggcggcctgctgcagtattggggacagggaacactggtcaccgtgtcctct

SEQ ID NO: 33263 - DNA, 357 bp, synthetic construct
  source 1..357: mol_type = other DNA
caggttcagctccagcagtctggacctgagctggttaagcctggcgcttccgtgaagatcagctgcaaggcttccggctacgccttcagcagcagctggatgaactgggtcaaacagaggcccggcaaaggactggaatggatcggcagaatctaccccggcgacgaggacaccaattacagcggcaagttcaaggacaaggccacactgaccgccgacaagagcagcaccacagcctacatgcagctgagcagcctgaccagcgaggatagcgccgtgtacttctgtgccagaagcctgctgtacggcgactacctggattattggggccagggcacaaccctgacagtgtctagc

SEQ ID NO: 33264 - DNA, 363 bp, synthetic construct
  source 1..363: mol_type = other DNA
caagttcagctgcaacagagcggagccgagcttgtcagacctggcagctctgtgaagattagctgcaaagccagcggctacgccttcagcagctactgggtcaactggatgaagcagcggcctggacagggcctcgaatggatcggccaaatctatcctggcgacggcgacaccaactacaacggcaagtttaagggcagagccaccgtgaccgccgacaagagcagcagcacatcctacatgcagttcagcagcctgaccagcgaggacagcgccgtgtatttctgtgccagatccatcaccaccgtcgtgggctgcgctatggattattggggccagggcacaagcgtgaccgtgtcatct

SEQ ID NO: 33265 - DNA, 360 bp, synthetic construct; identical to SEQ ID NO: 19787
  source 1..360: mol_type = other DNA

SEQ ID NO: 33266 - DNA, 351 bp, synthetic construct
  source 1..351: mol_type = other DNA
gaagttcagctggttgaatcaggtggcggcctggttcaacctggcggatctctgagactgtcttgtgccgccagcggcttcactttcagcggcagatccatgaactgggtccgacaggcccctggcaaaggactggaatgggtgtcctacatcagcagcgacagccggaccatctactacgccgatagcgtgaagggcagattcaccatctccagagacaacgccaagaacagcctgtacctccagatgaactccctgagagccgaggacacagccgtgtattattgtgccagaggcggccacggctacttcgatctttggggcagaggcaccctggtcaccgtttcttct

SEQ ID NO: 33267 - DNA, 363 bp, synthetic construct
  source 1..363: mol_type = other DNA
caagttcagctggttgaatcaggcggaggcgttgtgcagcctggcagaagtctgagactgtcttgtgccgccagcggcttcaccttcagcagctatggaatgcactgggtccgacaggcccctggcaaaggacttgaatgggtggccggcatttggtgggacggcagcaatgagaagtacgccgacagcgtgaagggcagattcaccatctccagagacaacagcaagaacaccctgtacctccagatgaacagcctgagagccgaggacacagccgtgtattattgcgccaaagaggccccttactacgccaaggactacatggacgtgtggggcaagggcaccacagtgactgtctcttct

SEQ ID NO: 33268 - DNA, 360 bp, synthetic construct
  source 1..360: mol_type = other DNA
gaagtgcagctggttgaatcaggtggcggcctggttcaacctggcggatctctgagactgagctgtgccgccagcggcttcaacatcaaggacacctacatccactgggtccgacaggcccctggcaaaggacttgaatgggtcgccagaatctaccccaccaacggctacaccagatacgccgactctgtgaagggcagattcaccatcagcgccgacaccagcaagaacaccgcctacctccagatgaactccctgagagccgaggacaccgccgtgtactactgtagcagatggggcggctggggcttctacgctatggattattggggccagggaaccctggtcaccgtgtcatct

SEQ ID NO: 33269 - DNA, 351 bp, synthetic construct
  source 1..351: mol_type = other DNA
caggtgcagctggttgaatctggcggcggacttgtgaagcctggcggatctctgagactgagctgtgccgccagcggcttcaccttcagcgactactacatgacctggatcagacaggcccctggcaaaggactggaatggatcagctacatcagcagcagcggcagcaccatctactacgccgatagcgtgaagggcagattcaccatcagccgggacaacgccaagaacagcctgtacctccagatgaactccctgagagccgaggacaccgccgtgtactactgcgccagagacagaaacagccacttcgactattggggccagggcaccctggtcacagtttctagc

SEQ ID NO: 33270 - DNA, 351 bp, synthetic construct
  source 1..351: mol_type = other DNA
caggtgcagctggttgaatctggcggcggacttgtgaagcctggcggatctctgagactgagctgtgccgccagcggcttcaccttcagcgatcactacatgagctggatcagacaggcccctggcaaaggactggaatggttcagctacatcagcagcagcggcggcatcatctactacgccgatagcgtgaagggcagattcaccatcagccgggacaacgccaagaacagcctgtacctccagatgaactccctgagagccgaggacaccgccgtgtactactgtgccagagatgtgggcagccacttcgactattggggccagggaacactggtcaccgtttctagc

SEQ ID NO: 33271 - DNA, 372 bp, synthetic construct
  source 1..372: mol_type = other DNA
caggtgcagctggttgaatctggtggcggagtggtgcagtctggcagaagcctgagactgtcttgtgccgccagcggcttcaccttcagaaactacggaatgcactgggtccgacaggcccctggcaaaggacttgaatgggtcgccgtgatttggtacgacggcagcgacaagtactacgccgattctgtgcggggcagattcaccatcagccgggacaacagcaagaacaccctgtacctccagatgaacagcctgagagccgaggacaccgccgtgtactactgtgccagagatggctacgacatcctgaccggcaatcccagagacttcgactattggggccagggcacactggtcacagtttctagc

SEQ ID NO: 33272 - DNA, 366 bp, synthetic construct
  source 1..366: mol_type = other DNA
gaggtgcagctggttgaatctggcggaggactggttcagcctggcggatctctgagactgtcttgtgccgccagcggcttcccattcagcagctacgatatgcactgggtccgacaggccacaggcaaaggactggaatgggtgtccgccatcggaacagccggcgctacctattatcccggctctgtgaagggcagattcaccatcagcagagagaacgccaagaacagcctgtacctccagatgaactccctgagagccggcgataccgccgtgtactattgtgccagaggcgactacgtgtggggcacctacagacccctgttcgattattggggccagggcaccctggtcacagtttctagt

SEQ ID NO: 33273 - DNA, 354 bp, synthetic construct
  source 1..354: mol_type = other DNA
caggttcagctgcaagagtctggccctggcctggtcaagcctagcgaaacactgagcctgacctgtaccgtgtctggggccagcatcagcagcttctactggtcctggatcagacagcctcctggcaaaggactggaatggatcggctacatctactacagcggcaccaccaactacaaccccagcctgaagtccagagtgaccatcagcgtggacaccagcaagaaccagttctccctgaagctgagcagcgtgacagccgccgatacagccgtgtactactgtgccagaattgccgtggccggcttcttcttcgactattggggccagggcaccctggtcacagtttctagc

SEQ ID NO: 33274 - DNA, 369 bp, synthetic construct
  source 1..369: mol_type = other DNA
caggttcagctggttcagtctggggccgaagtgaagaaacctggggcctctgtgaaggtgtcctgcaaggccagcggctacacctttaccaactactacatgcactgggtccgacaggcccctggactgggacttgagtggatgggcatcatcaaccctagcgacggcagcacaagctacgcccagaaattccagggcagagtgaccatgaccagagacaccagcaccaacaccgtgtacatggacctgagcagcctgagaagcgaggacaccgccgtgtactattgtgccagaggcggcaacagcgccttctacagctactacgacatggacgtgtggggccagggcaccacagtgacagtttctagc

SEQ ID NO: 33275 - DNA, 348 bp, synthetic construct
  source 1..348: mol_type = other DNA
caggttcagctccagcagtctggacctgagctggttaagcctggcgcttctgtgcggatctcttgcaaggccagcggctacaccttcaccacctactacatccactgggtcaagcagcggcctggacagggactcgaatggatcggctggatctaccccggcaacgtgaacaccaactacaacgagaagttcaagggcaaagccacactgaccgccgacaagagcagcagcacagcctacatgcagctgaccagcctgacctctgaggacagcgccgtgtacttttgtgccagaggcgtgtactacttcgactactggggccagggcaccatcctgacagtttctagc

SEQ ID NO: 33276 - DNA, 357 bp, synthetic construct
  source 1..357: mol_type = other DNA
caggttcagctgcaagagtctggccctggcctggtcaagcctagccaaacactgagcctgacctgtaccgtgtctggcggcagcatcaacaacaacaattactactggacctggatcagacagcaccccggcaaaggactggaatggatcggctacatctactacagcggcagcaccttctacaaccccagcctgaagtccagagtgaccatcagcgtggacaccagcaagacccagttctccctgaagctgagcagcgtgacagccgccgatacagccgtgtactactgcgccagagaagataccatgaccggcctggatgtgtggggccagggaacaacagtgacagtgtctagc

SEQ ID NO: 33277 - DNA, 366 bp, synthetic construct
  source 1..366: mol_type = other DNA
gaagttcagctggttcagagcggagccgaagtgaagaaacctggggcctctgtgaaggtgtcctgcaaggcttccggcgataccttcaagcggtactacgtgcactgggtccgacaggctccaggacaaggactggaatggatgggcatcatcaaccccagcggcgtgtccacaacatacgcccagaaattccagggcagagtgaccatgaccagagacaccagcacctccaccgtgtacatggaactgagcagcctgagaagcgaggacaccgccgtgtactactgtgctgaagtgcgcggcagcggcttcaactacttcggcatggatgtgtggggccagggcacactggttaccgtttcttct

SEQ ID NO: 33278 - DNA, 366 bp, synthetic construct
  source 1..366: mol_type = other DNA
gaggttcagctgcttgagtctggcggaggactggttcaacctggcggaagcctgagactgtcttgtgccgccagcggcttcacctttagcagctacgccatgagctgggtccgacaggctcctggcaaaggactggaagtggtggtgtctgccatttctggcggcggaggcagaacctactacgccgattctgtgaagggcagattcaccatcagccgggacaacagcaagaacaccctgtacctgcagatgaacagcctgagagccgaggacaccgccgtgtactactgtgccagagaagagatggccttccgggcctacagattcgacatctggggccagggaaccctggtcacagtttctagc

SEQ ID NO: 33279 - DNA, 372 bp, synthetic construct
  source 1..372: mol_type = other DNA
gaagtgcagctggtggaatctggcggcgaccttgtgaaacctggcggctctctgaagctgagctgtgccgtgtccggcttcacctttagcagctacggcatgagctgggtccgacagacccctgacaagagactggaatgggtcgccacagtgtctagcggcggcacctacacatattaccccgacagcgtgaagggcagattcaccatcagccgggacaacgccaagaacaccctgtacctccagatgagcagcctgaagtccgaggacagcgccatgtactactgcgccagacaccggggcaattactacgccacctattattacgctatggactactggggccagggcaccagcgtgacagtttcttct

SEQ ID NO: 33280 - DNA, 357 bp, synthetic construct
  source 1..357: mol_type = other DNA
gaagttcagctggttgaatcaggcggcggactggttcaacctggcggatctctgagactgagctgtgccgccagcggcttcacattttccgacgcctggatggactgggtccgacaggctcctggaaaaggactggaatgggtcggagagatccggtccaaagtgaacaaccacgaaacctactatgccgagagcgtgaagggcagattcaccatcagccgggacgacagcaagaacagcctgtacctccagatgaactccctgaaaaccgaggacaccgccgtgtactactgcgccagaaacgactacttcgactactggggccagggaaccaccgtgacagtgtctagtgcttcc

SEQ ID NO: 33281 - DNA, 369 bp, synthetic construct
  source 1..369: mol_type = other DNA
gaggttcagctgcaagagtctggggccgaagtgaagaaacctggcagcagcgtgaaggtgtcctgcaaggccagcggcttcaacatcaaggacacctacatgcactgggtccgacaggcccctggacaaggacttgagtggatgggcagaatcgaccccgccaacggcaacagcaaatacgtgcccaagttccagggcagagtgaccatcacagccgacgagagcacaagcaccgcctacatggaactgagcagcctgagaagcgaggacaccgccgtgtactactgtgcccctttcggctactacgtgtccgactacgccatggcctattggggccagggaaccaccgtgacagtgtctagtgcatct

SEQ ID NO: 33282 - DNA, 360 bp, synthetic construct
  source 1..360: mol_type = other DNA
caagttcagctggttcagtctggggccgaagtgaagaaacctggcagcagcgtgaaggtgtcctgcaaagcaagcggcggcacctttagcagctacgccatctcttgggtccgacaggcaccaggacaaggactggaatggatgggcctgattatccccagatacggcaaggccagatacgcccagaaattccagggcagagtgaccatcaccgccgacgagtctacaagcaccgcctacatggaactgagcagcctgagaagcgaggacacagccgtgtattattgcgcccggaactggccctactactacatggatttttggggccagggaaccctggtcaccgtgtctagtgcatct

SEQ ID NO: 33283 - DNA, 366 bp, synthetic construct
  source 1..366: mol_type = other DNA
gaggtgcagctggttgaatctggcggcggacttgtgaagcctggcggatctctgagactgagctgtgccgccagcggcttcacctttagcaatgcctggatgagctgggtccgacaggcccctggaaaaggactggaatgggtcggacggatcaagagcaagaccgaaggcggcaccaccgattatgctgcccctgtgaagggcagattcaccatcagcagggacgacagcaagaacaccctgtacctccagatgaacagcctgaaaaccgaggacaccgccgtgtactactgcaccacaccttacgagtggtcttggtacgactactggggccagggcacactggtcacagtgtcatctgcatct

SEQ ID NO: 33284 - DNA, 363 bp, synthetic construct
  source 1..363: mol_type = other DNA
caggttcagctggttcagtctggggccgaagtgaagaaacctggggcctctgtgaaggtgtcctgcaaggcttccggctacacctttaccagctactacatgcactgggtccgacaggcccctggacaaggacttgagtggatgggcatcatcaaccctagcggcggcagcacaagctacgcccagaaattccagggcagagtgaccatgacacacgacaccagcacctccaccgtgtacatggaactgagcagcctgagaagcgaggacaccgccgtgtactactgcgccagatccttcttcaccggcttccacctggattactggggccagggaacactggtcacagtgtcatctgcatct

SEQ ID NO: 33285 - DNA, 384 bp, synthetic construct
  source 1..384: mol_type = other DNA
caggttcagctggttcagagcggagccgaagtgaagaaacctggggcctctgtgaaggtgtcctgcaaggcttccggctacacctttaccaactacctgatcgagtgggtccgacaggctccaggacaaggactggaatggatgggcctgattaaccctggcagcggcggcaccaactacaacgagaagttcaagggcagagtgaccatgaccaccgacaccagcacaagcaccgcctacatggaactgcggagcctgagaagcgacgacaccgccgtgtattattgcgccagaagaagccctctcggctcttggatctactacgcctatgacggcgtggcctattggggccagggaacactggttacagtgtcctctgccagc

SEQ ID NO: 33286 - DNA, 342 bp, synthetic construct
  source 1..342: mol_type = other DNA
gaagttcagctggttgaatcaggcggcggactggttcaacctggcggatctctgagactgagctgtgccgccagcggcttcaccttcagcagatactggatgagctgggtccgacaggcccctggcaaaggacttgaatgggtcgccgagatcaaccccgacagcagcaccatccagtacaccccatctctgaaggcccggttcaccctgtccgtggacagaagcaagaacaccctgtacctccagatgaactccctgagagccgaggacaccgccgtgtactattgtgccagacctgcctattggggccagggaacactggtcacagtgtctagcgcttcc

SEQ ID NO: 33287 - DNA, 363 bp, synthetic construct
  source 1..363: mol_type = other DNA
caagttcagctggttcagtctggggccgaagtgaagaaacctggggcctctgtgaaggtgtcctgcaaggcttccggctacacctttaccggctacaacatccactgggtccgacaggctcccggccaaagacttgaatggatgggcgctatctaccccggcaacggcgataccagctacaagcagaaattccggggcagagtgacaattaccagagacaccagcgccagcaccgcctacatggaactgtctagcctgagaagcgaggacaccgccgtgtactattgcgccagaggcgaaacagccagagccacctttgcctattggggccagggaaccctggtcacagtgtctagtgcttcc

SEQ ID NO: 33288 - DNA, 363 bp, synthetic construct
  source 1..363: mol_type = other DNA
gaagtgcagctggttcagtctggggccgaagtgaagaaacctggggcctctgtgaaggtgtcctgcaaggccagcggctacagattcaccaactactggattcactgggtccgacaggctccaggccaaggactggaatggatcggcggcatcaaccccggcaacaactacgccacctaccggcggaagtttcagggcagagtgaccatgaccgccgacaccagcacaagcaccgtgtacatggaactgagcagcctgagaagcgaggacaccgccgtgtactactgcaccagagaaggctacggcaactacggcgcttggtttgcctattggggccagggcacactggtcacagtttctagc

SEQ ID NO: 33289 - DNA, 375 bp, synthetic construct
  source 1..375: mol_type = other DNA
gaagtgcagctggttgagtctggcggcggacttgtgaaacctggcggaagcctgaagctgagctgtgccgcttctggcttcgccttcagcatctacgacatgagctgggtccgacaggcccctggcaaaggacttgagtgggtcgcctacatcagctctggcggagggacaacctactatcccgacaccgtgaagggcagattcaccatcagccgggacaacgccaagaacaccctgtacctccagatgagcagcctgagagccgaggacaccgccatgtactactgtgccagacacagcggctacggcagctcttacggcgtgctgtttgcctattggggccagggcacactggtcaccgttagctctacgcgt

SEQ ID NO: 33290 - DNA, 366 bp, synthetic construct
  source 1..366: mol_type = other DNA
gaagtgcagctggttgaatcaggtggcggcctggttcaacctggcggatctctgagactgagctgtgccgcctctggcttcgccttcagcatctacgatatgagctgggtccgacaggcccctggcaaaggacttgagtgggtcgcctacatctcttccggcggaggcacatattaccccgacaccgtgaagggcagattcaccatcagcagagacaacagcaagaacaccctgtacctccagatgaactccctgagagccgaggacaccgccgtgtactattgtgccagacacagcggctacggcacacactggggagtgctgtttgcctattggggccagggcacactggtcaccgtgtctagc

SEQ ID NO: 33291 - DNA, 363 bp, synthetic construct
  source 1..363: mol_type = other DNA
gaagttcagctggttgaatctggcggcggactggttcaacctggcggatctctgagactgagctgtgccgcctctggctacgcctttagcagctactgggtcaactgggttcgacaggcccctggcaaaggactggaatgggtcgcccaaatctatcccggcgacggcgacaccaactacaacggcaagttcaagggcagattcaccatcagccgggacaacagcaagaacaccctgtacctccagatgaactccctgagagccgaggacaccgccgtgtactattgtgccagatccatcaccaccgtcgtgggctgcgctatggattattggggccagggaaccctggtcaccgtgtcctct

SEQ ID NO: 33292 - DNA, 366 bp, synthetic construct
  source 1..366: mol_type = other DNA
caactccagctgcaagagtctggccctggcctggtcaagcctagcgaaacactgagcctgacctgtaccgtgtctggcggctctatcagctccggcagctatttctggggctggatcagacaacctcctggcaaaggactggaatggatcggctccatctactacagcggcatcacctactacaaccccagcctgaagtccagagtgaccatctccgtggacaccagcaagaaccagttctccctgaagctgagcagcgtgacagccgccgataccgccgtgtattattgtgccagacatgacggcgctgtggccggcctgtttgattattggggacagggcaccctggtcaccgtgtcatctgct

SEQ ID NO: 33293 - DNA, 354 bp, synthetic construct
  source 1..354: mol_type = other DNA
caagttcagctgcaagagtctggccccggactggtcaagcctagccaaacactgagcctgacctgtaccgtgtccggctacagcatcaccagcgactacacctggaactggatcagacagcctcctggcaacggactggaatggatcggctacatcacctacagcggcagcaccagctacaaccccagcctgaaaagccgggtgctgatctccgtggacaccagcaagaatcaggtgtccctgaagctgagcagcgtgacagccgctgataccgccgtgtactactgtgccagactggggagaagatacacaatggactactggggccagggcacaaccgtgacagtctcttct

SEQ ID NO: 33294 - DNA, 354 bp, synthetic construct
  source 1..354: mol_type = other DNA
caagtgcagctggttgaatctggcggcggactggttaagcctggcggttctctgagactgagctgtgccgcttctggcgacagcatcacaagcggctactggaactggatcagacaggcccctggcaaaggactggaatggttcagctacatcagctactccggcagcacctactacaaccccagcctgaagtcccggttcaccatcagcagagacaacgccaagaacagcctgtacctccagatgaactccctgagagccgaggacaccgccgtgtactattgcgccagacctaactaccccttctacgctatggactactggggccagggcacactggtcacagtctcttct

SEQ ID NO: 33295 - DNA, 354 bp, synthetic construct
  source 1..354: mol_type = other DNA
gaagtgcagctggttgaatcaggtggcggcgttgtgcagcctggcagaagtctgagactgagctgtgccgcctctggctttagcctgagcacatctggcatgggcgtcggctgggttcgacaagctcctggcaaaggactggaatgggtcgcccacatttggtgggacgacgacaagtactacgccgacagcgtgaagggcagattcaccatcagccgggacaacagcaagaacaccctgtacctccagatgaacagcctgagagccgaggacaccgccgtgtactattgtgcccggtcttttggctacggcctggactattggggccagggcacactggttaccgtgtctagt

SEQ ID NO: 33296 - DNA, 372 bp, synthetic construct
  source 1..372: mol_type = other DNA
caagttcagctggttgaatctggcggcggactggttaagcctggcggttctctgagactgagctgtgccgcttctggcgatagcgtgtcctctaattctgccgcctggggctggattagacaggcccctggaaaaggactggaatggttcagccggatctactaccgcagcaagtggtacaacagctacgccgtgtccgtgaagtcccggttcaccatcagcagagacaacgccaagaacagcctgtacctccagatgaactccctgagagccgaggacaccgccgtgtactactgcgccagatacgattgggtgcccaagatcggcgtgttcgattcttggggccagggaaccctggtcaccgtttcttct

SEQ ID NO: 33297 - DNA, 360 bp, synthetic construct; identical to SEQ ID NO: 32118
  source 1..360: mol_type = other DNA

SEQ ID NO: 33298 - DNA, 366 bp, synthetic construct
  source 1..366: mol_type = other DNA
gaagttcagctggttcagagcggagccgaagtgaagaagccaggcgagagcctgaagattagctgcaaaggctccggctacagcttcaccagctactggatcggctgggtccgacagatgcctggcaaaggactggaatggatgggcatcatctaccccggcgacagcgacaccagatacagccctagctttcagggccaagtgaccatcagcgccgacaagagcatcagcacagcctacctccagtggtcctctctgaaggccagcgataccgccatgtactattgcgccagagatgtcggcagatgggctcctggcggcttcctggattattggggacagggcacactggtcaccgtgtctagt

SEQ ID NO: 33299 - DNA, 354 bp, synthetic construct
  source 1..354: mol_type = other DNA
caagttcagctggttcagagcggcgctgaagtgaagaaacctggcagcagcgtgaaggtgtcctgcaaagcaagcggcggcacctttagcagctacggcatctcttgggtccgacaggctcctggacaaggactggaatggatgggctggatcagcgccatcttcggcacagccaattacgcccagaaattccagggccgcgtgacaatcacagccgacgagtctacaagcaccgcctacatggaactgagcagcctgagaagcgaggacaccgccgtgtactattgtgccagaggcgtggcctcctggtatctggattattggggccagggaaccctggtcaccgtgtcatct

SEQ ID NO: 33300 - DNA, 357 bp, synthetic construct
  source 1..357: mol_type = other DNA
caggttcagctccagcagtctggacccgagctgaagaaacctggcgagacagtgaagatcagctgcaaggccagcggctaccccttcaccaactacggcatgaactgggtcaagcaggcccctggacagggcctgaaatggatgggctggatcaataccagcaccggcgagagcaccttcgccgacgatttcaagggcagattcgacttcagcctggaaaccagcgccaacaccgcctacctccagatcaacaacctgaagtccgaggatatggctacctacttctgcgccagatgggaagtgtaccacggctacgtgccatattggggccagggcacaaccgtgacagtctcttct

SEQ ID NO: 33301 - DNA, 357 bp, synthetic construct
  source 1..357: mol_type = other DNA
gaagtgcagctggttgaatcaggtggcggcgttgtgcagcctggcagaagtctgagactgagctgtagcgccagcggcttcgatttcaccacctactggatgagctgggtccgacaggcccctggcaaaggactggaatggatcggcgagattcaccccgacagcagcaccatcaattacgcccctagcctgaaggacagattcaccatcagccgggacaacgccaagaacaccctgttcctccagatggactccctgaggccagaggataccggcgtgtacttttgcgccagcctgtatttcggcttcccttggtttgcctactggggccagggaacccctgtgacagttagctct

SEQ ID NO: 33302 - DNA, 372 bp, synthetic construct
  source 1..372: mol_type = other DNA
ggagtgcattctcaggttcagctgcaagagtctggccctggacttgtgcggcctagccaaacactgagcctgacctgtaccgtgtccggcttcacaatcagctccggctacagctggcactgggtccgacaaccacctggcagaggactggaatggatcggctacatccagtacagcggcatcaccaactacaaccccagcctgaagtcccgcgtgaccatgctggtggacacctccaagaaccagttcagcctgagactgagcagcgtgacagccgccgatacagccgtgtactactgcgccagagaggactacgactaccactggtacttcgacgtgtggggccagggaaccaccgtgacagtttcttct

SEQ ID NO: 33303 - DNA, 360 bp, synthetic construct; identical to SEQ ID NO: 377
  source 1..360: mol_type = other DNA

SEQ ID NO: 33304 - DNA, 363 bp, synthetic construct
  source 1..363: mol_type = other DNA
caggtgcagctggttgaatctggtggcggagttgtgcagcctggcagaagcctgagactgtcttgtgccgccagcggcttcacctttagcagctatgccatgcactgggtccgacaggcccctggcaaaggacttgaatgggtcgccgtgatctcctacgacggcagcaacaagtattacgccgacagcgtgaagggcagattcaccatcagccgggacaacagcaagaacaccctgtacctccagatgaacagcctgagagccgaggacaccgccgtgtactactgtgccaaagaggccccttactacgccaaggactacatggacgtgtggggcaagggcaccaccgtgacagtttcttct

SEQ ID NO: 33305 - DNA, 366 bp, synthetic construct
  source 1..366: mol_type = other DNA
gaagttcagctggttgaaacaggtggcggcctggtgcagcctggcaaatctctggaactgacctgcgccaccagcggcttcacctttaataccgcctggatgcactgggtccgacagagccccgataagcggctggaatggatcgccagaatcaaggacaccagcaacaactacgccaccgactacgtggaatccatgaagggcagattcaccatcagccgggacgacagcaagggctccgtgaacctccagatgaacagcctgaaagaagaggacaccgccacctactactgcaccaccgacttctacgacggcacctactattggaactactggggccagggcgtgatggtcacagtgtcatct

SEQ ID NO: 33306 - DNA, 378 bp, synthetic construct
  source 1..378: mol_type = other DNA
agaatggctcaggttcagctgcaacagagcggagccgaacttgctagacctggcgcttccgtgaagatgagctgtaaagccagcggctacaccttcaccacctacaccatccactgggtccgaagaaggccaggccacgaccttgagtggatcggctacatcaaccccagcagcggctgctccgactacaaccagaacttcaagggcaagaccacactgaccgccgacaagagcagcaacaccgcctacatgcagctcaacagcctgaccagcgaggacagcgccgtgtactattgtgccagaagggccgactacggcaactacgagtacacttggtttgcctactggggccagggcaccaccgtgacagtttcttct

SEQ ID NO: 33307 - DNA, 354 bp, synthetic construct
  source 1..354: mol_type = other DNA
gaagtgcagctggttgaatcaggtggcggcctggttcagcctggcagaagtctgagactgagctgtgccgccagcggcttcaccttcgacgattacggaatgcactgggtccgacaggcccctggcaaaggacttgaatgggtgtccggcatcagctggaacagcggcagcatcggctatgccgatagcgccaagggcagattcaccatcagccgggacaacagcaagaacaccctgtacctgcagatgaacagcctgagagccgaggacaccgccgtgtactactgtgccaagaggggcaacagcaacagcttcgactattggggccagggcaccctggtcacagtctcttct

SEQ ID NO: 33308 - DNA, 366 bp, synthetic construct
  source 1..366: mol_type = other DNA
cagatgcagctggtgcagtctggggccgaagtgaagaaacctggcagcagcgtgaaggtgtcctgcaaagcaagcggcggcacctttagctcctacgccatctcttgggtccgacaggctccaggacaaggactggaatggatgggcggcatcatccccatcttcggcacagccaattacgcccagaaattccagggcagagtgacaatcaccgccgacaagagcaccagcaccgcctacatggaactgagcagcctgagaagcgacgacaccgccgtgtactactgcgccagagatgaactgtgggccaccaactactactacatggacgtgtggggcaagggcaccctggtcacagtttcttct

SEQ ID NO: 33309 - DNA, 354 bp, synthetic construct
  source 1..354: mol_type = other DNA
gaagttcagctggttgaatctggcggcggactcgttagacctggcggatctctgagactgagctgtgccgccagcggcttcaccttcgatgattacggcatgagctgggtccgacaggcccctggaaaaggactggaatgggtgtccggcatcagctggaatagcggctctatcggctacgccgacagcgtgaagggcagattcaccatcagccgggacaacgccaagaacagcctgtacctccagatgaactccctgagagccgaggacacagccctgtactactgtgccaagcggggcaacagcaacagcttcgattattggggccagggaaccaccgtgaccgtgtcatct

SEQ ID NO: 33310 - DNA, 354 bp, synthetic construct
  source 1..354: mol_type = other DNA
gaagtgcagctggttgaatcaggtggcggcctggttcagcctggcagaagtctgagactgagctgtgccgcctccggcttcaccttcgatgattacgccatgcactgggtccgacaggcccctggaaaaggactggaatgggtgtccggcatcagctggaatagcggctctatcggctacgccgattccgccaagggcagattcaccatcagccgggacaacagcaagaacaccctgtacctccagatgaactccctgagagccgaggacaccgccgtgtactactgtgccaagaggggcaacagcaacagcttcgactattggggccagggcaccctggtcacagtctcttct

SEQ ID NO: 33311 - DNA, 357 bp, synthetic construct
  source 1..357: mol_type = other DNA
caggtgcagctgaaagagtctggccctggactggtgcagcctagccaaacactgagcctgacctgtaccgtgtctggcctgtctctgaccagcaatggcgtgtcctggatcagacagcctcctggcaaaggactggaatggctgggcgtgatctggtccaatggcggcacagactacaacagcgccatcaagagccggctgagcttcagcagagacaccagcaagagccaggtgttcctgaagatgaacagcctccagaccgaggataccgccatgtacttttgcgccagacctcggtacaactccggctacttcttcgactattggggccagggcgtgatggtcaccgttagctct

SEQ ID NO: 33312 - DNA, 372 bp, synthetic construct
  source 1..372: mol_type = other DNA
caagtgcagctgaaagagtctggccccggactggttcagcctagccaaacactgagcctgacctgtaccgtgtccggctttagcctgaccagctaccacgtgcactgggtccgacaacctccaggcaaaggactggaatggatgggcgtgatgtggagcgacggcgacaccctgtataacagcgccctgaagtcccggctgagcatcagcagagataccagcaagagccaggtgctgctccagatggatagcctccagagcgaggataccgccacctactactgtgccagactccaggtgttcggctaccccggcatcagagactacgtgatggatgcctggggacagggcgcttctgtgacagtctcttct

SEQ ID NO: 33313 - DNA, 390 bp, synthetic construct
  source 1..390: mol_type = other DNA
gaagttcagctggttgagtctggcggcagagtcgttagacctggcggaagcctgagactgtcttgtgccgccagcggcttcacctttgacgactacggcatgagctgggtccgacagcctcctggaaagggcctcgaatttgtgtccggcctgaactggaacggcgacatcaccgcctttaccgacagcgtgaagggcagattcaccatcagccgggacaacgtgaagtccagcctgtacctccagatgaacagcctgagagccgacgacaccgccttctactactgtgccagagtgcggacctggggcgattacacaacaggcgaggaaatcatcaacagctggtacttcgacctgtggggcagaggcacactggtcacagtctcttct

SEQ ID NO: 33314 - DNA, 360 bp, synthetic construct
  source 1..360: mol_type = other DNA
gaagtgcagctggttgaatcaggtggcggcctggttcaacctggcggatctctgagactgagctgtgccgcctccggcttcacctttagcagctactggatgagctgggtccgacaggcccctggcaaaggacttgagtgggtcgccaacatcaagcaggacggcagcgagaagtattacgtggacagcgtgaagggcagattcaccatcagccgggacaacgccaagaacagcctgtacctgcggatgaactccctgagagccgaggataccgccgtgtactattgtgccagagcctggggctacagctcctactacttcgactattggggccagggaaccctggtcaccgtttctcca

SEQ ID NO: 33315 - DNA, 345 bp, synthetic construct
  source 1..345: mol_type = other DNA
gaagttcagctgcaacagtctggccccgagctggttaagcctggaacaagcgtgcggatctcctgcaagaccagcggctacaccttcaccgagtacaccatccactgggtcaagcagagccacggcaagagcctggaatggatcggcaacatcaaccccaacaacggcggcaccacctacaaccagaagttcgaggacaaggccacactgaccgtggacaagagcagcagcaccgcctacatggaactgagaagcctgaccagcgaggacagcgccgtgtactattgtgccgccggatggaacttcgactactggggccagggaacaaccctgaccgttagctct

SEQ ID NO: 33316 - DNA, 345 bp, synthetic construct; identical to SEQ ID NO: 376
  source 1..345: mol_type = other DNA

SEQ ID NO: 33317 - DNA, 345 bp, synthetic construct; identical to SEQ ID NO: 33315
  source 1..345: mol_type = other DNA

SEQ ID NO: 33318 - DNA, 345 bp, synthetic construct; identical to SEQ ID NO: 376
  source 1..345: mol_type = other DNA

SEQ ID NO: 33319 - DNA, 366 bp, synthetic construct
  source 1..366: mol_type = other DNA
gaagtgcagctggttgagtctggcggcggactggttaagcctgagggaagcctgagactgtcttgtgccgccagcggcttcaccttcagcagatacggcatgagctgggtccgacaggctcctggcaaaggactggaatgggtgtccacaatttccggcggaggcacctacatctactaccccgatagcgtgaagggcagattcaccatctccagagacaacgccaagaacagcctgttcctccagatgaactccctgagagccgaggacacagccgtgtattattgcgctcgggacaactacggcagaaactacgactacggcatggactactggggccagggcacactggttaccgttagctct

SEQ ID NO: 33320 - DNA, 366 bp, synthetic construct
  source 1..366: mol_type = other DNA
gaagtgaaggtggtggaatctggcggcgacctggttaagcctggcggatctctgaagctgagctgtgtggtgtccggcttcaccttcagcagatacggcatgagctgggtccgacagacccctggcaaaagactggaatgggtcgccacaatttccggcggaggcacctacatctactaccccgatagcgtgaagggcagattcaccatctccagagacaacgccaagaacaccctgtacctccagatgagcagcctgaagtctgaggacaccgccatgtaccactgcaccagggacaactacggcagaaactacgactacggcatggactactggggccagggcacaagcgtgacagtctcttct

SEQ ID NO: 33321 - DNA, 363 bp, synthetic construct
  source 1..363: mol_type = other DNA
gaagtgcagctggttgagtctggcggcggacttgtgaaacctggcggaagcctgagactgagctgtgccgcttccggctttacctttagcggctacgccatgagctgggtccgacaggctcctggcaaaggactggaatgggtgtccacaatcagcagcggcggcacctacatctactaccccgatagcgtgaaaggccggttcaccatcagccgggacaacgccaagaacagcctgtacctccagatgaactccctgagagccgaggacaccgccgtgtactattgtgccagactcggcggcgacaattactacgagtatttcgacgtgtggggcaagggcaccaccgtgacagtttcttct

SEQ ID NO: 33322 - DNA, 351 bp, synthetic construct
  source 1..351: mol_type = other DNA
gaagttcagctgcttgaatctggcggcggactggttcaacctggcggatctctgagactgagctgtgccgcctctggcttcgccttcagcacctacgatatgagctgggtccgacaggcccctggcaaaggacttgaatgggtcgccacaatcagcagcggcggcagctacacctactacctggatagcgtgaagggcagattcaccatcagccgggacagcagcaagaacaccctgtacctccagatgaactccctccaggccgaggactccgccatctactattgtgcccctaccaccgtggtgcctttcgcctattggggacagggaaccctggtcaccgttagctct

SEQ ID NO: 33323 - DNA, 348 bp, synthetic construct
  source 1..348: mol_type = other DNA
gaggtgcagctggttgaatctggcggaggactggttcagcctggcggatctctgagactgtcttgtgccgccagcggctacaccttcaccagctattggctgcactgggtccgacaggcccctggcaaaggacttgagtgggtcggatatatcaggcccagcaccggctacacagagtacaaccagaagttcaaggaccgcttcaccatcagcgccgacaccagcaagaataccgcctacctccagatgaacagcctgagagccgaggacaccgccgtgtactactgtgccagatccagatggctgctggactattggggccagggcacactggttacagttagctct

SEQ ID NO: 33324 - DNA, 345 bp, synthetic construct
  source 1..345: mol_type = other DNA
gaggtgcagctggttgaatctggcggaggactggttcagcctggcggatctctgagactgtcttgtgccgccagcggcttcaccttcaccacctattggatgcactgggtccgacaggcccctggcaaaggacttgagtgggtcggatatatcaggcccagcaccggctacacagagtacaaccagaagttcaaggaccgcttcaccatcagcgccgacaccagcaagaataccgcctacctccagatgaacagcctgagagccgaggacaccgccgtgtactactgtgccagatccagatggctgctggactattggggccagggcacactggttacagtttct

SEQ ID NO: 33325 - DNA, 345 bp, synthetic construct; identical to SEQ ID NO: 33258
  source 1..345: mol_type = other DNA

SEQ ID NO: 33326 - DNA, 351 bp, synthetic construct; identical to SEQ ID NO: 375
  source 1..351: mol_type = other DNA

SEQ ID NO: 33327 - DNA, 351 bp, synthetic construct; identical to SEQ ID NO: 33259
  source 1..351: mol_type = other DNA

SEQ ID NO: 33328 - DNA, 351 bp, synthetic construct; identical to SEQ ID NO: 33259
  source 1..351: mol_type = other DNA

SEQ ID NO: 33329 - DNA, 363 bp, synthetic construct
  source 1..363: mol_type = other DNA
caactccagctgcaagagtctggccctggcctggtcaagcctagcgaaacactgagcctgacctgtaccgtgtctggcggctctatcagctccagcagctatttctggggctggatcagacaacctcctggcaaaggactggaatggatcggctccatctactacagcggcatcacctactacaaccccagcctgaagtccagagtgaccatctccgtggacaccagcaagaaccagttctccctgaagctgagcagcgtgacagccgccgataccgccgtgtattattgtgccagacatgacggcgctgtggccggcctgtttgattattggggacagggcaccctggtcaccgtgtcatct

SEQ ID NO: 33330 - DNA, 753 bp, synthetic construct
  source 1..753: mol_type = other DNA
gacgtgcagatgatccagacccccgatagcctggccgtgtccctgggacagagagccaccatctcttgcagagccagcgagagcgtggacaactacggcatcagcttcatgcactggtatcagcagaagcccggccagagccccaagctgctgatctacagagcctccaacctggaaagcggcatccccgccagattttccggcagcggcagcagaaccgacttcaccctgaccatcaaccccgtggaaaccgacgacgtggcaacctactactgccagcagaacaacaaggacccccccacctttggcggaggcaccaagctggaaatcaagggcggaggcggaagtggaggcggaggatctggcggcggaggctctgggggaggcggctctcaggtgcaactccagcagtctggcgctgagcttgtgaagcctggggccagcgtgaagattagctgcaaggccagcggctacgccttcagcagctactggatgaactgggtcaagcagcggcctggcaagggcctggaatggatcggccaaatctaccccggcgacggcgacaccacctacaacggcaagttcaagggcaaggccaccctgacagccgacaagagcagcagcaccgtgtacatgcaactgaacagcctgaccagcgaggacagcgccgtgtacttctgcgtgcggtactactacggcagctccggctacttcgactattggggccagggcaccacactgaccgtgtcctct

SEQ ID NO: 33331 - DNA, 726 bp, synthetic construct
  source 1..726: mol_type = other DNA
gacgtgcagatgatccagacccccagcagcctgtctgccagcctgggcgatagagtgaccatcagctgtcgggccagccaggacatcggcaactacctgaactggtatcagcagaaacccgacggcaccgtgaagctgctgatctactacaccagcagactgcacagcggcgtgcccagcagattttctggcagcggctctggcaccgagtacagcctgaccatctccaacctggaacaggaagatattgctacctacttctgtcagcaaggcagcgccctgccccctacatttggcggcggaacaaagctggaaatcaacggcggaggcggaagtggaggcggaggatctggcggcggaggctctgctctccagctccagcagtctggcgcagaactcgtgcggcctggcgcttctgtgaccctgagctgtaaagccagcggctacaccttcaccgactacgagatgcactgggtcaagcagacccctgtgcacggcctggaatggatcggagccatcgaccctgagacaggcggcaccgcctacaaccagaagttcgagggcaaggccatcctgaccgccgacaagagcagcagcacagcctacatggaactgcggagcctgacctccgaggacagccccgtgtactactgtgccagacggcggtactacggcagcagctccttcgactattggggccagggcaccaccctgaccgtgtctagt

SEQ ID NO: 33332 - DNA, 732 bp, synthetic construct
  source 1..732: mol_type = other DNA
gacatcgtgctgacacagagccctgccaccctgtctctgagccctggcgatagagccaccatcagctgtagagccagcgagagcgtgaccatcctgggcagccacctgatctactggtatcagcagaagcccggccagccccccagactgctgattcagctggcctccaatgtgcagaccggcgtgccagccagattttccggcagcggcagcagaaccgacttcaccctgaccatcagcagcgtggaacccgaggacttcgccgtgtactactgcctccagagccggaccatccccagaacattcggccagggcaccaagctggaaatcaagagaggcggaggcggaagtggaggcggaggatctggcggcggaggctctcaggtgcagctggtgcagtctggccccgaagtgaagaaacccggcgagtccgtgaagatcagctgcaaggccagcggctacaccttccggcactacagcatgaactgggtcaagcaggccccaggccagggcctgaagtggatgggcagaatcaacaccgagagcggcgtgcccatctacgccgacgacttcaagggccggttcagcttcaccgtggacaccagcgccagcaccgcctacctggaaatctccagcctgaccagcgaggataccgccgtgtatttctgctccaacgactacctgtacagcctggatttctggggccagggaaccaccctgacagtgtcctct

SEQ ID NO: 33333 - DNA, 732 bp, synthetic construct
  source 1..732: mol_type = other DNA
gacatccagatgacccagagccctagctcactgagcgccagcgtgggcgacagggtgaccattacctgctccgccagccaggacatcagcaactacctgaactggtaccagcagaagcccggcaaggcccccaagctgctgatctactacacctccaacctgcactccggcgtgcccagcaggttcagcggaagcggcagcggcaccgatttcaccctgaccatctccagcctgcagcccgaggacttcgccacctactactgccagcagtacaggaagctcccctggactttcggccagggcaccaaactggagatcaagcgtggcggaggcggaagtggaggcggaggatctggcggcggaggctctcaggtgcagctggtccagagcggcgccgaagtgaagaagcccggcagctccgtgaaagtgagctgcaaggccagcggcggcaccttcagcaactactggatgcactgggtgaggcaggcccccggacagggcctggagtggatgggcgccacctacaggggccacagcgacacctactacaaccagaagttcaagggccgggtgaccatcaccgccgacaagagcaccagcaccgcctacatggaactgagcagcctcaggagcgaggacaccgctgtgtattactgcgccaggggcgccatctacgacggctacgacgtgctggacaactggggccagggcacactggtgaccgtgtccagc

SEQ ID NO: 33334 - DNA, 747 bp, synthetic construct
  source 1..747: mol_type = other DNA
gacatcgtgatgacccagagccccgatagcctggccgtgtctctgggagagagagccaccatcaactgcgagagcagccagagcctgctgaacagcggcaaccagaagaactacctgacctggtatcagcagaagcccggccagccccccaagcccctgatctattgggccagcaccagagaaagcggcgtgcccgatagattcagcggcagcggaagcggcaccgacttcaccctgaccatcagttctcttcaggccgaggacgtggccgtgtactactgccagaacgactacagctacccctacaccttcggccagggcaccaagctggaaatcaagagaggcggaggcggaagtggaggcggaggatctggcggcggaggctctgaagtgcagctggtgcagtctggggccgaagtgaagaagcctggcgagagcctgaagatcagctgcaagggcagcggctacagcttcaccgactactacatgaagtgggccagacagatgcccggcaagggcctggaatggatgggcgacatcatccccagcaacggggccaccttctacaaccagaaattcaagggccaagtgaccatctccgccgacaagagcatcagcaccacctacctccagtggtccagcctgaaggccagcgacaccgccatgtactattgcgccagaagccatctgctgcgggccagttggttcgcctattggggccagggaacaatggtcacagtgtccagc

SEQ ID NO: 33335 - DNA, 732 bp, synthetic construct
  source 1..732: mol_type = other DNA
gacatccagatgacccagtctaccagttccctgagtgcatccctcggagacagggtgacgatcagttgcagcgcaagccaagggatcaataactatctgaactggtatcagcagaaaccggacggaacagtcgaactcctgatttattacaccagcacccttcagagtggcgtcccttcccggttcagtggctccggaagcgggaccgattactccctgaccatttctaatctggagccagaggacataggaacgtattattgccagcagtatagtaaactgccacgaacttttggaggggggacgaaactggagatcaaaggcggaggcggaagtggaggcggaggatctggcggcggaggctctcaggtgcaactccagcagtccggaagcgagcttatgatgccaggggcatcagtgaagatcagctgcaaggctactggctacaccttctctaattactggatagagtgggttaaacaaaggccagggcacggcctggaatggatcggcgagatcctgcctgggacaggccgaaccatttataacgagaagttcaaaggcaaggctactttcaccgcagatataagctctaatacagtgcaaatgcagctctcttccctgacaagtgaggatagtgccgtgtattattgcgcacgaagagattactatggaaatttttattacgctatggattattggggtcaaggaacaagtgtgaccgttagcagc

SEQ ID NO: 33336 - DNA, 717 bp, synthetic construct
  source 1..717: mol_type = other DNA
gacatccagatgacccagagccctgccagcctgtccgtgtctgtgggcgagacagtgaccatcacctgtcgggccagcgagaacatctacagcaacctggcctggtatcagcagaagcagggcaagagcccccaactgctggtgtacgccgccaccaatctggccgatggcgtgcccagcagattttccggctctggcagcggcacccagtacagcctgaagatcaacagcctccagagcgaggacttcggcagctactactgccagcacttctggggcacctggacctttggaggaggcaccaccctggaaatcaagggcggaggcggaagtggaggcggaggatctggcggcggaggctctgaagtgcaactccagcagagcggccctgagcttgtgaagcctggcgcttccgtgaagatgagctgcaaggccagcggctacaccttcaccgactactacatgaagtggatgaagcagagccacggcaagtccctggaatggatcggcgacatcaaccccaacaacggcggcaccacctacaaccagaagttcaagggcaaggccaccctgaccgtggacaagagcagcagcaccgcctacatgcaactgaacagcctgaccagcgaggacagcgccgtgtactactgcgccagagactacggctacggctatttcgactactggggccagggcacaaccctgacagtgtcctct

SEQ ID NO: 33337 - DNA, 729 bp, synthetic construct
  source 1..729: mol_type = other DNA
gacgagatcgtgctgacacagagccccgccaccctgtcactgtctccaggcgaaagagccaccctgagctgtagcgccagcagcagcgtgtcctacatgcactggtatcagcagaagcccggccaggcccccagactgctgatctacgataccagcaagctggcctccggcatccccgccagattttctggcagcggctccggcaccgacttcaccctgacaatcagcagcctggaacccgaggacgtggccgtgtactactgttttcaaggcagcgtgtaccccttcaccttcggccagggcaccaagctggaaatcaagagaggtggcggtggctcgggcggtggtgggtcgggtggcggcggatctcaggtgcagctccaggaatctggccctggcctcgtgaagcctagccagaccctgagcctgacctgtaccgtgtctggcggcagcatcagcacaagcggcatgggcgtgggctggatcagacagcaccctggcaagggcctggaatggatcggccacatttggtgggacgacgacaagcggtacaaccccgccctgaagtccagagtgaccatcagcgtggacaccagcaagaaccagttcagcctgaagctgagcagcgtgacagccgccgataccgccgtgtattattgcgcccggatggaactgtggtcctactacttcgactactggggccagggaaccctcgtgaccgtgtctagt

SEQ ID NO: 33338 - DNA, 726 bp, synthetic construct
  source 1..726: mol_type = other DNA
gacatccagatgacacagactacatcctccctgtctgcctctctgggagacagagtcaccatcagttgcagggcaagtcaggacattagtaaatatttaaattggtatcagcagaaaccagatggaactgttaaactcctgatctaccatacatcaagattacactcaggagtcccatcaaggttcagtggcagtgggtctggaacagattattctctcaccattagcaacctggagcaagaagatattgccacttacttttgccaacagggtaatacgcttccgtacacgttcggaggggggaccaagctggagatcacaggtggcggtggctcgggcggtggtgggtcgggtggcggcggatctgaggtgaaactgcaggagtcaggacctggcctggtggcgccctcacagagcctgtccgtcacatgcactgtctcaggggtctcattacccgactatggtgtaagctggattcgccagcctccacgaaagggtctggagtggctgggagtaatatggggtagtgaaaccacatactataattcagctctcaaatccagactgaccatcatcaaggacaactccaagagccaagttttcttaaaaatgaacagtctgcaaactgatgacacagccatttactactgtgccaaacattattactacggtggtagctatgctatggactactggggtcaaggaacctcagtcaccgtctcctca

SEQ ID NO: 33339 - DNA, 726 bp, synthetic construct
  source 1..726: mol_type = other DNA
gagatcgtgatgacccagagccctgccaccctgtctctgagccctggcgaaagagccaccctgagctgtagagccagccaggacatcagcaagtacctgaactggtatcagcagaagcccggccaggcccccagactgctgatctaccacaccagcagactgcacagcggcatccccgccagattttctggctctggcagcggcaccgactacaccctgacaatcagcagcctccagcccgaggacttcgccgtgtacttctgtcagcaaggcaacaccctgccctacaccttcggccagggcaccaagctggaaatcaagggcggaggcggaagtggaggcggaggatctggcggcggaggctctcaggtgcaactccaggaatctggccctggcctcgtgaagcccagcgagacactgagcctgacctgtaccgtgtccggcgtgtccctgcctgactatggcgtgtcctggatcagacagccccctggcaagggcctggaatggatcggagtgatttggggcagcgaaaccacctactacaacagctccctgaagtccagagtgaccatctccaaggacaactccaagaaccaggtgtccctgaagctgagcagcgtgacagccgccgacaccgccgtgtattactgcgccaagcactactactacggcggcagctacgctatggactactggggccagggaaccctcgtgaccgtgtctagt

SEQ ID NO: 33340 - DNA, 732 bp, synthetic construct
  source 1..732: mol_type = other DNA
gagatcgtgctgacacagagccctgccaccctgtctctgagccctggcgaaagagccaccctgagctgtagagccagccagagcgtgtccagctacctggcctggtatcagcagaagcccggccaggctccccggctgctgatctacgatgccagcaatagagccaccggcatccccgccagattttccggctctggcagcggcaccgacttcaccctgaccatcagctccctggaacccgaggacttcgccgtgtactactgccagcagcggagcaactggcccatcacattcggccagggcacccggctggaaatcaaaggcggaggcggaagtggaggcggaggatctggcggcggaggctctgaagtgcagctggtggaatcaggcggcggactggtgcagcctggcagaagcctgagactgagctgtgccgccagcggcttcaccttcaacgactacgccatgcactgggtgcgccaggcccctggaaaaggactggaatgggtgtccacaatcagctggaacagcggcagcatcggctacgccgatagcgtgaagggccggttcaccatcagccgggacaacgccaagaagtccctgtacctccagatgaacagcctgcgggccgaggacacagccctgtactattgcgccaaggacatccagtacggcaactactactacggcatggacgtgtggggccagggaaccaccgtgaccgtgtcatct

SEQ ID NO: 33341 - DNA, 741 bp, synthetic construct
  source 1..741: mol_type = other DNA
gacatcgtgatgacccagacccccctgagcctgcctgtgacacctggcgagcctgccagcatctcctgcagaagcagcaagagcctgctgcacagcaacggcatcacctacctgtactggtatctgcagaaacccggccagagcccccaactgctgatctaccagatgagcaacctggtgtccggcgtgcccgacagattttctggcagcggctccggcaccgacttcaccctgaagatcagccgggtggaagccgaggacgtgggcgtgtactactgcgcccagaacctggaactgccctacacctttggcggcggaacaaaggtggaaatcaagcggggcggaggcggaagtggaggcggaggatctggcggcggaggctctcaggtgcaactggtgcagagcggagccgaagtgaaaaagcccggcagcagcgtgaaggtgtcctgcaaggccagcggctacgccttcagctactcctggatcaactgggtgcgccaggcccctggacagggcctggaatggatgggcagaatcttccccggcgacggcgacaccgactacaacggcaagttcaagggcagagtgaccatcaccgccgacaagagcaccagcaccgcctacatggaactgagcagcctgcggagcgaggataccgccgtgtactattgtgccagaaacgtgttcgacggctactggctggtgtactggggccagggaacacttgtgaccgtgtccagc

SEQ ID NO: 33342 - DNA, 744 bp, synthetic construct
  source 1..744: mol_type = other DNA
gacatccagatgacccagagccccagcagcctgtctgccagcgtgggcgacagagtgaccatcacctgtcggagcagccagagcatcgtgcactccgtgggcaacaccttcctggaatggtatcagcagaagcccggcaaggcccccaagctgctgatctacaaggtgtccaacagattcagcggcgtgcccagcaggtttagcggctctggcagcggcaccgacttcaccctgaccatctctagcctccagcccgaggacttcgccacctactactgttttcaaggcagccagttcccctacaccttcggccagggaacaaaggtggaaatcaagcggggcggaggcggaagtggaggcggaggatctggcggcggaggctctgaagtgcaactggtggaaagcggaggcggcctggtgcagcctggcggatctctgagactgagctgtgccgccagcggctacgagttcagccggtcctggatgaactgggtgcgccaggcccctggcaagggactggaatgggtgggaagaatctaccccggcgacggcgacaccaactacagcggcaagttcaagggccggttcaccatcagcgccgacaccagcaagaacaccgcctacctccagatgaacagcctgcgggccgaggataccgccgtgtactactgtgccagagatggcagctcctgggactggtacttcgacgtgtggggacagggaacccttgtgaccgtgtccagc

SEQ ID NO: 33343 - DNA, 726 bp, synthetic construct
  source 1..726: mol_type = other DNA
gagatcgtgctgacacagagccctggcaccctgagcctgtctccaggcgaaagagccacactgagctgtcgggcctctcagagcgtgggaggctacctggcttggtatcagcagaagccaggccaggcccccagactgctgatctacgacgccagcaatcgggccacaggcatccccgccagattttctggcagcggctccggcaccgacttcaccctgacaatcagcagcctggaacccgaggacttcgccgtgtactactgccagcagcggaacaactggccccccatgtacacattcggccagggcaccaagctggaaatcaagagaggcggaggcggaagtggaggcggaggatctggcggcggaggctctcaggtgcaactggtgcagagcggagccgaagtgaagaaacccggcagcagcgtgaaggtgtcctgcaaggcttccggcggcaccttcagcagctacgccatttcttgggtgcgccaggctcctggacagggcctggaatggatgggcggcatcatccctatcctgggcaccgccaactacgcccagaaattccagggcagagtgaccatcaccgccgacgagagcaccagcaccgcctacatggaactgagcagcctgcggagcgaggacacagccgtgtattattgcgccagatggggcggaggggccttcgacatttggggccagggaacaatggtcaccgtgtccagc

SEQ ID NO: 33344 - DNA, 717 bp, synthetic construct
  source 1..717: mol_type = other DNA
gacatccagatgacccagagccccgccaccatcgagaacacaagcctgtctgccagcgtgggcgacagagtgaccatcacctgtagagccagccagggcatcagctcttggctgacctggtatcagcagaagcccgagaaggcccccaagagcctgatctacgccgccagctctctgcagtctggcgtgcccagcagattttccggcagcggctctggcaccgacttcaccctgacaatcagcagcctgcagcccgaggacttcgccacctactactgccagcagtacgacagctaccccatcaccttcggccagggcacccggctggaaatcaagggcggaggcggaagtggaggcggaggatctggcggcggaggctctcaggtgcaactgcagcagtggggagccggactgctgaagcctagcgagacactgagcctgacctgcgccgtgtacggcggcagcttcagcgcctactattggagctggatcagacagccccctggcaagggcctggaatggatcggcgacatcaatcacggcggaggcaccaactacaaccccagcctgaagtcccgcgtgaccatctccgtggacaccagcaagaaccagttctccctgaagctgaacagcgtgacagccgccgacacagccgtgtactactgtgccagcctgaccgcctattggggccagggatctcttgtgaccgtgtccagc

SEQ ID NO: 33345 - DNA, 729 bp, synthetic construct
  source 1..729: mol_type = other DNA
gagatcgtgctgacccagagccctgatagcctggccgtgtctctgggcgagagagccaccatcaactgcaaggccagccagagcgtggacttcgacggcgacagctacctgaactggtatcagcagaagcccggccagccccccaaggtgctgatctatgccgccagcacactgcagagcggcgtgcccagcagattttctggcagcggctccggcaccgacttcaccctgaccatcaacagcctggaagccgaggacgccgccacctactactgccagcagagcaacgaggacccctggacctttggcggcggaacaaaggtggaaatcaagggcggaggcggaagtggaggcggaggatctggcggcggaggctctcaggtgcaactggtgcagtccggcgctgaagtgaagaaacctggggccagcgtgaaggtgtcctgcaaggtgtccggctacacctttaccgactactacattacctgggtgcgccaggcccctggacaggccctggaatggatgggctggatctaccccggcagcggcaacaccaagtacagccagaagttccagggcagattcgtgttcagcgtggacaccagcgccagcaccgcctacctgcaactgtctagcctgaaggccgaagataccgccgtgtactactgcgccaactacggcaactattggttcgcctattggggccagggaacccttgtgaccgtgtcctct

SEQ ID NO: 33346 - DNA, 723 bp, synthetic construct
  source 1..723: mol_type = other DNA
gacatccagatgacccagagccccagcagcctgtctgccagcgtgggcgacagagtgaccatcacctgtagagccagccagggcatcagctcttggctggcctggtatcagcagaagcccgagaaggcccccaagagcctgatctacgccgcctctagtctccagagcggcgtgcccagcagattttctggcagcggctccggcaccgacttcaccctgacaatcagctccctccagcccgaggacttcgccacctactactgccagcagtacaacagctaccctcccacctttggcggaggcaccaaggtggaaatcaagggcggaggcggaagtggaggcggaggatctggcggcggaggctctgaagtgcaactggtgcagtctggcggagggctggtgcatcctgggggaagcctgagactgagctgtgccggctctggcttcgccttcagcagcagcaccatgcactggatcagacaggcccctggcaagggcctggaatggatcagcctgatcggaagcggagggggcatctactacggcgacagcgtgaagggccggttcaccatcagccgggacaacgccaagaacagcctgtacctccagatgaactccctgcgggccgaggacatggccgtgtactattgtgtgcggggctacttcgactgggtggactacttcgattactggggccagggcaccctcgtgaccgtgtcatct

SEQ ID NO: 33347 - DNA, 741 bp, synthetic construct
  source 1..741: mol_type = other DNA
gacgtcgtgatgacccagagccctctgagcctgcctgtgacactgggacagcctgccagcatctcctgtcggagcagccagagcatcgtgcacagcgacggcaacacctacctggaatggtatcagcagcggccaggccagagccccagacggctgatctacaaggtgtccaacagattcagcggcgtgcccgacagattctccggcagcggctctggcaccgacttcaccctgaagatcagcagagtggaagccgaggacgtgggcgtgtactactgttttcaaggcagccacgccccctggacctttggcggaggaacaaaggtggaaatcaagggcggaggcggaagtggaggcggaggatctggcggcggaggctctgaagtgcaactggtggaatcaggcggcggactggtgcagcctggcggatctctgagactgagctgtgccgccagcggcttcaccttcagcagctacggaatgcactgggtgcgccaggcccctggcaaaggactggaatgggtggcctacatcaccaccagaagcagcaccatctactacgccgacagcgtgaagggccggttcaccatctccagagacaacgccaagaacagcctgtacctccagatgaactccctgcgggccgaggacaccgccgtgtactattgcaccagagagcccctgaccggctactacgctatggactattggggccagggcaccagcgtgaccgtgtctagt

SEQ ID NO: 33348 - DNA, 711 bp, synthetic construct
  source 1..711: mol_type = other DNA
cagatcgtgctgacacagagccctgccctgatgagcgccagccctggcgagaaagtgaccatgacctgtagcgccagcagcagcgtgcgctacatgtactggtatcagcagaagcccagaagcagccccaagccctggattcacctgaccagcaatctggcctctggcgtgcccgctagattttccggctctggcagcggcaccagctacagcctgaccatcagcagcatggaagccgaggacgccgccacctactactgccagcagtggtccagccaccccttcacatttggctccggcaccaagctggaaatcaagggcggaggcggaagtggaggcggaggatctggcggcggaggctctgatgtgcaactccaggaaagcggccctggccttgtgaagcctagccagagcctgtccctgacctgtaccgtgaccggcttcagcatcaccagcgactactcttggaactggatcagacagttccctggcaacaaactggaatggatgggctacatcagctactccggccacacctcctacaaccccagcctggaaagccggatctccatcaccagagacaccagcaagaaccagttcttcttgcaactgaacagcgtgaccaccgaggataccgccacatattactgtaccagaggcaactgggacgtggtgtactggggccagggcacacttgtgaccgtgtctgct

SEQ ID NO: 33349 - DNA, 738 bp, synthetic construct
  source 1..738: mol_type = other DNA
gagatcgtgctgacacagagccctggaagcctggccgtgtctcctggcgagcgcgtgacaatgagctgcaagagcagccagagcgtgttcttcagcagctcccagaagaactacctggcctggtatcagcagatccccggccagagccccagactgctgatctactgggccagcaccagagaaagcggcgtgcccgatagattcaccggcagcggctctggcaccgacttcaccctgacaatcagcagcgtgcagcccgaggacctggctatctactactgccaccagtacctgagcagccggaccttcggccagggcaccaagctggaaatcaagagaggcggaggcggaagtggaggcggaggatctggcggcggaggctctcaggtgcaactgcagcagcctggcgctgaggtcgtgaagccaggcgcttccgtgaagatgtcctgcaaggccagcggctacaccttcaccagctactacatccactggatcaagcagacccctggacagggcctggaatgggtgggagtgatctaccccggcaacgacgacatcagctacaaccagaagttccagggcaaggccaccctgaccgccgacaagtctagcaccaccgcctacatgcaactgtccagcctgaccagcgaggacagcgccgtgtactactgcgccagagaagtgcggctgcggtacttcgatgtgtggggccagggaaccaccgtgaccgtgtcatct

SEQ ID NO: 33350 - DNA, 750 bp, synthetic construct
  source 1..750: mol_type = other DNA
gacatcgtgatgacacagtcaccagatagcctcaccgtctccctgggggagcggaccaccattaattgtaaatccagccaaagcgtgctggactcaagcaagaacaagaatagcctcgcctggtatcagcagaagcccggtcagcctccaaagctgctgctttcttgggcctccaccagagagtccgggattcctgataggtttagtggttcaggctccggcacagattttactctgaccattgattctctccagccagaggattctgcaacttattactgccagcaaagcgcccactttcctataacttttggccagggaacccgacttgaaatcaagggcggaggcggaagtggaggcggaggatctggcggcggaggctctcaggtgcagctggtgcagagcggtgccgaagtgaagaaaccaggtgcatccgttaaagtttcatgtaaggctagtggatataccttcaccaattacggaatgaactgggtgaaacaggcccctggccagggactgaagtggatggggtggattaacacctacaccggggagccgacttatgcagacgactttaaggggcgggtcacgatgacctccgacacctccaccagtaccgcctacctggagctgcacaaccttaggtcagacgataccgccgtgtattactgtgcccgatggtcttggtccgacggatactatgtctacttcgactattggggccaggggaccacagttaccgtgtcctct

SEQ ID NO: 33351 - DNA, 750 bp, synthetic construct
  source 1..750: mol_type = other DNA
gatgtgctgctgacccagagccctctgagcctgcctgtgacactgggacagcctgccagcatctcctgtcggagcagccagaccatcgtgcacagcaacggcaacacctacctggaatggttccagcagcggccaggccagagccccagactgctgatctaccaggtgtccaacagattcagcggcgtgcccgacagattctccggcagcggctctggcaccgacttcaccctgaagatcagccgggtggaagccgaggacgtgggcgtgtactactgttttcaaggcagccacgtgccccggacctttggcggaggaacaaaggtggaaatcaagagaggcggaggcggaagtggaggcggaggatctggcggcggaggctctcagatccaactggtgcagagcggcagcgagctgaagaaacctggggccagcgtgaaggtgtcctgcaaggccagcggctacacctttaccaactacggcatgaactgggtgcgccaggcccctggacagggcctgaaatggatgggctggatcaacaccaacaccggcgagcctaagtacgccgaagagttcaagggcagattcgccctgagcctggacaccagcgtgtccacagcctacctccagatcaacagcctgaaggccgaggataccgccgtgtacttctgcgccagaggctacggcaactacgccagaggggcttggctggcctattggggccagggaacactcgtgaccgtgtcctct

SEQ ID NO: 33352 - DNA, 735 bp, synthetic construct
  source 1..735: mol_type = other DNA
gaccacatcgtgctgacccagagccctagcagcctgtctgccagcctgggcgacagagtgaccatcagctgtagagccagccaggacatcagcacctacctgaactggtatcagcagaaacccgacggcaccgtgaagctgctgatcttctacaccagcagactgcacgccggggtgcccagcagattttctggcagcggctctggcacccaccacagcctgaccatctccaacctggaacaggaagatattgctacctacttctgtcagcaaggcaacagcctgcccttcaccttcggcagcggcaccaagctggaaatcaagagaggcggaggcggaagtggaggcggaggatctggcggcggaggctctcaggtgcagctgaaagagagcggccctgagctggaaaagcctggggccagcgtgaagattagctgcaaggccagcggctacagcttcaccgcctacagcatgaactgggtcaagcagaacaacggcatgagcctggaatggatcggcagcatcgacccctactacggcgacaccaaatacgcccagaagttcaagggcaaggccaccctgaccgtggataaggccagcagcaccgcctacctccagctgaagtctctgaccagcgaggacagcgccgtgtactactgcgccagacggatgattaccaccggcgactggtacttcgacgtgtggggagccggaaccaccgtgacagtgtctagc

SEQ ID NO: 33353 - DNA, 735 bp, synthetic construct; identical to SEQ ID NO: 33352
  source 1..735: mol_type = other DNA

SEQ ID NO: 33354 - DNA, 735 bp, synthetic construct
  source 1..735: mol_type = other DNA
gacatcgtgatgacccagagccccgatagcctggccgtgtctctgggagagagagccaccatcaactgccgggccagcaagagcgtgtccaccagcggctacagcttcatgcactggtatcagcagaagcccggccagccccccaagctgctgatctacctggcctccaacctggaaagcggcgtgcccgatagattcagcggcagcggctctggcaccgacttcaccctgaccatcagttctcttcaggccgaggacgtggccgtgtactactgccagcacagcagagaggtgccctggacattcggccagggcacaaaggtggaaatcaagcggggcggaggcggaagtggaggcggaggatctggcggcggaggctctcaggtgcagctggtgcagtctggggccgaagtgaagaaacctggggccagcgtgaaggtgtcctgcaaggccagcggatacacctttaccaactacggcatgaactgggtgcgccaggcccctggacagggcctggaatggatgggctggatcaacacctacaccggcgagcccacatacgccgacgccttcaagggcagattcgccttcagcctggacaccagcacctccaccgcctacctccagatcaacagcctgcggagcgacgacaccgccgtgtattattgcgccagagattacggcgactacgggatggactattggggccagggaaccaccgtgaccgtgtcctct

SEQ ID NO: 33355 - DNA, 723 bp, synthetic construct
  source 1..723: mol_type = other DNA
gacatcgtgatgacccagacccccctgaccctgagcgtgacaatcggacagcctgccagcatctcctgcaagagcagccagagcctgctggacagcgacggcaagacctacctgaactggctgctgcagaggccaggccagagccccgagagactgatctacctggtgtccaagctggactccggcgtgcccgatagattcacaggcagcggctccggcaccgacttcaccctgaagatcagccgggtggaagccgaggacctgggcgtgtactgttgttggcagggcacccacttcccttacaccttcggcggagggaccaaggtggaaatcaagggcggcggaggcggaagtggaggcggaggatctggcggcggaggctctcaggtgcaactgcagcagcctggcgctgaacttgtgcggccaggcgcctctgtgaagctgagctgtaaagccagcggctacaccttcaccagctactggatgaactgggtcaagcagcgcccaggccagggcctggaatggatcggaatgatcgaccccagcgacagcgagacacactacaaccacatcttcaaggacaaggccaccctgaccgtggacaagtccagcagcacagcctacctgcaactgtccagcctgaccagcgaggacagcgccgtgtactactgcgcccggaacctgtatctgtggggccagggaacaagcgtgaccgtgtctagc

SEQ ID NO: 33356 - DNA, 732 bp, synthetic construct
  source 1..732: mol_type = other DNA
gacatccagttgacccagtcccccagctcactcagcgccagtgtgggggaccgggtgaccattacctgtaaagccagtcagagtgtggactatgagggggatagcttcctgaattggtatcagcagaagcctggcaaagccccaaagctgctgatctacgctgcatctaatctggagtcaggcgtgccttctaggttctccggtagtgggtctgggaccgatttcacattgaccatttcatccctccaacccgaggatttcgctacatattactgtcagcagtccaatgaggaccctctcacctttggccagggcaccaaagttgaaattaagagaggcggaggcggaagtggaggcggaggatctggcggcggaggctctgaagtccaacttgtggagtctggagggggcctggtgcagcccggcggctctctcagactgtcttgtgcggcaagcggctacaccttcagctcttactggatagaatgggtgaggcaggcacctggaaagggactggagtggattggagagattctgccaggagggggagatacaaattacaatgaaatcttcaaggggcgggccaccttttcagcggataccagcaagaatacagcttacctgcagatgaatagcctccgggcagaagataccgctgtttattattgcacgagacgggtgccaataagactggactattgggggcaagggactcttgtcaccgtcagttca

SEQ ID NO: 33357 - DNA, 756 bp, synthetic construct
  source 1..756: mol_type = other DNA
gacatcgtgatgagccagagccctagcagcctggccgtgtccgtgggcgagaaagtgaccatgagctgcaagagcagccagtccctgctgcacagcagcaaccagaagaactacctggcctggtatcagcagaagcccggccagtcccccaaggtgctgatctactgggccagcaccagagaaagcggcgtgcccgatagattcaccggcagcggctctggcaccgacttcaccctgaccatcaccagcgtgaagtccgaggacctggctgtgtactactgccagcagtattacagctacccctggaccttcggcggaggcacccggctggaaatcaaaagaggcggaggcggaagtggaggcggaggatctggcggcggaggctctgaagtgcaactccagcagagcgtggccgagcttgtgaagcctggcgcttccgtgaagatgtcctgcaaggtgtccggctacaccctgacagaccacaccatccactggatgaagcagcggcctgagcagggcctggaatggatcggctacatctaccccagggacggcatcaccggctacaacgagaagttcaagggcaaggccacactgaccgccgacaccagcagcagcacagcctacatgcaactgaacagcctgaccagcgaggacagcgccgtgtacttctgtgccagatggggctacagctacagaaactacgcctactactacgactactggggccagggcacaaccctgaccgtgtctagt

SEQ ID NO: 33358 - DNA, 747 bp, synthetic construct
  source 1..747: mol_type = other DNA
gagatcgtgctgacacagagccctggcaccctgagcctgtctccaggcgaaagagccacactgagctgtcgggccagccagagcgtgtccagctcttacctggcctggtatcagcagaagcccggccaggctccccggctgctgatctacggaacaagcagcagagccaccggcatccccgacagattttctggcagcggctccggcaccgacttcaccctgacaatcagcagactggaacccgaggacttcgccgtgtactactgccagcagtacggcagcagccccttcacctttggcggaggcaccaaggtggaaatcaagagaggcggaggcggaagtggaggcggaggatctggcggcggaggctctcaggtgcaactccaggaatctggccccggactggctaagcccagcgagacactgagcctgacctgtaccgtgtccggcgacagcatcaccagctactactggtcctggatcagacagccccctggcaagggcctggaatggatcggctacatctactacagcggcagcaccaactacaaccccagcctgaagtccagagtgaccatcagcgtggacaccagcaagaaccagttctccctgaagctgagcagcgtgacagccgccgacaccgccgtgtattattgcgccagagatcagcggagaatcgccgctgccggcacccacttttacggcatggatgtgtggggccagggcaccaccgtgaccgtgtcatct

SEQ ID NO: 33359 - DNA, 717 bp, synthetic construct
  source 1..717: mol_type = other DNA
gacatccagatgacccagagccccagcagcctgtctgccagcgtgggcgacagagtgaccatcacctgtagagccagccagagcatcagcctgtggctgaactggtatcagcagaagcccggcaaggcccccaagctgctgatctacgccgccagcacactccagagcggcgtgccaagcagattttccggcagcggctccggcaccgacttcaccctgacaatcagctccctccagcccgaggacttcgccacctactactgccagcagtactacaccagcccctacaccttcggccagggcaccaaggtggaaatcaagagaggcggaggcggaagtggaggcggaggatctggcggcggaggctctcaggtgcaactgctggaatctggcggcggactggtgcagcctggcggatctctgagactgagctgtgccgccagcggcttcaccttcagcagctacgccatgagctgggtgcgccaggcccctggaaaaggactggaatgggtgtccgtgatccggtccagcggcagcagcacctattacgccgatagcgtgaagggccggttcaccatcagccgggacaacagcaagaacaccctgtacctccagatgaacagcctgcgggccgaggacaccgccgtgtactattgtgctaggggaggcggctacttcgactactggggccagggaacactcgtgaccgtgtcctct

SEQ ID NO: 33360 - DNA, 726 bp, synthetic construct
  source 1..726: mol_type = other DNA
gacatccagatgacccagagccccagcagcctgtctgccagcgtgggcgacagagtgaccatcacctgtagagccagccagagcatcagcagctacctgaactggtatcagcagaagcccggcaaggcccccaaactgctgatctacgccgtgtccacactccagagcggcgtgcccagcagattttctggcagcggctccggcaccgacttcaccctgacaatcagctccctccagcccgaggacttcgccacctactactgtcagcagagcggcaccttccctcccaccacatttggacagggcaccaaggtggaaatcaagagaggcggaggcggaagtggaggcggaggatctggcggcggaggctctcaggtgcaactgctggaatctggcggcggactggtgcagcctggcggatctctgagactgagctgtgccgccagcggcttcaccttcagcagccacggaatgcactgggtgcgccaggcccctggaaagggactggaatgggtgtccgtgatctccggcagcggcagcaataccggctacgccgatagcgtgaagggccggttcaccatcagccgggacaacagcaagaacaccctgtacctccagatgaacagcctgcgggccgaggacaccgccgtgtactattgtgccagacagtggggcagctacgccttcgattcttggggccagggcaccctcgtgaccgtgtcatct

SEQ ID NO: 33361 - DNA, 702 bp, synthetic construct
  source 1..702: mol_type = other DNA
atgacccagagccccaagttcctgctggtgtctgccggcgacagagtgaccctgacatgcaaggccagccagagcgtgaacaacgacgtgtactggtatcagcaggaacccggccagtcccccaagctgctgatctactgggccagcaccagagaaagcggcgtgcccgatagattcaccggcagcggctctggcaccgacttcaccctgacaatcagcagcgtgcaggccgaggacctggccgtgtactactgcaagcagagctacaacctgtacaccttcggcggaggcaccaagctggaaatcaagagaggcggcggaggatctggcggaggcggatctgggggcggaggctctgaatctggaagaggactggtgcagcctggcggcagcagaaagctgtcttgtgccgccagcggcttcaccttcagcaccagcggaatgcactgggtgcgccaggcccctgagaagggactggaatgggtggcctacatcagctccggcagcaccaccatctaccacgccgataccgtgaagggccggttcaccatcagccgggacaaccccaagaataccctgttcctccagatgaccagcctgcggagcgaggacaccgccatgtactattgctgcgccagaagcggccagttcggcaactacttcgactactggggccagggcaccaccctgaccgtgtcatct

SEQ ID NO: 33362 - DNA, 717 bp, synthetic construct
  source 1..717: mol_type = other DNA
cagagcccatctagcctggctgtgtctgccggcgagaaagtgaccatgagctgcaagagcagccagagcctgctgaacagccggacccggaagaactacctggcctggtatcagcagaagcccggccagagccccaagctgctgatctactgggccagcaccagagaaagcggcgtgcccgatagattcaccggctctggcagcggcaccgacttcaccctgacaatcagcagcgtgcaggccgaggacctggccgtgtactactgcaagcagagcaacctgtacaccttcggcggaggcaccaagctggaaatcaagggcggaggcggaagtggaggcggaggatctggcggcggaggctctcaggtgcagctggaagagtctggacccgagcttgtgaagcctggggccagcgtgaagctgtcctgtaaagccagcggctacaccttcaccgagtacatcatccactgggtcaagcagcggagcggccagggcctggaatggatcggctggttttaccctggctccggcagcatcaagtacaacgagaagttcaaggacaaggccaccctgaccgccgacaagtccagcagcaccgtgtacatggaactgagcggcctgaccagcgaggacagcgccgtgtatttctgcgccagacacgacggctacagctacttcgactattggggccagggcaccacactgaccgtgtcctct

SEQ ID NO: 33363 - DNA, 726 bp, synthetic construct
  source 1..726: mol_type = other DNA
gacatccagatgacccagagccccagcagcctgtctgcctctctgggcgagagagtgtccctgacctgtcgggccacacaggaactgagcggctacctgtcttggctgcagcagaagcccgacggcaccatcaagcggctgatctacgccgccagcaccctggatagcggcgtgcccaagagattcagcggcaacagaagcggcagcgactacagcctgaccatcagctccctggaaagcgaggacttcgccgactactactgcctgcagtacgccatctacccctacaccttcggcggaggcaccaagctggaaatcaagggcggaggcggaagtggaggcggaggatctggcggcggaggctctgaggtgcaactgcagcagtctggccccgagcttgtgaagcctggcgcctccgtgaagatgagctgcaaggccagcggctacacctttaccagctacttcatccactgggtcaagcagaaacccggccagggcctggaatggatcggcttcatcaacccttacaacgacggcagcaagtacaacgagaagttcaagggcaaggccaccctgaccagcgacaagagcagcagcaccgcctacatggaactgtccagcctgacatccgaggacagcgccgtgtactactgcaccagggacgacggctactacggctacgccatggactactggggccagggaacaagcgtcaccgtgtcctct

SEQ ID NO: 33364 - DNA, 741 bp, synthetic construct
  source 1..741: mol_type = other DNA
gacaccatcgtgctgacacagagccctgcttccctggccgtgtccctgggacagagagccaccatctcttgcagagccagcgagagcgtggacagctacggcaacagcttcatgcactggtatcagcagaagcccggccagccccccaagctgctgatctacctggcctccaacctggaaagcggcgtgcccgccagattttctggcagcggcagcagaaccgacttcaccctgaccatcgaccccgtggaagccgatgatgccgccacctactactgccagcagaacaactacgacccctggaccttcggcggaggcaccaagctggaaatcaagggcggaggcggaagtggaggcggaggatctggcggcggaggctctgaagtgcaactccagcagagcggccctgagcttgtgaagcctggcgcttccgtgaagatgagctgcaaggccagcggctacaccttcaccagctacgtgatgcactgggtcaagcagaaacctggacagggcctggaatggatcggctacatcaacccctacaacgacggcaccaagtacaacgagaagttcaagggcaaggccaccctgacaagcgacaccagcagcagcaccgcctacatggaactgaacagcctgaccagcgaggacagcgccgtgtacttctgcgccagacccatctacttcgacaacgactacttcgattactggggccagggcaccaccctgaaggtgtcctct

SEQ ID NO: 33365 - DNA, 723 bp, synthetic construct
  source 1..723: mol_type = other DNA
gacatccagatgacccagagccccagcagcctgtctgccagcgtgggcgacagagtgaccatcacatgcaaggccagccaggacgtgggaatcgccgtggcctggtatcagcagaaacccggcaaggtgcccaagctgctgatctactgggccagcaccagacacaccggcgtgcccgatagattttccggcagcggctccggcaccgacttcaccctgacaatcagctccctccagcccgaggacgtggcaacctactactgccagcagtacagcagctacccctacaccttcggccagggcaccaaggtggaaatcaagggcggaggcggaagtggaggcggaggatctggcggcggaggctctgaagtgcaactggtggaatcaggcggcggactggtgcagcctggcggatctctgagactgagctgtgccgccagcggcttcgacttcagccggtactggatgagctgggtgcgccaggcccctggcaaaggactggaatggatcggcgagatcaaccccgacagcagcaccatcaactacgcccccagcctgaaggacaagttcatcatcagccgggacaacgccaagaacagcctgtacctccagatgaactccctgcgggccgaggacaccgccgtgtactattgcgccagacccgacggcaactactggtacttcgacgtgtggggccagggaaccctcgtgaccgtgtcatct

SEQ ID NO: 33366 - DNA, 726 bp, synthetic construct
  source 1..726: mol_type = other DNA
gacatcgtgatgacccagagccagaagagcatgagcaccagcgtgggcgacagagtgagcatcacctgcaaggccagccaggacgtgatcaccggcgtggcctggtaccagcagaagcccggccagagccccaagctgctgatctacagcgccagctacagatacaccggcgtgcccgacagattcaccggcagcggcagcggcaccgacttcaccttcaccatcagcaacgtgcaggccgaggacctggccgtgtactactgccagcagcactacagcacccccctgaccttcggcgccggcaccaagctggagctgaagggcggaggcggaagtggaggcggaggatctggcggcggaggctctcaggtgcagctgcagcagcccggcgccgagctggtgagacccggcgccagcgtgaagctgagctgcaaggccagcggctacagcttcaccacctactggatgaactgggtgaagcagagacccggccagggcctggagtggatcggcatgatccaccccagcgacagcgagaccagactgaaccagaagttcaaggacaaggccaccctgaccgtggacaagagcagcagcaccgcctacatgcagctgagcagccccaccagcgaggacagcgccgtgtactactgcgccagaagcaccatgatcgccaccagagccatggactactggggccagggcaccagcgtgaccgtgagcagc

SEQ ID NO: 33367 - DNA, 744 bp, synthetic construct
  source 1..744: mol_type = other DNA
cagagcgtgctgacacagcctccatccgtgtctggcgctccaggccagagagtgaccatctcctgtaccggcagcggcagcaacatcggagccccctacgacgtgtcctggtatcagcaactgcctggcaccgcccccaagctgctgatctaccacaacaacaagcggcccagcggcgtgcccgatagattcagcggctctaagagcggcaccagcgccagcctggctatcactggactccaggccgaggacgaggccgactactactgtgccacagtggaagccggcctgagcggctctgtgtttggcggcggaacaaagctgaccgtgctgggagctggcggaggcggaagtggaggcggaggatctggcggcggaggctctcaggtgcaactggtgcagagcggagccgaagtgaagaaacctggggccagcgtgaaggtgtcctgcaaggtgtccggctacaccctgaccgagctgagcattcactgggtgcgccaggcccctggcaagggactggaatggatgggcggcttcgaccccgaagagaacgagatcgtgtacgcccagcggttccagggcagagtgacaatgaccgaggacaccagcaccgacaccgcctacatggaactgagcagcctgcggagcgaggataccgccgtgtactactgcgccatcgtgggcagcttcagccctctgacactgggcctgtggggccagggaactatggtcaccgtgtccagc

SEQ ID NO: 33368 - DNA, 744 bp, synthetic construct
  source 1..744: mol_type = other DNA
cagagcgtgctgacacagcctccatccgtgtctggcgctccaggccagagagtgaccatctcctgtaccggcagcggcagcaacatcggagccccctacgacgtgtcctggtatcagcaactgcctggcaccgcccccaagctgctgatctaccacaacaacaagcggcccagcggcgtgcccgatagattcagcggctctaagagcggcaccagcgccagcctggctatcactggactccaggccgaggacgaggccgactactactgccagagctacgacagcagcagcatcagcaccatcttcggcggaggcaccaagctgacagtgctgggagctggcggaggcggaagtggaggcggaggatctggcggcggaggctctcaggtgcaactggtgcagagcggagccgaagtgaagaaacctggggccagcgtgaaggtgtcctgcaaggtgtccggctacaccctgaccgagctgagcattcactgggtgcgccaggcccctggcaagggactggaatggatgggcggcttcgaccccgaagagaacgagatcgtgtacgcccagcggttccagggcagagtgacaatgaccgaggacaccagcaccgacaccgcctacatggaactgagcagcctgcggagcgaggataccgccgtgtactactgtgccatcgtgggcagcttcagcggaatcgcctacagaccttggggccagggcacaatggtcaccgtgtctagc

SEQ ID NO: 33369 - DNA, 738 bp, synthetic construct
  source 1..738: mol_type = other DNA
gacatccagatgacccagagccccagcagcctgtctgccagcgtgggcgacagagtgaccatcacctgtagcgccagcagcagcgtgtcctacatgtactggtatcagcagaagcccggcaaggcccccaagctgctgatctacctgaccagcaatctggcctccggcgtgcccagcagattttctggcagcggctccggcaccgacttcaccctgacaatcagctccctccagcccgaggacttcgccacctactactgtcagcagtggcggagcaaccccttcaccttcggccagggcaccaagctggaaatcaagagaggcggaggcggaagtggaggcggaggatctggcggcggaggctctcagatcaccctgaaagagtccggccccaccctcgtgaagcctacccagaccctgacactgacctgcaccttcagcggcttcagcctgagcacaagcggcatgggcgtgggctggatcagacagcctcctggaaaggccctggaatggctggcccacatttggtgggacgacgtgaagcggtacagccccagcctgaagtcccggctgaccattaccaaggacaccagcaagaaccaggtggtgctgaccatgacaaacatggaccccgtggacaccgccacatattactgcgcccggatcgtgtccttcgacaacgacgtggtgtccgctatggactactggggccagggaaccctcgtgaccgtgtctagt

SEQ ID NO: 33370 - DNA, 723 bp, synthetic construct
  source 1..723: mol_type = other DNA
gagatcgtgatgacccagagccctgccaccctgtccgtgtctccaggcgaaagagccaccctgagctgcaaggcttcccagagcgtgtccaacgacgtcgtgtggtatcagcagaagcccggccaggcccccagactgctgatctactacgccagcaacagatacaccggcatccccgccagattcagcggctctggcagcggcaccgagttcaccctgacaatcagcagcctccagagcgaggacttcgccgtgtactactgtcagcaggactacaccagcccctggaccttcggccagggcaccaagctggaaatcaagagaggcggaggcggaagtggaggcggaggatctggcggcggaggctctcaggtgcaactggtgcagagcggagccgaagtgaagaaacctggggccagcgtgaaggtgtcctgcaaggccagcggctacacctttaccaactacggcatgaactgggtgcgccaggctcctggacagggcctggaatggatgggctggatcaacacctacaccggcgagcccacctacgccgacgacttcaagggcagagtgaccatgaccaccgacaccagcacctccaccgcctacatggaactgcggagcctgagaagcgacgacaccgccgtgtattattgcgcccggatcggcgacagcagccccagcgattattggggccagggaaccctcgtgaccgtgtcctct

SEQ ID NO: 33371 - DNA, 723 bp, synthetic construct
  source 1..723: mol_type = other DNA
gacatcctgctgacccagagccccgtgatcctgtccgtgtctcctggcgagagagtgtccttcagctgtcgggccagccagagcatcggcaccaacatccactggtatcagcagcggaccaacggcagccccagactgctgattaagtacgccagcgagtccatcagcggcatccccagcagattttccggcagcggctccggcaccgacttcaccctgagcatcaacagcgtggaaagcgaggacattgccgactactactgccagcagaacaacaactggcccaccaccttcggagccggcaccaagctggaactgaagggcggaggcggaagtggaggcggaggatctggcggcggaggctctcaggtgcagctgaagcagagcggacctggcctggtgcagcctagccagagcctgtccatcacctgtaccgtgtccggcttcagcctgaccaactacggcgtgcactgggtgcgccagagccctggaaaaggactggaatggctgggagtgatttggagcggcggcaacaccgactacaacacccccttcaccagcagactgtctatcaacaaggacaacagcaagagccaggtgttcttcaagatgaacagcctccagagcaacgacaccgccatctactactgtgctagagccctgacctactatgactacgagttcgcctactggggccagggcacactcgtgacagtgtctgct

SEQ ID NO: 33372 - DNA, 723 bp, synthetic construct
  source 1..723: mol_type = other DNA
gagatccagctggtgcagagcggagccgaagtgaagaagcctggcgagagcctgcggatcagctgcaagggcagcggcttcaacatcgaggactactacatccactgggtgcgccagatgcccggcaagggcctggaatggatgggcagaatcgaccccgagaacgacgagactaagtacggccccatcttccagggccacgtgaccatcagcgccgacaccagcatcaacaccgtgtacctccagtggtccagcctgaaggccagcgacaccgccatgtactactgcgcctttagaggcggcgtgtactggggccagggcaccacagtgacagtgtctagcggcggaggcggaagtggaggcggaggatctggcggcggaggctctgatgtcgtgatgacccagagccccgacagcctggctgtgtctctgggagagagagccaccatcaactgcaagtccagccagtccctgctggacagcgacggcaagacctacctgaactggctccagcagaagcccggccagccccccaagagactgatctccctggtgtccaagctggactccggcgtgcccgatagattttccggctctggcagcggcaccgacttcaccctgacaatcagctcccttcaggccgaggacgtggccgtgtactattgctggcagggcacacacttccccggcacctttggcggaggcaccaaggtggaaatcaag

SEQ ID NO: 33373 - DNA, 747 bp, synthetic construct
  source 1..747: mol_type = other DNA
gagctgcagatgacccagagccctagcagcctgtctgccagcgtgggcgacagagtgaccatcacctgtagagccagccagagcatcagcagctacctgaactggtatcagcagaagcccggccagccccccaaactgctgatctactgggccagcaccagagaaagcggcgtgcccgatagattcagcggcagcgagagcggcaccaactacaccctgaccatcagctccctgcagcccgaggacttcgccacctacttttgccagcagagcgacagcctgcccatcacctttggacagggcacccggctggacattcagggcggaggcggaagtggaggcggaggatctggcggcggaggctctgaggtgcaactgctggaatctgggggcggagtggtgcagcctggcagaagcctgagactgagctgtgccgccagcggcttcaccttcagctcctacggaatgcactgggtgcgccaggcccctggcaaaggactggaatgggtggccgtgatctcctacgacggcagcaacaagtactacgccgacagcgtgaagggccggttcaccatcagccgggacaacagcaagaacaccctgtacctgcagatgaacagcctgcgggccgaggacaccgccgtgtactactgcgccaaggatatgggctggggcagcggctggcggccttactactactacggcatggacgtgtggggccagggcaccaccgtgacagtgtcatct

SEQ ID NO: 33374 - DNA, 744 bp, synthetic construct
  source 1..744: mol_type = other DNA
gagcttgtgatgacccagagccccagcagcctgacagtgacagccggcgagaaagtgaccatgagctgcaagagcagccagagcctgctgaacagcggcaaccagaagaactacctgacctggtatcagcagaagcccggccagccccccaagctgctgatctactgggccagcaccagagaaagcggcgtgcccgatagattcaccggctctggcagcggcaccgacttcaccctgacaatcagcagcgtgcaggccgaggacctggccgtgtactactgccagaacgactacagctaccccctgaccttcggagccggcaccaagctggaaatcaagggcggaggcggaagtggaggcggaggatctggcggcggaggctctgaagtgcagctgctggaacagtctggcgccgaacttgtgcggcctggcaccagcgtgaagatcagctgtaaagccagcggctacgccttcaccaactactggctgggctgggtcaagcagaggcctggacacggcctggaatggatcggcgacatctttcccggctccggcaacatccactacaacgagaagttcaagggcaaggccaccctgaccgccgacaagtctagcagcaccgcctacatgcagctgtccagcctgacctttgaggacagcgccgtgtatttctgtgcccggctgcggaactgggacgagcccatggattattggggccagggcaccaccgtgaccgtgtctagt

SEQ ID NO: 33375 - DNA, 738 bp, synthetic construct
  source 1..738: mol_type = other DNA
gacatccaaatgacacagagtccttctagtttgagtgcgagcgtgggggacagggtgaccattacctgcagggccagccagagcataagctcataccttaattggtaccagcaaaaaccaggtaaggcccctaagctcctgatctacgcggcctcttcacttcaatctggggtcccttcccgcttcagtggctccggcagcggcaccgacttcacgctcactatatcaagtctgcagcctgaggatctcgccacctattactgtcaacaaagttattccacccctttcacctttggaccgggcacgaaagtggatattaagggcggaggcggaagtggaggcggaggatctggcggcggaggctctgtgcacgaggtccagcttgtgcagtccggggcagaggtcaagaagcctggttctagcgtaaaagtgagttgcaaagcctcaggtgggacattttcatcctacgcgatcagttgggttagacaggctcctggtcaagggctggaatggatgggcggaattattccaatcttcggaacagcgaattacgcgcagaagttccagggtagagtaaccatcactgctgacaagtccacctccaccgcatacatggaattgtctagtctccggagcgaggatacggcggtgtattattgtgctacgttcgccctgtttggcttccgcgaacaggctttcgacatctgggggcagggcacgacagtcacggttagtagt

SEQ ID NO: 33376 - DNA, 720 bp, synthetic construct
  source 1..720: mol_type = other DNA
tacatccacgtgacacagagccctagcagcctgtccgtgtccatcggcgatagagtgaccatcaactgccagacctctcaaggcgtgggcagcgacctgcactggtatcagcacaaacctggcagagcccctaagctgctgatccaccatgccagctctgtggaagatggcgtgcccagcagattttccggcaccggatttcacaccagcttcaacctgacaatcaacgacctccaggccgacgacatcggcacctactactgtcaagtgctccagagcttcggcagaggcagcagactggatacaaaaggcggaggcggaagtggaggcggaggatctggcggcggaggctctagggcacacctggtgcagtctggcaccgccatgaagaaacctggcgcttccgtcagagtgtcctgtcagacaagcggctacaccttcacagcccacatcctgttctggttcagacaggccccaggcagaggactggaatgggtcggatggatcaagccccagtacggggccgtgaatttcggcggaggcttcagagacagagtgaccctgaccagggacgtgtaccgggaaatcgcctacatggacatccggggcctgaagcctgatgacaccgccgtgtactactgcgccagggatagaagctacggcgacagctcttgggctctcgatgcttggggacagggcacaacagtggtggtgtctgct

SEQ ID NO: 33377 - DNA, 735 bp, synthetic construct
  source 1..735: mol_type = other DNA
gacatcgtgctgacccagagccctctgagcctggccgtgtctctgggacagcctgccatcatcagctgcaaggccagccagagcgtgtcctttgccggcacctctctgatgcactggtatcaccagaagcccggccagcagcccagactgctgatctacagagccagcaacctggaagccggcgtgcccgatagattttccggcagcggcagcaagaccgacttcaccctgaccatcagccccgtggaagccgaagatgccgccacctactactgccagcagagcagagagtacccctacaccttcggcggaggcaccaagctggaaatcaagaggggcggaggcggaagtggaggcggaggatctggcggcggaggctctcaggtccaactggtgcagagcggagccgaggtcgtgaagcctggcgcttccgtgaagattagctgcaaagccagcggctacacctttaccggctactttatgaactgggtcaagcagagccctggccagagcctggaatggatcggcagaatccacccctacgacggcgacaccttctacaaccagaagttccagggcaaggccaccctgacagtggacaagagcagcaacaccgcccacatggaactgctgagcctgaccagcgaggacttcgccgtgtactactgcaccagatacgacggcagccgggctatggactattggggccagggcaccaccgtgaccgtgtctagt

SEQ ID NO: 33378 - DNA, 723 bp, synthetic construct
  source 1..723: mol_type = other DNA
gacgttgtgatgacccagacccccctgagcctgcctgtgacacctggcgaacctgccagcatcagctgtcggagcagccagagcctggtgcacagaaacggcaacacctacctgcactggtatctccagaagcccggccagagccccaagctgctgatccacaaggtgtccaacagattcagcggcgtgcccgacagattctccggcagcggctctggcaccgacttcaccctgaagatcagccgggtggaagccgaggacctgggcgtgtacttctgtagccagagcacccatgtgccccccctgacatttggagccggcaccaagctggaactgaagggcggaggcggaagtggaggcggaggatctggcggcggaggctctgaagtgcagctggtgcagtctggcgctgaggtggaaaagcctggggccagcgtgaagattagctgcaaggccagcggcagcagcttcaccggctacaacatgaactgggtgcgccagaacatcggcaagagcctggaatggatcggagccatcgacccctactacggcggcaccagctacaaccagaagttcaagggcagagccaccctgaccgtggacaagagcaccagcaccgcctacatgcacctgaagtccctgcggagcgaggacaccgccgtgtactactgtgtgtccggcatggaatattggggccagggcaccagcgtgaccgtgtctagt

SEQ ID NO: 33379 - DNA, 717 bp, synthetic construct
  source 1..717: mol_type = other DNA
gagatcgtgatgacccagacccctgccaccctgtctgtgtctgccggcgagagagtgaccattacctgcaaggccagccagagcgtgtccaacgacgtgacctggtatcagcagaagcccggccaggcccccagactgctgatctacagcgccagcaacagatacagcggcgtgcccgccagattttccggcagcggctacggcaccgagttcaccttcaccatcagcagcgtgcagagcgaggacttcgccgtgtacttctgtcagcaagactacagcagcttcggccagggcaccaagctggaaatcaagaggggcggaggcggaagtggaggcggaggatctggcggcggaggctctcaggtgcagctggtggaatctggacctggcgtggtgcagcctggcagaagcctgagaatcagctgtgccgtgtccggcttcagcgtgaccaactacggcgtgcactgggtgcgccagccacctggaaaaggactggaatggctgggcgtgatctgggctggcggcatcaccaactacaacagcgccttcatgtcccggctgaccatctccaaggacaacagcaagaacaccgtgtacctccagatgaacagcctgcgggccgaggacaccgccatgtactactgtgcttccagaggcggccactacggctacgccctggattattggggccagggaaccctcgtgaccgtgtcctct

SEQ ID NO: 33380 - DNA, 726 bp, synthetic construct
  source 1..726: mol_type = other DNA
gacatccagatgacccagaccgccagcagcctgcctgcctctctgggcgacagagtgaccatctcctgtagcgccagccaggacatcagcaactacctgaactggtatcagcagaaacccgacggcaccgtgaagctgctgatcttctacagcagcaacctgcacagcggcgtgcccagcagattttctggcggcggaagcggcaccgactacagcctgaccatcagcaatctggaacccgaggacattgccacctacttttgccaccagtacagcaagctgccctggacctttggcggaggcaccaagctggaaatcaagagaggcggaggcggaagtggaggcggaggatctggcggcggaggctctgaagtgaccctggtggaaagcggcggagacttcgtgaagcctggcggctctctgaaggtgtcctgtgccgccagcggcttcgcctttagccactacgccatgagctgggtgcgccagacccctgccaagagactggaatgggtggcctacatcagcagcggcggctccggcacctactactccgatagcgtgaagggccggttcaccatcagccgggacaacgccaagaacaccctgtacctccagatgcggagcctgcggagcgaggacagcgccatgtatttctgcaccagagtgaagctgggcacctattacttcgactcttggggccagggcaccaccctgaccgtgtcatct

SEQ ID NO: 33381 - DNA, 732 bp, synthetic construct
  source 1..732: mol_type = other DNA
cagttcgtgctgacccagagcccttctgcctctgctgccctgggagcctctgccaagctgacctgtacactgagcagcgcccacaagacctacaccatcgactggtatcagcagcagaagggaaaggcccccagatacctgatccaagtgaagtccgacggcacctacacaaaggccaccggcgtgcccgatagattcagcggcagtagcagcggagccgatagatacctgattatccccagcgtgcaggccgacgacgaggccgattactactgcggcaccgattacaccggcggctacgtgttcggcggaggcacacaactgaccgtgacaggcggaggcggaagtggaggcggaggatctggcggcggaggctctgagcaactgaaagagtctggcggcggactgttcaagcccaccgataccctgaccctgacctgcaccgtgtccggcttcagcctgagctactacggcgtgaactgggtgcgccaggcccctggcaatggcctggaatggatcggcacaatcggcggcagcggcgacacctactatgcctcttgggccaagtccagaagcaccatcatcagaaacaccaacgagaacaccgtgaccctgaagatgaccagcctgacagccgccgacaccgccacctacttttgcgtcagatacgccaacatcggctacgagtatttcaacgtgtggggacccggcaccctcgtgaccgtgtcatct

SEQ ID NO: 33382 - DNA, 729 bp, synthetic construct
  source 1..729: mol_type = other DNA
gacatccagatgacccagagccccagcagcctgtctgccagcgtgggcgacagagtgaccatcacctgtagagccagccagggcatcagctcttggctggcctggtatcagcagaagcccgagaaggcccccaagagcctgatctacgccgcctctagtctccagagcggcgtgcccagcagattttctggcagcggctccggcaccgacttcaccctgacaatcagctccctccagcccgaggacttcgccacctactactgccagcagtacaacagctacccccccacctttggcggaggcaccaaggtggaaatcaagggcggaggcggaagtggaggcggaggatctggcggcggaggctctgaagtgcaactggtggaatcaggcggcggactggtgcagcctggcgagtctctgagactgagctgtgtggcctccggcttcaccttcagccggtacaagatgaactgggtgcgccaggcccctggcaagggactggaatgggtgtcctacatcagccgcagcggcagagacatctactacgccgacagcgtgaagggccggttcaccatcagcagagacaacgccaagaacagcctgtacctccagatgaactccctgcgggacgaggacaccgccgtgtactactgtgccggaaccgtgaccacctattactacttcggcatggacgtgtggggccacggcaccaccgtgacagtgtcatct

SEQ ID NO: 33383 - DNA, 726 bp, synthetic construct
  source 1..726: mol_type = other DNA
cagtctgtggtcacacagccacctagcatgtctgccgctccaggccagcaagtgaccatctcttgtagcggcggcaacagcaacatcgagcggaactacgtgtcctggtatctgcaactgcctggcacagcccctaagctggtcatcttcgacaacgacagacggcccagcggcatccccgatagattttctggcagcaagagcggcaccagcgccacactgggaattaccggacttcagacaggcgacgaggccgactactactgtggcacatgggactctagcctgagaggctgggttttcggcggaggcacaaagctgacagtgcttggtggcggaggcggaagtggaggcggaggatctggcggcggaggctctgaagtgcagctcgttgagtctggcggcggactgattcaacctggcggaagcctgagactgagctgtgccgcttccggcttcaccttcagcaactacgccatgaactgggttcgacaggcccctggcaaaggactggaatgggtgtccaccatcaacggcagaggcagcagcaccatctacgccgattctgtgaagggcagattcaccatcagccgggacaacagcaagaacaccctgtacctccagatgaactccctgagagccgaggacaccgccacctattactgtgcccggtacatcagcagaggactgggcgattcttggggccagggcacactggttacagtg

SEQ ID NO: 33384 - DNA, 729 bp, synthetic construct
  source 1..729: mol_type = other DNA
cagtctgtgctgacacagcctccatctgcctctggcacacctggacagagagtgaccatcagctgtagcggcagcagaagcaacgtcggcggcaactacgtgttctggtatcagcaggtcccaggcgctacccctaagctgctgatctacagaagcaatcagcggcctagcggcgtgcccgatagatttgccggaagcaagagcggcagctctgccagccttgccatctctggactgagaagcgaggacgaggccgactactactgtgccacctgggatgatagcctgagcggcttcgtgtttggcaccggcaccaaagtgacagtgcttggtggcggaggcggaagtggaggcggaggatctggcggcggaggctctgaagttcagctggttgaatctggcggcggactggttaagcctggcggatctctgagactgtcttgtgccgccagcggcttcaccttcagcgattactacatgagctggatcagacaggcccctggcaaaggactggaatgggtgtcctacatcagcagcagcggctccaccatctactacgccgatagcgtgaagggcagattcaccatcagccgggacaacgccaagaacagcctgtacctccagatgaactccctgagagccgaggacaccgccgtgtactattgcgccagaggctacggcaaagcctacgatcaatggggccagggcacactggtcaccgtttcttct

SEQ ID NO: 33385 - DNA, 726 bp, synthetic construct
  source 1..726: mol_type = other DNA
gacatccagatgacccagagccccagcagcctgtctgccagcgtgggcgacagagtgaccatcacctgtagagccagccaggacgtgaacaccgccgtggcctggtatcagcagaagcctggcaaggcccccaagctgctgatctacagcgccagcttcctggaaagcggcgtgcccagcagattcagcggaagcagaagcggcaccgacttcaccctgaccatcagctccctccagcccgaggacttcgccacctactactgccagcagcactacaccacccctcccaccttcggccagaccaaggtggaaatcaagagaggcggaggcggaagtggaggcggaggatctggcggcggaggctctgaagtgcaactggtggaatctggcggcggactggtgcagcctggcggatctctgagactgagctgtgccgccagcggcttcaacatcaaggacacctacatccactgggtgcgccaggcccctggaaagggactggaatgggtggcccggatctaccccaccaacggctacaccagatacgccgacagcgtgaagggccggttcaccatcagcgccgacaccagcaagaataccgcctacctccagatgaacagcctgcgggccgaggataccgccgtgtactactgctcaagatggggaggcgacggcttctacgctatggacgtgtggggccagggcacccttgtgaccgtgtcatct

SEQ ID NO: 33386 - DNA, 765 bp, synthetic construct
  source 1..765: mol_type = other DNA
cagtctgccctgacacagcctcctagcgcctctggctctcccggccagagcatcaccatcagctgtaccggcaccagcaacaacttcgtgtcctggtatcagcagcacgccggcaaggcccccaagctcgtgatctacgacgtgaacaagcggcccagcggcgtgcccgatagattcagcggcagcaagagcggcaacaccgccagcctgacagtgtctggcctccagaccgatgacgaggccgtgtactactgcggcagcctcgtgggcaactgggacgtgatctttggcggaggcaccaagctgaccgtgctgggcggaggcggaagtggaggcggaggatctggcggcggaggctctcagccccagctccaggaatctggccccacactggtggaagccagcgagacactgagcctgacctgtgccgtgtccggcgattctaccgccgcctgcaatagcttctggggctgggtgcgccagcctcctggaaagggactggaatgggtgggaagcctgagccactgcgccagctattggaaccggggctggacctaccacaaccccagcctgaagtccagactgaccctggccctggacacccccaagaacctggtgttcctgaagctgaacagcgtgacagccgccgacaccgccacctactactgtgccagatttggcggcgaggtgctgcggtacaccgactggcctaaacctgcctgggtggacctgtggggcagaggaacactcgtgaccgtgtccagc

SEQ ID NO: 33387 - DNA, 750 bp, synthetic construct
  source 1..750: mol_type = other DNA
gagctggtgctgacacagagccctggcaccctgtctctgtctgccggcgaaagagccaccctgagctgtagagccagccagagcgtgtcctctggcagcctggcttggtatcagcagaagccaggccaggcccccagactgctgatctacggcgcttctaccagagccaccggcatccccgatagattcagcggctctggctccggcaccgacttcaccctgacaatcggcagactggaacccgaggacctggccgtgtactactgccagcagtacggcaccagcccctacacattcggccagggcaccaagctggaaatcggcggaggcggaagtggaggcggaggatctggcggcggaggctctctggaacagagcggagccgaagtgaagaaacccggcagcagcgtgcaggtgtcctgcaaagcaagcggcggcaccttctctatgtacggcttcaactgggtgcgccaggctcctggacacggcctggaatggatgggcggcatcatccccatcttcggcacctccaactacgcccagaaattccggggcagagtgaccttcaccgccgaccaggccacaagcaccgcctacatggaactgaccaacctgcggagcgacgacaccgccgtgtattattgcgccagagacttcggccccgactgggaggatggcgacagctacgatggcagcggcagaggcttcttcgacttctggggccagggaacccttgtgaccgtgtcctca

SEQ ID NO: 33388 - DNA, 690 bp, synthetic construct
  source 1..690: mol_type = other DNA
gacatccagatgacccagagccccagcagcctgtctgccagcgtgggcgacagagtgaccatcacctgtcaggccagccaggacatcaacaactacctgaactggtatcagcagaagcccggcaaggcccccaagctgctgatctacgacgccagcaatctgcagaccggcgtgcccagcagattttccggctctggcagcggcaccgacttcaccttcaccatcgaggacattgccacctactactgccagcagtacaccttcggccctggcaccaaggtggacatcaaaggcggaggcggaagtggaggcggaggatctggcggcggaggctctgaagtgcaactgctggaatctggcggcggactggtgcagcctggcggatctctgagactgagctgtgccgccagcggcttcacctttagctggtacagcatgacctgggtgcgccaggcccctggcaaaggactggaatgggtgtccagcatcgtgccctggggcgatttcacccagtacgccgatagcgtgaagggccggttcaccatcagccgggacaacagcaagaacaccctgtacctgcagatgaacagcctgcgggccgaggacaccgccgtgtactattgtgccaagggacctggctggggcagcttcgatctgtggggcagaggaacccttgtgaccgtgtccagc

SEQ ID NO: 33389 - DNA, 720 bp, synthetic construct
  source 1..720: mol_type = other DNA
gacatccagatgacccagagccccagcagcctgtctgccagcgtgggcgacagagtgaccatcacctgtaccgccagcctgagcgtgtccagcacctacctgcactggtatcagcagaagcccggcagcagccccaagctgtggatctacagcaccagcaacctggcctccggcgtgcccagcagattttctggcagcggctctggcaccagctacaccctgaccatcagctccctccagcccgaggacttcgccacctactactgccaccagtaccacagaagccccctgacctttggcggaggcaccaaggtggaaatcaagagaggcggaggcggaagtggaggcggaggatctggcggcggaggctctgaagtgcaactggtggaatctggcggcggactggtgcagcctggcggatctctgagactgagctgtgccgccagcggcttcagcctgaccaaatacggcgtgcactgggtgcgccaggcccctggaaaaggactggaatgggtgggagtgaagtgggctggcggctccaccgactacaacagcgccctgatgagccggttcaccatcagcaaggacaacgccaagaacagcctgtacctccagatgaactccctgcgggccgaggacaccgccgtgtactactgtgccagagatcaccgggacgctatggactactggggccagggaacactcgtgaccgtgtcctct

SEQ ID NO: 33390 - DNA, 732 bp, synthetic construct
  source 1..732: mol_type = other DNA
gacatccagatgacccagagccccagcagcctgtctgccagcgtgggcgacagagtgaccatcacatgcaaggccagccaggacgtgggaacagccgtggcctggtatcagcagaagcctggcaaggcccccaagctgctgatctacagcgccagctacagatccaccggcgtgcccagcagattttccggctctggcagcggcaccgacttcaccctgaccatctctagcctccagcccgaggacttcgccacctactactgccagcaccactactccgccccctggacatttggcggaggcaccaaggtggaaatcaagggcggaggcggaagtggaggcggaggatctggcggcggaggctctgaagtgcaactggtggaatcaggcggcggactggtgcagcctggcggatctctgagactgagctgtgccgccagcggcttcaccttcagcagaaacggcatgagctgggtgcgccaggcccctggaaaaggactggaatgggtggcaaccgtgtccagcggcggcagctacatctactacgccgacagcgtgaagggccggttcaccatctccagagacaacgccaagaacagcctgtacctccagatgaactccctgcgggccgaggacaccgccgtgtactattgtgccagacagggcaccaccgccctggctaccagattcttcgatgtgtggggccagggcaccctcgtgaccgtgtcatct

SEQ ID NO: 33391 - DNA, 720 bp, synthetic construct
  source 1..720: mol_type = other DNA
gacatccagatgacccagagcttcagcagcctgagcgccagcgtgggcgacagagtgaccatcacctgtagagccagccaggacatcagcaactacctgaactggtatcagcagaagcccggcaaggcccccaagctgctgatctactacaccagcagactgcacagcggcgtgcccagcagattttctggcagcggctccggcaccgactacaccctgacaatcagctccctgcagcccgaggacttcgctacctacttctgtcagcaaggcaacaccctgccctggacctttggcggaggcaccaagctggaaatcaagagaggcggaggcggaagtggaggcggaggatctggcggcggaggctctgaagtgcaactggtgcagtccggcggagggctggtgcagagcggaggatctctgagactgagctgcagagccagcggctacaccttcacccggtactggatgctgtgggtgcgccagaggccaggcaagggactggaatgggtggccgagatcaacccccggaacgaccggaccaactacaacgagaagttcaagacccggttcaccatcagcgtggacagaagcaagaacaccctgtacctgcagatggacagcctgcgggccgaggataccgccgtgtacttttgtgctctgggaggcggctacgctatggactactggggccagggaacccttgtgaccgtgtcctct

SEQ ID NO: 33392 - DNA, 720 bp, synthetic construct
  source 1..720: mol_type = other DNA
gacatccagatgacccagagcccccctagcctgtctgcctctgtgggcggcaaagtgaccatcacatgcaaggccagccaggacatcgaccgctacatggcctggtatcaggacaagcccggcaagggacccaagctgctgatccacgataccagcaccctccagcccggcatccccagcagattttctggcagcggctccggcagagactacagcttcagcatcagcaacctggaacccgaggacattgccacctactactgcctccagtacgacaacctgtggaccttcggcggaggcaccaagctggaaatcaagagaggcggaggcggaagtggaggcggaggatctggcggcggaggctctcaggtgcaactggtgcagagcggagccgagcttgtgaagcctggcgcttccgtgaagatgagctgcaaagccagcggctacatcttcaccaactacaacatccactgggtcaagaagtccccaggccagggcctggaatggatcggagccatctaccccggaaacggcgacgccccttacagccagaagttccaggacagagccaccctgaccgccgacaccagcagcagcaccacctacatggaactgagcagcctgaccagcgaggacagcgccgtgtactattgcgtgcgggccaactgggatgtggccttcgcctattggggccagggcacactggtgtccgtgtcctct

SEQ ID NO: 33393 - DNA, 723 bp, synthetic construct
  source 1..723: mol_type = other DNA
gacatccagatgacccagagccctgccagcctgtctgcctctgtgggcgagacagtgaccatcacctgtcgggtgtccggcaacatccacaactacctggcctggtatcagcagaagcagggcaagagcccccaactgctggtgtacaacgccaagaccctggccgatggcgtgcccagcagattttctggctctggcagcggcacccagtacagcctgaagatcaacagcctccagcccgaggacttcggcagctactactgccagcacttctggtccaacccctacaccttcggcggaggcaccaagctggaaatcaagggcggaggcggaagtggaggcggaggatctggcggcggaggctctcaggtgcaactccagcagtctggcgcttccgtgaaggtgtcctgcaaggccagcgaactcgtgcggcctggcacaggctacgccttcaccaattacctgatcgagtgggtcaagcagaggcccggacagggcctggaatggatcggagtgattaacccaggcagcggcggcaccaactacaacgagaagttcaagggcaaggccaccctgaccgccgacaagagcagcagcacagcctacatgcaactgagcagcctgaccagcgacgacagcgccgtgtacttctgcgcccggtacagaagctacgactggtacttcgacgtgtggggagccggcaccaccgtgacagtgtcatct

SEQ ID NO: 33394 - DNA, 723 bp, synthetic construct
  source 1..723: mol_type = other DNA
gacatccagatgacacagtctccggcgtcactgtccgcctccgtgggggagactgtgactattatttgtagggcatcagttaacatctactcttatttggcctggtaccagcagaagcaaggcaagagtcctcagctgctggtgtataatgcgaagatcctggcagagggcgtgccgagccggttctccggcagcggctcaggtacccaattttccctcaagatcaattcactgcagccagaggactttggcagttactattgtcaacaccactacggcacattcactttcgggtccggtacaaaattggagattaagcgaggcggaggcggaagtggaggcggaggatctggcggcggaggctctcaggtacagttgaaagaaagcgggcctggactggtagcgccttcccaatctctctccatcacgtgcaccatctctggcttctccctgacttcctatggagttcactgggtgaggcagccccccggcaagggactggaatggctggtcgtcatctggtccgacgggtccacaacctacaactccgctctgaaaagtcggctctctatttctaaagataatagcaagagccaggtgtttctgaaaatgaactctctgcagaccgatgatacggccatttactactgcgcttcacactatggctcaaccttggcattcgcttcctggggccacggaacactggtgaccgtttccgcagcc

SEQ ID NO: 33395 - DNA, 747 bp, synthetic construct
  source 1..747: mol_type = other DNA
gacattgtgatgacccagtctcacaaattcatgtccacatcagtaggagacagggtcagcgtcacctgcaaggccagtcagaatgtgggtaataatgtagcctggtatcaacagaaaccagggcaatctcctaaagtactgatttactcggcatcctaccggtacagtggagtccctgatcgcttcacaggcagtggatctgggacagatttcactctcaccatcagtaatgtgcagtctgaagacttggcagagtatttctgtcagcaatataacacctatccattcacgttcggctcggggacaaagttggaaataaaaggcggaggcggaagtggaggcggaggatctggcggcggaggctctgaggtacagctggaggaaagcggtggaggactggtgcaacctggagggtctatgaagctctcttgcgtagcttctgggttcacgttctccaattactggatgaactgggtgcggcagtcccccgagaaaggcctggaatgggtagcagaaattcggttcaagtcccataactatgctacacactttgccgagtctgtcaaaggccggttcactattagtcgagacgacagcaagtcttcagtctacctgcagatgaataacttgcgggcagaggacacaggtatctactactgcaccaggagaatcggcaactccgactatgactggtggtactttgacgtctggggagcaggcaccagcgtgacggtgagttcagcctca

SEQ ID NO: 33396 - DNA, 723 bp, synthetic construct
  source 1..723: mol_type = other DNA
gacatccagatgacccagagcagcagcagcttcagcgtgtccctgggcgacagagtgaccatcacatgcaaggccagcgaggacatctacatccggctggcctggtatcagcagaagcccggcaacgcccccagactgctgattagcgccgccacctctctggaaaccggcatccccagcagattctccggctctggcagcggcgaggactacaccctgacaatcaccagcctccagaccgaggacgtggcaacctactactgccagcagtattggaccaccccctggacctttggcggaggcaccaagctggaaatcaagagaggcggaggcggaagtggaggcggaggatctggcggcggaggctctgatgtgcagctccaggaatctggccccggactcgtgaagcctagccagagcctgagcctgacatgcaccgtgaccggctacagcatcaccatcgactacacctggaactggatcagacagttccccggcaacaaactggaatggatgggctacatcacctacagcggcagcaccgactacaaccccagcctgaagtccagaagctccatcaccagagacacctctatgaaccagttcttcttgcagctgaacagcgtgaccaccgaggacaccgccacctactattgcgccagactgggcagaagatacgccctggactattggggccagggcaccagcgtgacagtgtcctct

SEQ ID NO: 33397 - DNA, 720 bp, synthetic construct
  source 1..720: mol_type = other DNA
gatgtgcagctccaggaaagcggccctggcctcgtgaagcctagccagagcctgagcctgacatgcaccgtgaccggctacagcatcaccagcgactacacctggaactggatcagacagttccccggcaacaagctggaatggatgggctacatcacctacagcggcagcaccagctacaaccccagcctgaagtcccggaactccatcaccagagacaccagcaagaaccagttcttcttgcagctgaacagcgtgaccaccgaggacaccgccacctactactgcgccagactgggcagacggtacaccatggactattggggccagggcacctccgtgaccgtgtctagcggaggcggaggaagtggcggcggaggatctgggggaggcggaagcgatatccagatgacccagtccagcagcagcttcagcgtgtccctgggcgacagagtgaccatcacctgtatggcctccgaggacatctacatccggctggcctggtatcagcagaagcccggcaacgcccccagactgctgattagcgccgccacctctctggaaaccggcgtgccaagcagattcagcggctctggcagcggcaaggactacaccctgagcatcacctccttgcagaccgaggacgtgggcacctactattgccagcagtattggagcagcccctggacctttggcggaggcacaaagctggaaatcaac

SEQ ID NO: 33398 - DNA, 720 bp, synthetic construct
  source 1..720: mol_type = other DNA
gacatccagatgacccagagcagcagcagcttcagcgtgagcctgggcgacagagtgaccatcacctgcatggccagcgaggacatctacatcagactggcctggtaccagcagaagcccggcaacgcccccagactgctgatcagcgccgccaccagcctggagaccggcgtgcccagcagattcagcggcagcggcagcggcaaggactacaccctgagcatcaccagcctgcagaccgaggacgtgggcacctactactgccagcagtactggagcagcccctggaccttcggcggcggcaccaagctggagatcaacggcggaggcggaagtggaggcggaggatctggcggcggaggctctgacgtgcagctgcaggagagcggccccggcctggtgaagcccagccagagcctgagcctgacctgcaccgtgaccggctacagcatcaccagcgactacacctggaactggatcagacagttccccggcaacaagctggagtggatgggctacatcacctacagcggcagcaccagctacaaccccagcctgaagagcagaaacagcatcaccagagacaccagcaagaaccagttcttcctgcagctgaacagcgtgaccaccgaggacaccgccacctactactgcgccagactgggcagaagatacacaatggactactggggccagggcaccagcgtgaccgtgagcagc

SEQ ID NO: 33399 - DNA, 726 bp, synthetic construct
  source 1..726: mol_type = other DNA
gaccagatcgtgctgacccagtcccccgctattatgtccgcatcaccgggcgaaaaagtgacgatctcctgtagcgcttcatctagcgtctcctacatgtattggtatcaacagaaacctgggtctagcccaaagccgtggatctacagaaccagtaaccttgccagtggggtgccagcccgcttcagcggtagtggcagtggaacttcctatagcctcacaataagcaacatggaggctgaagatgccgctgcctattactgccagcagtaccacagttacccaaccacgttcggcgggggaactaagctcgaagtaaaaggcggaggcggaagtggaggcggaggatctggcggcggaggctctgaggtgcagctggtggaatctgggggcggcctggtccaacctaagggatcactcaagctctcttgtgcggccagcggattctctttcaatacctatgctatgaattgggtgagacaggcgcccggaaagggcctcgaatggatagcccatatccggtcaaaatcaaacaatttcgcaacctactatgcggactccgtgaaggaccgattttccatctcccgagatgcctccgagaatattctgttcctgcagatgaataacctcaagacagaggacaccgccatgtactactgtgtgcgccagggcggtgactttcccatggattactgggggcaggggaccagcgtgaccgtgagctct

SEQ ID NO: 33400 - DNA, 729 bp, synthetic construct
  source 1..729: mol_type = other DNA
gacatccagatgacccagagccccagcagcctgtctgccagcgtgggcgacagagtgaccatcacctgtagagccagccagagcatcagcagctacctgaactggtatcagcagaagcccggcaaggcccccaaactgctgatctacgacgccagcaacctggaaaccggcgtgcccagcagattttccggcagcggctctggcaccgacttcaccttcaccatcagctccctccagcccgaggacattgccacctactactgccagcagtacgacaacctgcccctgacctttggcggaggcaccaaggtggacatcaagagaggcggaggcggaagtggaggcggaggatctggcggcggaggctctcaggtgcaactggtggaatctggcggcggagtggtgcagcctggcagaagcctgagactgagctgtgccgccagcggcttcacctttagcagctacgccatgcactgggtgcgccaggcccctggaaaaggcctggaatgggtggccgtgatctcctacgacggctccaacaagtattacgccgacagcgtgaagggccggttcaccatctccagagacaacagcaagaacaccctgtacctccagatgaacagcctgcgggccgaggacaccgccgtgtactattgtgccagggctcacaacagcagctcttggagcttcgactactggggccagggcaccctcgtgaccgtgtcatct

SEQ ID NO: 33401 - DNA, 756 bp, synthetic construct
  source 1..756: mol_type = other DNA
gacgtcgtgatgacccagagccctctgagcctgcctgtgtccctgggcgatcaggccagcatctcctgcagatccagccagagactggtgcacagcaacggcaacacctacctgcactggtatctgcagaagcccggccagagccccaagctgctgatctaccgggtgtccaacagattccccggcgtgcccgatagattcagcggctctggcagcggcaccgacttcaccctgaagatcagccgggtggaagccgaggacctgggcatctatttctgcagccagagcacccacgtgccctacacctttggcggaggcaccaagctggaaatcaagcggggcggaggcggaagtggaggcggaggatctggcggcggaggctctgaagtgcggctgcagcagtctggccccgacctgattaagcctggggccagcgtgaagatgagctgcaaggccagcggctacaccttcaccggctacgtgatgcactgggtcaagcagaggccaggccagggcctggaatggatcggcttcatcaacccctacaacgacgacatccagagcaacgagcggttccggggcaaggccaccctgaccagcgataagagcagcaccaccgcctacatggaactgagcagcctgacctccgaggacagcgccgtgtactactgtgctaggggagccggctacaacttcgacggggcctacagattcttcgacttttggggccagggcaccacactgaccgtgtcctct

SEQ ID NO: 33402 - DNA, 729 bp, synthetic construct
  source 1..729: mol_type = other DNA
agctacgagctgacccagcctcctagcgtgtccgtgtctcctggacagaccgccaccatctcttgcagcggcgatcaactgggcgggaagtacggccactggtatcagaagaagcccggccagagccccgtgctggtgctgtaccaggacagaaaacggcctgccggcatccccgagagattcagcggaagcagcagcggcaacaccatcaccctgaccatcagcggcacccaggccgtggatgaggccgactactactgccaggcttgggacaccaatctgggcggcgtgttcggcggaggcaccaaagtgacagtgctgggacagggcggaggcggaagtggaggcggaggatctggcggcggaggctctcaggtgcaactggtggaaagcggagccgaagtgaagaaacctggggccagcgtgaaggtgtcctgcaaggccagcggctacacctttaccggctactacatgcactgggtgcgccaggctccaggccagggactggaatggatgggccggatcaaccccaatagcggcggcaccaactacgcccagaaattccagggcagagtgaccatgaccagagacaccagcatcagcaccgcctacatggaactgagccggctgagaagcgacgacaccgccgtgtactactgcgccagccctagaggcagaggcagcgccttcgatatttggggccagggcacactcgtgaccgtgtcctct

SEQ ID NO: 33403 - DNA, 738 bp, synthetic construct
  source 1..738: mol_type = other DNA
aacttcatgctgacccagccccacagcgtgtccgagagccctggcaagaccgtgaccatctcctgcaccagaagcagcggctctatcgccagcaaatacgtgcagtggtatcagcagaggcccggcagcagccctaccaccgtgatctacgaggacaaccagaggcctagcggcgtgcccgatagattcagcggcagcatcgacaccagcagcaacagcgccagcctgaccatcagcggcctgagaacagaggacgaggccgactactactgccacagctacgacagcaacaaccactccgtgttcggcggaggcaccaaagtgacagtgctgggacagggcggaggcggaagtggaggcggaggatctggcggcggaggctctgaagtgcaactggtggaaagcgggggaggcgtggtgcagccaggcggatctctgagactgagctgtgccgccagcggcttcaccttcagcagctacgccatgagctgggtgcgccaggcccctggaaaaggcctggaatgggtgtccgccatctctggctctggcggcagcacctactacgccgatagcgtgaagggccggttcagcatcagccgggacaacagcaagaacaccctgtacctccagatgaacagcctgcgggccgaggacaccgccgtgtactactgtgccagaaccagaagctccggggccttcgacatctggggccagggaacactcgtgaccgtgtcctct

SEQ ID NO: 33404 - DNA, 726 bp, synthetic construct
  source 1..726: mol_type = other DNA
gacatccagatgaaccagagccccagcagcctgagcgccagcctgggcgataccatcaccatcacctgtcacgccagccagaacatcaacgtgtggctgagctggtatcagcagaagcccggcaacatccccaagctgctgatctacaaggccagcaacctgcacaccggcgtgcccagcagattttctggcagcggctctggcaccggcttcaccattaccatcagctccctccagcccgaggacattgccacctactactgccagcagggccagagctacccctggacatttggcggaggcaccaagctggaaatcaagagaggcggaggcggaagtggaggcggaggatctggcggcggaggctctgaagtgcaactccagcagagcggcccagagcttgtgaagcctggcgcttccgtgaagattagctgcaaagccagcggctacagcttcaccggctacttcatgaactgggtcaagcagagccacggcaagagcctggagtacatcggcagattcaacccctacaacggcgagacactgtacaaccagaagttcaagggcaaggccaccctgaccgtggacaagagcagcagcaccgtgcacatggaactgctgagcgtgaccagcgaggacagcgccgtgtactactgtggcagaagcggcaacgacgacgctatggactattggggccagggcaccagcgtgaccgtgtctagtgct

SEQ ID NO: 33405 - DNA, 717 bp, synthetic construct
  source 1..717: mol_type = other DNA
gacatcctgctgacacagagccccgccatcctgtccgtgtctccaggcgagagagtgtcctttagctgccgggccagccagaacatcggcaccagcatccactggtatcagcagcggaccaacggcagccccagactgctgattaagtacgccagcgagtccgtgtccggcatccccagcagattttctggcagcggctccggcaccgacttcaccctgagcatcaacagcgtggaaagcgaggacattgccgactactactgccagcacaccaatagctggcccaccacctttggcggaggcaccaagctggaaatcaagagaggcggaggcggaagtggaggcggaggatctggcggcggaggctctcaggtgcaactccagcagtccgacgccgagcttgtgaagcctggcgcttccgtgaagattagctgcaaggccagcggctacaccttcaccgaccacgccattcactgggtcaagcagaagcccgagcagggcctggaatggatcggctacttcagccccggcaacggcgacatcaagtacaacgagaagttcaagggcaaggccaccctgaccgccgacaagagcagcagcacagcctacatgcaactgaacagcctgaccagcgaggactccgccgtgtacttctgcaagcggagctacggcaactacgactactggggccagggcaccacactgaccgtgtctagt

SEQ ID NO: 33406 - DNA, 732 bp, synthetic construct
  source 1..732: mol_type = other DNA
gacatcgtgatgacccagagccccgatagcctggccgtgtctctgggagagagagccaccatcaactgcaagagcagccagagcctgctgaacagcggcgaccagaagaactacctgacctggtatcagcagaagcccggccagccccccaagctgctgatctactgggccagcaccagagaaagcggcgtgcccgatagattcagcggcagcggaagtggcaccgacttcaccctgaccatcagttctcttcaggccgaggacgtggccgtgtactactgccagaacgactacagctaccccctgaccttcggccagggcaccaaggtggaaatcaagggcggaggcggaagtggaggcggaggatctggcggcggaggctctcaggtgcagctggtgcagtctggggccgaagtgaagaaaaccggcagcagcgtgaaggtgtcctgcaaggccagcggctacacctttaccgaccacgccattcacgtgtggcggcaggctccaggacaggccctggaatggatgggccacttcagccccggcaacaccgacatcaagtacaacgacaagttcaagggcagagtgaccctgaccgtggaccgcagcatgagcaccgcctacatggaactgagcagcctgcggagcgaggacaccgccatgtactattgcaagaccagcaccttctttttcgactactggggccagggaacaatggtcaccgtgtccagc

SEQ ID NO: 33407 - DNA, 729 bp, synthetic construct
  source 1..729: mol_type = other DNA
gacatccagatgacccagagccccagcagcctgtctgccagcgtgggcgacagagtgaccatcacatgcaaggccagccaggacgtgtccattgccgtggcctggtatcagcagaagcccggcaaggcccccaaggtgctgatctacagcgccagctacagatacaccggcgtgcccgacagattcagcggctctggcagcggcaccgacttcaccttcaccatcagctccctccagcccgaggatattgccgtgtactactgccagcagcactacatcacccccctgacctttggcggaggcaccaaggtggaaatcaagggcggaggcggaagtggaggcggaggatctggcggcggaggctctcagatccaactggtgcagagcggccacgaagtgaagaaacctggggccagcgtgaaggtgtcctgcaaagccagcggctacacctttaccaactacggcatgaactgggtgcgccaggcccctggacagggcctggaatggatgggctggatcaacaccaagaccggcgagcccacctacgccgaagagttcaagggcagattcgtgttcagcctggaaaccagcgcctccaccgcctacctccagatcagctctctgaaggccgaggacaccgccatgtacttttgcggcagaggcggctacggcagcagctactggtacttcgatgtgtggggccagggcaccaccgtgaccgtgtcatct

SEQ ID NO: 33408 - DNA, 738 bp, synthetic construct
  source 1..738: mol_type = other DNA
caggctgtcgtgacacagcctcctagcgcctctggcacaccaggccagagagtgaccatctcctgtagcggcagcagcagcaacatcggcagcaacaccgtgaactggtatcagcaggtgcccggcaccgctcccaagctgctgatctacagcaacaaccagcggcccagcggcgtgcccgatagattttctggcagcaagagcggcaccagcgccagcctggctatctctggactccagtccgaggacgaggccgactactattgcgccgcctgggacgatagcctgaacggctgggtgttcggcggaggcaccaagctgacagtgctgggcggaggcggaagtggaggcggaggatctggcggcggaggctctcagatgcaactggtgcagagcggagccgaagtgaaagagcctggcgagagcctgcggatctcctgcaagggcagcggctacagcttcaccaatttctggatctcttgggtgcgccagatgcccggcaagggcctggaatggatgggcagagtggaccccggctactcctacagcacctacagccctagcttccagggccacgtgaccatcagcgccgacaagagcaccagcaccgcctacctccagtggaacagcctgaaggccagcgacaccgccatgtactactgcgccagagtgcagtacagcggctattacgattggttcgacccctggggccagggcacactcgtgacagtgtcaagc

SEQ ID NO: 33409 - DNA, 720 bp, synthetic construct
  source 1..720: mol_type = other DNA
gacatccagatgacccagagccccagcacactgagcgccagcgtgggcgacagagtgaccatcacctgtcgggccagccagaacatcaacaagtggctggcctggtatcagcagaggcccggaaaagccccccagctgctgatctacaaggccagcagcctggaaagcggcgtgcccagcagattttctggcagcggctctggcaccgagtacaccctgaccatcagctccctccagcccgacgacttcgccacctactactgccagcagtacaacagctacgccaccttcggccagggcaccaaggtggaaatcaagagaggcggaggcggaagtggaggcggaggatctggcggcggaggctctcaggtgcagctggtgcagtctggggccgaagtgaagaagcctggcgagagcctgaagatcagctgcaagggctccggctacaacttctctaacaagtggatcggctgggtgcgccagctgcctggcagaggactggaatggatcgccatcatctaccccggctacagcgacatcacctacagccccagcttccagggccgcgtgacaatcagcgccgacaccagcatcaacaccgcctacctgcactggcacagcctgaaggccagcgacaccgccatgtactactgcgtgcggcatacagccctggctggcttcgattattggggcctgggcaccctcgtgaccgtgtctagt

SEQ ID NO: 33410 - DNA, 735 bp, synthetic construct
  source 1..735: mol_type = other DNA
cagagcgtcgtgacacagcctcctagcgtgtcagtggcccctggcaagaccgccagaatcacctgtggccggaacaacatcggcagcaagagcgtgcactggtatcagcagaagcccggccaggctcctgtgctggtggtgtacgacgacagcgacagacccagcggcatccccgagagattcagcggcagcaactccggcaataccgccaccctgaccatcagcagagtggaagccggcgacgaggccgactactactgccaagtgtgggacagcagcagcgatcacgtggtgtttggcggaggcaccaagctgacagtgctgggtggcggaggcggaagtggaggcggaggatctggcggcggaggctctgaagtgcaactggtgcagtctggcggaggggtcgtgcggcctggcggatctctgagactgtcttgtgccgccagcggcttcaccttcgacgactacggcatgagctgggtgcgccaggcccctggaaaaggcctggaatgggtgtccggcatcaactggaatggcggcagcaccggctacgccgattctgtgcggggcagattcaccatcagccgggacaacgccaagaacagcctgtacctgcagatgaactccctgcgggccgaggacaccgccctgtactattgcgccagagagcggggctacggctaccacgaccctcacgattattggggccagggcacccttgtcaccgtgtcctct

SEQ ID NO: 33411 - DNA, 732 bp, synthetic construct
  source 1..732: mol_type = other DNA
gacatcgtgctgacacagagccctgcttctctggccgtgtctctgggacagagagccaccatcagctgtagagccagcgagagcgtggacaactacggcaacaccttcatgcactggtatcagcagaagcccggccagcctcctaagctgctgatctacagagccagcaacctggaaagcggcatccccgccagattttctggcagcggcagcagaaccgacttcaccctgaccatcaatcccgtggaagccgacgacgtggcaacctactactgccagcagagcaacgaggaccctcctacatttggagccggcaccaagctggaactgaaaggcggaggcggaagtggaggcggaggatctggcggcggaggctctcagattcagctggtgcagtctggccccgagctgaagaaacctggcgagacagtgaagatcagctgcaaggccagcggctacatcttcaccaattacggcatgaactgggtcaagcaggcccctggcaagagcttcaagtggatgggctggatcaacacctacaccggcgagagcacatacagcgccgacttcaagggcagattcgccttcagcctggaaaccagcgccagcacagcctacctgcacatcaacgacctgaagaacgaggacaccgccacctacttttgcgccagaagcggcggctacgaccctatggattattggggccagggcaccagcgtgaccgtttcttct

SEQ ID NO: 33412 - DNA, 726 bp, synthetic construct
  source 1..726: mol_type = other DNA
gagatcgtgctgacacagagccctggcaccctgagcctgtctccaggcgaaagagccacactgagctgtcgggccagccagagcgtgtccaatacctacctggcctggtatcaccagaggcccggacaggctccccggctgctgatctatggcgcttctagcagagccaccggcatccccgatagattcagcggctctggcagcggcaccgacttcgccctgacaatcagctccctggaacccgaggacttcgccgtgtactactgccagcagtacagcaactcctggaccttcggccagggcaccaaggtggaaatcaagagaggcggaggcggaagtggaggcggaggatctggcggcggaggctctcaggtgcaactggtggaatctggcgggggagtggtgcagcctggcagaagcctgagactgtcttgtgccgccagcggcttcaccttcagcagctacgacatgcactgggtgcgccaggcccctggcaaaggactggaatgggtggccgtgatctcctacgacggcaccaacgagtattacgccgacagcgtgaagggccggttcaccatctccagagacaccagcaagaacaccctgtacctccagatgaacagcctgcgggccgaggacacagccgtgtattattgcgccagagagcggtacttcgactggtccttcgactactggggccagggaaccctggtgtccgtgtctagt

SEQ ID NO: 33413 - DNA, 723 bp, synthetic construct
  source 1..723: mol_type = other DNA
gagctgacacaggaccctgctgtgtctgttgccctgggccagacagtgcggattacctgtcaaggcgacagcctgagaagcaactacgccaactggtatcagcagaagcccggacaggctcccgtgctggttatctacggccagaacaacagacccagcggcatccccgatagattcagcggctctagctctggcaataccgccagcctgacaatcactggcgctcaggctgccgatgaggccgactactactgcgatagcagagtgtccaccggcaatcacgtggtgtttggcggcggaacaaagctgacagtgctcggacaaggcggaggcggaagtggaggcggaggatctggcggcggaggctctgaagttcagctggtgcagagcggagccgaagtgaagaaacctggggcctctgtgaaggtgtcctgcaaggcttccggctacacctttaccagctacgccatgcactgggtccgacaggcacctggacaacggcttgaatggatgggctggatcaacgccggcaacggcaacaccaagtacagccagaaattccagggccgcgtgaccatcaccagagatacaagcgccagcaccgcctacatggaactgtctagcctgagatccgaggacaccgccgtgtactactgtgccagagacatcagctacggcagcttcgactattggggccagggcacactggtcaccgttagctct

SEQ ID NO: 33414 - DNA, 711 bp, synthetic construct
  source 1..711: mol_type = other DNA
gacatccagatgacacagagccctagcagcctgtctgccagcgtgggagacagagtgaccatcacctgtagcgccaccagcagcatcagctacatgcactggtatcagcagaagcccggcaaggcccctaaaggctggatctacgataccagcaaactggcccacggcgtgcccagcagattttctggttctggcagcggcaccgacttcaccctgacaatatctagcctccagcctgaggacttcgccacctactactgccaccagagaagaagctaccccttcaccttcggccagggcaccaaggtggaaatcaaaggcggaggcggaagtggaggcggaggatctggcggcggaggctctgaagtgcaactggttcagagcggagccgaagtgaagaaacctggggcctctgtgaaggtgtcctgcaaggcttccggctacacctttaccaatttctggattcactgggtccgacaggctccaggccaaggactggaatggatcggagagatcgaccccagcgacagctacaccaactacaaccagaaattcaaaggccgggtcaccatcaccagagacaccagcacaagcaccgcctacctggaactgagcagcctgagaagcgaggacaccgccgtgtactactgcgccagggaaatcaccaccgtggattattggggccagggaaccctggtcaccgtgtcatct

SEQ ID NO: 33415 - DNA, 732 bp, synthetic construct
  source 1..732: mol_type = other DNA
gacatccagatgacacagagccctagcagcctgtctgccagcgtgggagacagagtgaccatcacatgcaaggccagccagggcttcaacaaatacgtggcctggtatcagcagaagcccggcaaggctcctaagctgctgatctactacaccagcacactccagcctggcgtgcccagcagattttctggctctggcagcggcagagactacaccctgacaatatccagcctccagccagaggacttcgccacctactactgtctccagtacggcaacctgctgtacgcctttggacagggcaccaaggtggaaatcaagagaggcggaggcggaagtggaggcggaggatctggcggcggaggctctgaagttcagcttgtgcagagcggagccgaagtgaagaaacctggggcctctgtgaaggtgtcctgcaaagccagcggctacacctttaccagctactggatcggctgggtccgacaggctcctggacaaggactggaatggatcggcgacatctatcccggcggaggctacaccaactacaacgagaagttcaagggccgcgtgacaatcaccagagacacctctacaagcaccgcctacctggaactgagcagcctgagaagcgaggacaccgccgtgtactactgcgccagactggatggcagcagctacagaggcgctatggattcttggggccagggcacactggtcaccgtttcttct

SEQ ID NO: 33416 - DNA, 720 bp, synthetic construct
  source 1..720: mol_type = other DNA
gacatccagatgacacagagccctagcagcctgtctgccagcgtgggagacagagtgaccatcacctgtagagccagccaggacatccggtactacctgaactggtatcagcagaagcccggcaaggcccctaagctgctgatctatgtggcctccagcctccagagcggagtgccttctagattttctggcagcggctccggcaccgagtttaccctgacagtgtctagcttgcagcccgaggacttcgccacctactactgcctgcaagtgtacagcacccctcggacctttggacagggcaccaaggtggaaatcaaaggcggaggcggaagtggaggcggaggatctggcggcggaggctctgaagtgcagcttgttgaatctggcggcggactggctaagcctggcggatctctgagactgtcttgtgccgccagcggcttccggttcaccttcaacaactactacatggactgggtccgacaggcccctggacaaggacttgaatgggtgtccagaatcagcagcagcggcgaccctacttggtacgccgattctgtgaagggcagattcaccatcagcagagagaacgccaagaacaccctgttcctccagatgaactccctgagagccgaggacaccgccgtgtactattgtgcctctctgaccaccggcagcgattcttggggacagggcgtgctggttaccgtgtcatct

SEQ ID NO: 33417 - DNA, 723 bp, synthetic construct
  source 1..723: mol_type = other DNA
gagatcgtgatgacacagagccccgccacactgagtgtgtctccaggcgaaagagccacactgtcctgtagagccagccagagcgtgtccagaaacctggcctggtatcagcagaagcctggacaggctccccggctgttgatctacggcgcttctacaagagccaccggcattcccgccagattttctggctctggcagcggcaccgagttcaccctgacaatcggaagcctccagagcgaggacttcgccgtgtactactgccagcagtacaagacctggcctcggacctttggacagggcaccaacgtggaaatcaaaggcggaggcggaagtggaggcggaggatctggcggcggaggctctcaagttcagctgcaacaatggggagccggcctgctgaagcctagcgaaacactgtctctgacctgcgccgtgttcggcggctctttcagcggctactactggtcctggatcagacagcctcctggcaaaggactggaatggatcggcgagatcaaccaccggggcaacaccaacgacaaccccagcctgaaaagcagagtgaccatcagcgtggacaccagcaagaaccagttcgccctgaagctgagcagcgtgacagccgctgataccgccgtgtattattgcgccagagagcggggctacacctacggcaatttcgatcactggggccagggcaccctggtcacagtttcttct

SEQ ID NO: 33418 - DNA, 741 bp, synthetic construct
  source 1..741: mol_type = other DNA
gacatccagatgacccagagccccagcagcctgtctgccagcgtgggcgacagagtgaccatcacatgcaaggccagcaagaacatcagaagctacctggcctggtatcagcagaagcccggcaaggcccccaagctgctgatctacagcggcagcacactgcacagcggcgtgcccagcagattttccggctctggcagcggcaccgacttcaccctgaccatctctagcctccagcccgaggacttcgccacctactactgccagcagcaccacgagtaccccctgacattcggccagggcaccaaggtggaaatcaagagaggcggaggcggaagtggaggcggaggatctggcggcggaggctctcaggtgcaactccaggaatctggccccggactcgtgaagcccagcgagacactgagcctgacctgtaccgtgtccggctacaccatcaccagcggctacgactggtcctggatcagacagcctcctggcaagggcctggaatggatcggctacatcaactacggcggctccaccaactacaagcccagcctgggaagccgcgtgacaatcagcgtggacacctccaagaaccagttcagcctgaagctgagcagcgtgacagccgccgataccgccgtgtactactgcgcccggtacaacgagtacaagagctacatctacgattggtacttcgacttctggggccagggaaccctcgtgaccgtgtctagt

SEQ ID NO: 33419 - DNA, 747 bp, synthetic construct
  source 1..747: mol_type = other DNA
cagtctgtggtcacacagcctccatccgtgtctgctgcccctggacagaaagtgaccatctcctgtagcggcagcagcagcaacatcggcaacaactacgtgtcctggtatcagcagctccccggcacagctcccaaactgctgatctacgacaacaacaagcggcccagcggcatccccgatagattttctggcagcaagagcggcaccagcgccacactgggaattaccggacttcagacaggcgacgaggccgactactactgtggcacatgggatggcagcctgtacaccatgcttttcggcggaggcaccaagctgacagtgcttggcggaggcggaagtggaggcggaggatctggcggcggaggctctgaagtgcaactggtggaatctggcggcggactggttaagcctggcggatctctgagactgtcttgtgccgccagcggcttcaccttcagcaatgcctggatgagctgggttcgacaggcccctggaaaaggactggaatgggtcggattcatccggtccaaagcctacggcggcaccacagaatatgccgcctctgtgaagggcagattcaccatcagccgggacgacagcaagtctatcgcctacctccagatgaacaacctgaaaaccgaggacaccgccgtgtactactgcgccagagatggcctgtacagcagctcttggtacgacagcgattactggggccagggcacactggtcacagtgtcatct

SEQ ID NO: 33420 - DNA, 762 bp, synthetic construct
  source 1..762: mol_type = other DNA
cagtctgtgctgacacagcctcctagtgtgtctggcgctcctggacagagagtgaccatctcttgtaccggcagcagcagcaatatcggagccggctatgacgtgcactggtatcagcagctccctggcacagcccctaaactgctgatcttcggcaacagcaacagacccagcggcgtgcccgatagattcagcggctttaagagcggcacaagcgccagcctggctatcactggactgcaagccgaggacgaggccgactacttctgccagagctacgatagcagcctgagcggcagcggagtgtttggcacaggcaccaaagtgacagtgcttggcggcggaggcggaagtggaggcggaggatctggcggcggaggctctcaaatgcaactggttcaaagcggcggtggcctggtgcaacctggaagaagtctgagactgagctgtgccgccagcggcttcaccttcgatgattacgccatgcactgggtccgacaggcccctggaaaaggactggaatgggtgtccggcatctcctggaatagcggctctatcggctacgccgacagcgtgaagggcagattcaccatcagccgggacaacgccaagaacagcctgtacctccagatgaactccctgagagccgaggatacagccctgtactactgcgccaaggacatccacagcggcagctactacggcctgctgtactacgctatggacgtgtggggccagggcacaaccgtgacagtttcttct

SEQ ID NO: 33421 - DNA, 762 bp, synthetic construct
  source 1..762: mol_type = other DNA
ctgcctgttctgacacagcctccatctgcctctggcacacctggacagagagtgaccatcagctgtagcggcagaagcagcaacatcggcagcaacagcgtgaactggtacagacagcttcctggcgctgcccctaagctgctgatctacagcaacaaccagcggcctcctggcgtgccagtcagattttctggcagcaagagcggcacaagcgccagcctggctatttctggactccagtctgaggacgaggccacctactactgtgccacctgggacgacaacctgaacgtgcactacgtgttcggcaccggcaccaaagtgacagtgcttggaagtagaggcggaggcggaagtggaggcggaggatctggcggcggaggctctcttgaaatggctcaggtgcagctggtgcagagcggagccgaagtgaagaaacctggcagcagcgtgaaggtgtcctgcaaagcttctggcggcaccttcagcagctacgccatctcttgggttcgacaggcccctggacaaggactggaatggatgggcagaatcatccccatcctgggaatcgccaactacgcccagaaattccagggcagagtgacaatcaccgccgacaagagcaccagcaccgcctacatggaactgagcagcctgagaagcgaggacaccgccgtgtactattgtgcaagaggcggctactacagccacgacatgtggagcgaagattggggccagggcacactggtcacagtgtcatct

SEQ ID NO: 33422 - DNA, 729 bp, synthetic construct
  source 1..729: mol_type = other DNA
gacatcgtgctgacacagagccctgcttctctggccgtgtctctgggagagagagccaccatcaactgtagagccagcgagagcgtgtccgtgattggagcccacctgatccactggtatcagcagaagcctggacagcctcctaagctgctgatctacctggcctccaacctggaaacaggcgtgccagccagattttctggcagcggctctggcaccgatttcaccctgacaatcagcagcctccaggccgaagatgccgccatctactactgcctccagagccggatcttccccagaacctttggacagggcaccaagctggaaatcaaaggcggaggcggaagtggaggcggaggatctggcggcggaggctctcaagttcagctggtgcagtctggctccgagctgaagaaacctggcgagtccgtgaagatcagctgcaaggccagcggctacaccttcaccgactacagcatcaactgggtcaagcaggcccctggacagggactgaaatggatgggctggatcaacaccgagacaagagagcccgcctacgcctacgacttcagaggcagattcgtgttctccctggacaccagcgccagcacagcctatctccagatcagctctctgaaggccgaggataccgccgtgtacttctgcgccctggactacagctacgctatggactattggggccagggcaccctggtcacagtctcttct

SEQ ID NO: 33423 - DNA, 732 bp, synthetic construct
  source 1..732: mol_type = other DNA
gacatcgtgctgacacagtctcccgccacactgtcactgagccctggcgatagagccacactgagctgtagagccagcgagagcgtgacaatcctgggcagccacctgatctactggtatcagcagaagcccggacaggcccctagactgctgattcagctcgccagcaatgtgcagacaggcatccctgccagattttccggcagcggcagcagaaccgatttcaccctgaccataagcagcctggaacctgaggacttcgccgtgtactactgcctccagagccggacaatccccagaacctttggacagggcaccaagctggaaatcaagagaggcggaggcggaagtggaggcggaggatctggcggcggaggctctcaagttcaactggtgcagagcggctccgagctgaagaaacctggcgagtccgtgaagattagctgcaaggccagcggctacaccttcacacactacagcatgaactgggtccgacaggctccaggccaaggactggaatggatgggcagaatcaacaccgagacaggcgagcccctgtacgccgacgatttcaagggcagattcgtgttcagcctggacaccagcgccagcacagcctatctccagatcagctctctgaaggccgaggacaccgccgtgtattattgcagcaacgactacctgtactccctggactattggggccagggcacactggtcacagtgtctagt

SEQ ID NO: 33424 - DNA, 744 bp, synthetic construct
  source 1..744: mol_type = other DNA
gacttcgtgatgacacagagccctgatagcctggccgtgtctctcggcgagcgagtgaccatgagctgcaagtctagccagagcctgctgaacagcggcaaccagaagaactacctgacctggtatcagcagaagcccggccagcctcctaagctgctgatctactgggccagcaccagagaaagcggcgtgcccgatagattttctggctctggcagcggcaccgacttcaccctgacaatttctagcctgcaagccgaggacgtggccgtgtactactgccagaacgactacagctacccctacaccttcggccagggcaccaagctggaaatcaaaggcggaggcggaagtggaggcggaggatctggcggcggaggctctgaagtgcaactggttcagagcggagccgagctgaagaaacctggggccagcgtgaaggtgtcctgtaaagccagcggctacacctttaccgactactacatgaaatgggtccgacaggccccaggccagggactcgaatggatcggcgatattatccccagcaacggggccaccttctacaaccagaaattcaagggccgcgtgaccatcaccgtggacaagagcacaagcaccgcctacatggaactgagcagcctgagaagcgaggacaccgccgtgtattattgcgccagaagccatctgctgcgggccagttggttcgcctattggggacagggaaccctggtcaccgttagctct

SEQ ID NO: 33425 - DNA, 744 bp, synthetic construct
  source 1..744: mol_type = other DNA
gacttcgtgatgacacagagccctgatagcctggccgtgtctctcggcgagcgagtgaccatgagctgcaagtctagccagagcctgctgaacagcggcaaccagaagaactacctgacctggtatcagcagaagcccggccagcctcctaagctgctgatctactgggccagcaccagagaaagcggcgtgcccgatagattttctggctctggcagcggcaccgacttcaccctgacaatttctagcctgcaagccgaggacgtggccgtgtactactgccagaacgactacagctacccctacaccttcggccagggcaccaagctggaaatcaaaggcggaggcggaagtggaggcggaggatctggcggcggaggctctcaagtgcaactggttcagagcggagccgagctgaagaaacctggggccagcgtgaaggtgtcctgtaaagccagcggctacacctttaccgactactacatgaaatgggtccgacaggccccaggccagggactcgaatggatcggcgatattatccccagcaacggggccaccttctacaaccagaaattcaagggccgcgtgaccatcaccgtggacaagagcacaagcaccgcctacatggaactgagcagcctgagaagcgaggacaccgccgtgtattattgcgccagaagccatctgctgcgggccagttggttcgcctattggggacagggaaccctggtcaccgttagctct

SEQ ID NO: 33426 - DNA, 714 bp, synthetic construct
  source 1..714: mol_type = other DNA
gacgtgcagatcacacagagccctagctacctggctgcctctcctggcgagacaatcaccatcaactgtcgggccagcaagagcatcagcaaggacctggcctggtatcaagagaagcccggcaagaccaacaagctgctgatctacagcggcagcacactccagtctggcatccccagcagattttccggctctggcagcggcaccgatttcaccctgaccataagcagcctggaacctgaggacttcgccatgtactactgccagcagcacaacaagtacccctacacctttggcggaggcaccaagctggaaatcaagagaggcggaggcggaagtggaggcggaggatctggcggcggaggctctcaagttcaactgcaacagcctggggccgagcttgttagacctggcgcttctgtgaagctgagctgcaaggccagcggctacaccttcaccagctactggatgaactgggtcaagcagcggcctgaccagggcctcgaatggatcggcagaatcgacccctacgacagcgagacacactacaaccagaagttcaaggacaaggccatcctgaccgtggacaagagcagctccaccgcctacatgcaactgagcagcctgacctctgaggatagcgccgtgtactattgcgccagaggcaactgggacgactattggggccagggcacaaccctgacagtgtctagt

SEQ ID NO: 33427 - DNA, 720 bp, synthetic construct
  source 1..720: mol_type = other DNA
gagatcgtgctgacacagagccctaccagcatgacagcctctccaggcgagcaagtgaccatcacctgtagagccagcagcagcatcaactacatgcactggtatcagcagaagcctggcgcaagccccagaccttggatctacgagacaagcaagctggcctccggcgtgcccgatagattttctggatctgccagcggcaccagctacagcctgaccatcaacaacatggaagccgaggacgccgccacctactactgccagcagtggaattacccctcctggacctttggcggaggcaccaagctggaacttaaaggcggaggcggaagtggaggcggaggatctggcggcggaggctctgaagtgcagctcgttgagtctggtggcggactggttcagcctggaagaagcctgaagctgagctgtgccgccagcggcttcaccttcagcgactacaatatggcctgggtccgacaggcccctaagaaaggactggaatgggtcgccaccatcctgtacgatggcggcagaacctactaccggggcagcgtgaagggcagattcaccatcagcagagacaacgccaagagcaccctgtacctgcggatggactctctgagaagcgaggataccgccacatattactgtgccacacacagccggggcaccgactactttgattattggggccagggcgtgatggttaccgtgtctagt

SEQ ID NO: 33428 - DNA, 747 bp, synthetic construct
  source 1..747: mol_type = other DNA
gacatcgtgatgacacagagcccttctagcctggccgtgtctgagggcgagacagtgaccatcaactgcaagagcagccagagcttcctgtctagcggcgacggcaagaattacgtggcctggtatcagtacaagcccggacagagccccaagctgctgatctactgggccagcacaagacagagcggcgtgcccgatagattcatcggctctggcagcggcaccgacttcaccctgacaatctctacagtgcaggccgaggacctggctatctactactgccagcagtattacgacacccctctgacctttggctccggcaccaagctggaaatcaaaggcggaggcggaagtggaggcggaggatctggcggcggaggctctgaagtgaagctgcaagagtctggccccagcctggtgcagagtagccaaacactgagcctgacctgtaccgtgtccggctttagcctgaccagctaccacatccactgggtccgacagacccctggcaaaggactggaatggatgggcgtgatgtggagcgacggcgacaccagctataacagcgccctgaagtcccggctgagcatcagcagagatacaagccagagccaggtgttcctgaagatgaacagcctccagaccgaggacaccgccacctactattgtgccagaggctactacagcagctacctgtacctttggttcgcctattggggccagggcaccctggttacagtcagctct

SEQ ID NO: 33429 - DNA, 759 bp, synthetic construct
  source 1..759: mol_type = other DNA
gacgtgctgatgacccagacacctgtgtctctgccagtgtctctcggaggccaggtgtccatctcctgtagaagcagccagagcctggtgcactccgacggcgatacctacctgcactggtatctccagaagcctggacagagccctcagctcctgatctaccgggtgtccaacagattcagcggcgtgcccgatagattttccggcagcggctctggcaccgacttcaccctgaagatcagcagagtggaacccgaggacctgggcctgtactactgtctccagaccacacacttcccaccttggacctttggcggaggcaccaagctggaaatgaaaggcggaggcggaagtggaggcggaggatctggcggcggaggctctcaggttcagctccagcagtctggacccgagcttagaaggccaggatctagcgtcagactgagctgcaaggccagcggctaccggatcaaggacttcctgatccactggattaagaacagacccgagcacggcctggaatggatcggatggattgaccctgaggacggcgagactaagtacgcccagaagttccagaccaaggccacactgaccgccgacacctctagcaacaccgcctacatgcaactgagcagcctgaccagcgaggacaccgccacctacttttgtgctagatggggcgacgtgtactacggcctgatgagaggccatgtgatggatgcctggggccagggaacaagcgtgacagtctcttct

SEQ ID NO: 33430 - DNA, 801 bp, synthetic construct
  source 1..801: mol_type = other DNA
atcaacatctacaacgccgagcctgccaatcctagcgagaagaacagccccgaattcgacatcgtgatgacacagagccccgccacactgtcactgtctccaggcgaaagagccacactgagctgtcggagcagcaagagcctccagaacgtgaacggcaacacctacctgtactggttccagcagaagcccggccagtctcctcagctcctgatctacagaatgagcaacctgaacagcggcgtgcccgacagattttctggcagcggaagcggcaccgagttcaccctgaccataagcagcctggaacctgaggacttcgccgtgtactactgtatgcagcacctggaataccccatcaccttcggagccggcaccaagctggaaatcaaaggcggaggcggaagtggaggcggaggatctggcggcggaggctctgaagtgcaactggttgaatctggcggcggactggttaagcctggcggatctctgaagctgagctgtgccgccagcggctacacctttaccagctacgtgatgcactgggtccgacaggcccctggcaaaggacttgagtggatcggctacatcaacccctacaacgatggcaccaagtacaacgagaagttccagggcagagtgaccatcagctccgacaagagcatcagcaccgcctacatggaactgagcagcctgagaagcgaggataccgccatgtactattgcgccagaggcacctactactacggcaccagagtgttcgactactggggccagggaaccctggtcacagtctcttct

SEQ ID NO: 33431 - DNA, 732 bp, synthetic construct; identical to SEQ ID NO: 387
  source 1..732: mol_type = other DNA

SEQ ID NO: 33432 - DNA, 738 bp, synthetic construct
  source 1..738: mol_type = other DNA
cagatcgtgctgtctcagtctcctgccatcctgagcgcttccccaggcgagaaagtgaccatgacctgtagagccagcagcagcgtgtcctacatgcactggtatcagcagaagcccggcagcagccctaagccttggatctacgccaccagcaatctggcctctggcgtgccagccagattttctggctctggcagcggcaccagctacagcttcacaatcagcagagtggaagccgaggacgccgccacctactattgtcagcagtggaccttcaatcctcctaccttcggcggaggcacccggctggaaatcaaaagaacagtggctgctggcggaggcggaagtggaggcggaggatctggcggcggaggctctcaggcttatctgcaacagagcggagccgaactcgtcagacctggcgcttctgtgaagatgagctgcaaggccagcggctacaccttcaccagctataatatgcactgggtcaagcagacccctcggcagggactcgaatggatcggcggaatctatcccggcaacggcgacacctcctacaaccagaagttcaagggcaaagccacactgaccgtgggcaagagcagcagcaccgcctatatgcagctcagcagcctgaccagcgaggacagcgccgtgtacttctgcgccagatacgactacaactacgctatggactactggggccagggcaccagcgtgacagttagctctgccagc

SEQ ID NO: 33433 - DNA, 735 bp, synthetic construct
  source 1..735: mol_type = other DNA
gacgagatcgtgctgacacagagccctgccaccctgtctctgagccctggcgaaagagccaccctgagctgtagagccagccagagcgtgtccagctacctggcctggtatcagcagaagcccggccaggctccccggctgctgatctacgatgccagcaatagagccaccggcatccccgccagattttccggctctggcagcggcaccgacttcaccctgaccatcagctccctggaacccgaggacttcgccgtgtactactgccagcagcggagcaactggcccatcacattcggccagggcacccggctggaaatcaaaggcggaggcggaagtggaggcggaggatctggcggcggaggctctgaggtgcagcttgttgagtctggcggaggactggtgcagcccgatagaagcctgagactgtcttgtgccgccagcggcttcaccttccacgattatgccatgcactgggtccgacaggcccctggcaaaggacttgaatgggtgtccaccatctcttggaacagcggcacaatcggctacgccgactctgtgaagggcagattcaccatcagccgggacaacgccaagaacagcctgtacctccagatgaactccctgagagccgaggacacagccctgtactactgcgccaaggacatccagtacggcaactactactacggcatggacgtgtggggccagggcacaacagtgacagtctcttct

SEQ ID NO: 33434 - DNA, 717 bp, synthetic construct
  source 1..717: mol_type = other DNA
gacatccagatgacacagagccctagcagcctgtctgccagcgtgggagatagagtgaccatcaactgcaaggccagccaggacatcaacagctacctgagctggttccagcagaagcctggcaaggcccctaagacactgatctaccgggccaacagactggtggatggcgtgccaagcagattttctggcagcggcagcggccaggattacaccctgacaatatccagcctccagcctgaggacttcgccacctactactgcctccagtacgacgagttccctctgacctttggcggaggcaccaaggtggaaatcaaaggcggaggcggaagtggaggcggaggatctggcggcggaggctctcaggtgcaactggtgcagtctggggccgaagtgaagaaacctggggcctctgtgaaggtgtcctgcaaagccagcggctacacctttaccaactacgacatcaactgggtccgacaggctccaggccaaggactggaatggatcggctggatctatcctggcgacggcagcaccaagtacaacgagaagttcaaggccaaggccacactgaccgccgataccagcacaagcaccgcctacatggaactgcggagcctgagaagcgacgacaccgccgtgtactattgtgcctccggctacgaggacgctatggactattggggccagggcaccaccgtgacagtgtctagt

SEQ ID NO: 33435 - DNA, 723 bp, synthetic construct
  source 1..723: mol_type = other DNA
gacatcgtgatgacccagacacctctgagcctgagcgtgacacctggacagcctgccagcattagctgcaagagcagccagtctctgctggacggcgacggcaagacctacctgaattggctgctccagaagcctggacagagccctcagcggctgatctacctggtgtccaagctggatagcggcgtgcccgatagattttctggcagcggctctggcaccgacttcaccctgaagatcagcagagtggaagccgaggacgtgggcgtgtactactgttggcagggcacacacttccccagaacattcggccagggcacaaagctggaaatcaaaggcggaggcggaagtggaggcggaggatctggcggcggaggctctcaagtgcaactggttcagagcggagccgaagtgaagaaacctggggcctctgtgaaggtgtcctgcaaggccagcggctacaccttcaaggacacctacatccactgggtccgacaggcccctggacaaggacttgagtggatgggcagaatcgaccccgccaacggcaacaccaaatacgaccccaagttccagggcagagtgaccatgaccagagacaccagcatcagcaccgcctacatggaactgagccggctgagatccgatgacaccgccgtgtactattgcgctagaagaggcggagtggattggggccagggaacactggttaccgtgtctagt

SEQ ID NO: 33436 - DNA, 726 bp, synthetic construct
  source 1..726: mol_type = other DNA
gacatccagatgacacagagccctagcagcctgtctgccagcgtgggagacagagtgaccatcacatgcaaggccagccaggatgtgtctacagccgtggcctggttccagcagaagcctggaaaagcccctaagctgctgatctacagccccagctacagatacaccggcgtgcccagcagattttctggcagcggctctggcaccgacttcaccctgacaatatccagcctccagcctgaggacttcacctactactgccagcagctctacagcaccccttacacattcggccagggcaccaaggtggaaatcaaaggcggaggcggaagtggaggcggaggatctggcggcggaggctctgaagtgcaactggttcagagcggagccgaagtgaagaaacctggggcctctgtgaaggtgtcctgcaaagccagcggctacacctttaccgactactacctggacgtggtcgtgcggcaagctcctggacaaggactggaatggatcggcagagtgaacccctacaacggcggcaccatctacaaccagaaattcaagggaagagtgaccctgaccagagacaccagcacctccacagcctacctggaactgagcagcctgagaagcgaagataccgccgtgtactactgcgccagggaccactacagatatgaccctctgctggactactggggccagggaaccctggttacagtgtctagt

SEQ ID NO: 33437 - DNA, 744 bp, synthetic construct
  source 1..744: mol_type = other DNA
gacatccagatgacacagagccctagcagcctgtctgccagcgtgggagacagagtgaccatcacctgtagagccagccagagcgtgtccaccagcagctacaactacatgcactggtatcagcagaagcccggcaagcctcctaagctgctgattaagtacgccagcaacctggaaagcggcgtgcccagcagattttctggcagcggctctggcaccgacttcaccctgacaatatccagcctccagcctgaggacttcgccacctactactgtcagcactcctgggagatccctctgacattcggccagggcaccaaggtggaaatcaaaggcggaggcggaagtggaggcggaggatctggcggcggaggctctgaagtgcaactggttcagagcggagccgaagtgaagaaacctggggcctctgtgaaggtgtcctgcaaggccagcggctacagcttcaccgactattatatgcactgggtccgacaggctccaggccagggacttgagtggatcggcagaatcaacccctacaacggcgctgccttctacagccagaacttcaaggatagagtgaccctgaccgtggacaccagcaccagcacagcctacctggaactgagcagcctgagaagcgaggacaccgccgtgtactactgcgccattgagagaggcgctgacctggaaggctacgctatggattattggggccagggaaccctggtcaccgtgtcatct

SEQ ID NO: 33438 - DNA, 738 bp, synthetic construct
  source 1..738: mol_type = other DNA
gagatcgtgctgacacagtctccagccacactgagcgcttctccaggcgagagagtgaccctgacctgtagagccagcagcaacgtgatctccagctacgtgcactggtatcagcagaagcctggcagcagccccagactgtttctgtacagcaccagcaatctggcctccggcgtgccaagcagattttctggctctggcagcggcaccgacttcacctttaccatctctagcctggaagccgaggacgccgccacctactactgtcagcagtacagcggctaccctctgaccttcggccagggcacaagactggaaatcaaaggcggaggcggaagtggaggcggaggatctggcggcggaggctctcaagttcagctgcaagagtctggccctggcctggtcaagcctagcgaaacactgagcctgacctgcgccgtgtctggctactctatcaccagcgcctactattggaactggatcagacagcctcctggcaaaggactggaatggatcggctacatcagctacgacggcagaaacaactacaaccccagcctgaagaaccggatcaccatcaatcccgacaccagcaagaaccagttcagcctccagctgaacagcgtgacccctgaggataccgccgtgtactactgtgccagagaaggcgactacgacgtgggcaactactacgctatggactactggggccagggaaccctggtcacagtctcttct

SEQ ID NO: 33439 - DNA, 738 bp, synthetic construct
  source 1..738: mol_type = other DNA
gagatcgtgctgacacagtctcccgccacactgtcactgtctccaggcgaaagagccacactgagctgtagagccagcagcaacgtgatctccagctacgtgcactggtatcagcagaagcctggacaggcccctcggctgctgatctacagcacaagcaatctggcctctggcatccccgccagattttctggctctggaagcggcaccgacttcaccctgaccataagcagcctggaacctgaggacttcgccgtgtactactgccagcagtatagcggctaccctctgaccttcggccagggcacaagactggaaatcaaaggcggaggcggaagtggaggcggaggatctggcggcggaggctctgaagtgcaactggtggaaagtggcggcggactggtgcaacctggaagaagcctgagactgtcctgtgccgccagcggctactctatcacaagcgcctactactggaactgggtccgacaggctcctggcaaaggactggaatgggtgtcctacatcagctacgacggcagaaacaactacaaccccagcctgaagaaccgcttcaccatcagccgggacaacgccaagaagtccctgtacctccagatgaacagcctgagagccgaggacacagccctgtactattgcgccaaagagggcgactacgacgtcggcaactactacgctatggactactggggccagggaaccaccgtgactgtctcttct

SEQ ID NO: 33440 - DNA, 765 bp, synthetic construct
  source 1..765: mol_type = other DNA
gacgtggtcatgacacagaccccactgagcctgcctgtgtctctgggagatcaggccagcatctcctgtagaagcagccagagcctggtgcacagcaacggcaacacctacctgcggtggtatctccagaagcctggacagagccccaaggtgctgatctacaaggtgtccaacagagtgtccggcgtgcccgatagattttctggcagcggctctggcaccgacttcaccctgaagatcaatagagtggaagccgaggacctgggcgtgtacttctgtagccagagcacccatgtgccttggacctttggcggaggcaccaagctggaaatcaagagcagcgccgacgacgccaagaaggacgccgccaaaaaggatgatgccaagaaagacgatgctaaaaaagacggcggcgtgaagctggacgagacaggcggaggacttgttcaacctggcggagccatgaagctgagctgtgtgaccagcggctttaccttcggccactactggatgaactgggtccgacagtcccctgagaaaggactggaatgggtcgcccagttcagaaacaagccctacaactacgaaacctactacagcgacagcgtgaagggcagattcaccatcagccgggacgacagcaagtccagcgtgtacctccagatgaacaacctgcgcgtggaagataccggcatctactactgtaccggggccagctacggcatggaatatctcggccagggcaccagcgtgaccgtgtctaca

SEQ ID NO: 33441 - DNA, 753 bp, synthetic construct
  source 1..753: mol_type = other DNA
caggtgcaactggtggaatctggcggcaatctggttcagcctggcggctctctgagactgtcttgtgccgccagcggcttcaccttcggcagcttttctatgagctgggtccgacaagctcctggcggaggacttgaatgggtggcaggactgtctgccagaagcagcctgacacactacgccgactctgtgaagggcagattcaccatcagccgggacaacgccaagaacagcgtgtacctccagatgaacagcctgagagtggaagataccgccgtgtactactgcgccagaagaagctacgacagcagcggctactggggccacttctacagctacatggatgtgtggggccagggcaccctggttacagtttctggcggaggcggaagtggaggcggaggatctggcggcggaggctcttctgtgctgacccagcctagctccgtgtctgctgctcctggacagaaagtgaccatctcctgtagcggcagcaccagcaacatcggcaacaactacgtgtcctggtatcagcagcaccccggcaaggcccctaagctgatgatctacgacgtgtccaagaggcccagcggcgtgccagatagattttccggcagcaagagcggcaacagcgccagcctggatattagcggactccagtctgaggacgaggccgactactattgcgccgcctgggatgatagcctgagcgagtttctgtttggcaccggcaccaagctgacagtgcttgga

SEQ ID NO: 33442 - DNA, 726 bp, synthetic construct
  source 1..726: mol_type = other DNA
cagtctgtggtcacacagcctccatctgtgtctggcgctccaggccagagagtgaccatctcttgtaccggcagcagcagcaatatcggagccggctatgacgtgcactggtatcagcagctccctggcacagcccctaaactgctgatctacggcaacagcaacagacccagcggcgtgcccgatagattttccggctctaagagcggcacaagcgccagcctggctattactggactccaggccgaggacgaggccgactactactgtcagagctacgacagcagcctgagcggcagctatgtgtttggcaccggcaccaagctgacagtgcttggaggcggaggcggaagtggaggcggaggatctggcggcggaggctctgaagttcaactggtggaaaccggcggcaacctggttcaacctggcgcttctctgagactgagctgtgccgccagcggctttagctttagcggaacagccatgcactgggtccgacaggcacctggcaaaggactggaatgggtgtccaccatcagcagcacaggcagaagcacctactaccgggacagcgtgaagggcagattcaccatctccagagacaacagcaagaacaccctgtacctccagatgaacagcctgagaggcgaggacaccgccgtgtactattgtgccagagtgtccttcgactactggggccagggaaccctggtcacagtctcttct

SEQ ID NO: 33443 - DNA, 732 bp, synthetic construct
  source 1..732: mol_type = other DNA
cagtctgtggttacacagcctgcctccgtgtctggctctcctggccagagcatcaccatcagctgtaccggcaccagctctgatgtcggcggctacaattacgtgtcctggtatcagcagcaccccggcaaggcccctaagctgatgatctacgacgtgtccaagaggcccagcggcgtgtccaatagattcagcggcagcaagagcggcaacaccgccagcctgacaatttctggactgcaagccgaggacgaggccgactactactgtagcagctacaccagcagcagcacactggtgtttggcggaggcaccaagctgacagttcttggaggcggaggcggaagtggaggcggaggatctggcggcggaggctctgaagttcagctggttgaaagcggcggagcctttgttcagcctggcggatctctgagactgagctgtgccgccagcggcttcacattttccagctacgccatgacctgggtccgacaggctcctggcaaaggactggaatgggtgtccaccatctccggcagaggcagaagcaccttctacgccgatagcgtgaagggcagattcacaatcagccgggacaacagcaagaacaccctgtacctccagatgaacagcctgagagccgaggataccgccgtgtactactgtgcccggtactatcacgctggcgcctttgatctttggggccagggaacactggtcaccgtgtcatct

SEQ ID NO: 33444 - DNA, 738 bp, synthetic construct
  source 1..738: mol_type = other DNA
gacgtggtcatgacacagagcccttctagcctgtctgccagcgtgggcgacagagtgacaatcacctgtcagagcagcctggacatcagccactacctgaactggtatcagcagaagcccggcaaggcccctaagctgctgatctacgacgccagcaatctggaaaccggcgtgcccagcagattttctggcagcggaagcggcacccacttcaccttcacaatatccagcctccagcctgaggacttcgccacctactactgccagcagtacgacaacctgcctctgacctttggcggaggcaccaagctggaaatcaagagaggcggaggcggaagtggaggcggaggatctggcggcggaggctctcaagttcaactggttcaatcaggcggaggcgtggtgcaacctggtggctctctgagagtgtcttgtgctgcctctggcgtgaccctgagcgactatggaatgcactgggtccgacaggcccctggcaaaggacttgagtgggtcgccttcatcagaaacgacggcagcgacaagtattacgccgacagcgtgaagggcagattcaccatcagccgggacaacagcgagaaaaccgtgtctctccagatgtctagcctgagagccgaggacaccgccgtgtactactgtgccaagaatggcgagagcggccctctggactactggtatctggatctgtggggcagaggcaccctggtcacagtctcttct

SEQ ID NO: 33445 - DNA, 759 bp, synthetic construct
  source 1..759: mol_type = other DNA
gacgtgatgctgacccagacaccactgagcctgcctgtgtctctgggcgatcaggccagcatctcctgtagaagcagccagagcatcctgcacagcaccggcgatacctacctggaatggtatctccagaagcctggacagagccccaagctgctgattaacaaggtgtccaaccggctgagcggcgtgcccgatagattttctggcagcggctctggcaccgacttcaccctgaagatcagcagagtggaagccgaggacctgggcgtgtactactgcttccaaggcagccatgttccttggacctttggcggaggcaccaagctggaaatcaagagagctgacgccgctcctaccgtgtccatctttcctggaggcggtggaagtggcggcggtggttcaggcggcggaggatctcaagtgaagctccagcagagcggccctagccttgtgaaacctggcgcttccgtgaagatgagctgcaaggccagcggctacaccttcaccgatttctacatgaaatgggtcaagcagagccacggcaagtctctggaatggatcggcgacatcaaccccaacatcggagacaccttctacaaccagaagttcaagggcaaagccacactgaccgtggacaagagcagcagcaccgcctacatgcagctcaacagcctgaccagcgaggacagcgccgtgtacttttgttccgtgggctacttcgacgtgtggggagccggaacaaccgtgacagtctcttct

SEQ ID NO: 33446 - DNA, 759 bp, synthetic construct
  source 1..759: mol_type = other DNA
ctgcctgttctgacacagcctccatccgtgtctgtggcccctggaaagaccgccagaatcacatgcggcggcaacaacatcggcagcaagagcgtgcactggtatcagcagaagcctggacaggctcctgtgctggtggtgtacgacgacagcgatagacctagcggcatccccgagagattcagcggcagcaattccggcaataccgccacactgaccatcagcagagtggaagctggcgacgaggccgactactactgccaagtgtgggacagcagcagcgactacgtggtgtttggcggcggaacaaagctgacagtgcttggcggaggcggaagtggaggcggaggatctggcggcggaggctctgaagttcaactggtgcagagcggagccgaagtgaagaagccaggcgagagcctgaagattagctgcaaaggcagcggctacagcttcaccagctactggatcggctgggtccgacagatgcctggcaaaggactggaatggatgggcatcatctaccccggcgacagcgacaccagatacagccctagctttcagggccaagtgaccatctccgccgacaagagcatcagcacagcctacctccagtggtcctctctgaaggccagcgataccgccatgtactactgcgccagacaagtctggggatggcaaggcggcatgtaccccaggtctaactggtggtacaacctggactcttggggccagggcacactggtcacagtctcttct

SEQ ID NO: 33447 - DNA, 738 bp, synthetic construct
  source 1..738: mol_type = other DNA
gagctggtcatgacacagagccctgcttctctggccgtgtcactgggacagagagccaccatctcttgcagagccagcgagagcgtggacagctacggcaagagcttcatgcactggtatcagctcaagcccggccagcctcctaagctgctgatctacagagcctccaacctggaaagcggcgtgccagccagattttctggcagcggcagcagaaccgacttcaccctgaccattgatcccgtggaagccgatgatgccgccacctactactgccagcagaacaacgaggacccctggacatttggcggaggcaccaagctggaaatcaaaggcggaggcggaagtggaggcggaggatctggcggcggaggctctgaagtgcagctcgaacagtctggccccgagcttgtgaaacctggcgcttccgtgaagatgagctgcaaggccagcggctacaccttcaccaactactacatgaaatgggtcaagcagagccacggcaagtccctggaatggatcggcgatctgaaccccaacaacggcgacaccttctacaaccagaagttcaagggcaaagccacactgaccgtggacaagagcagcaacaccgcctacatgcagctcaactccctgaccagcgaggacagcgccgtgtactactgtgccagaaccggcagatacgaagagaacgctatggactactggggccagggcacaagcgtgacagtctcttct

SEQ ID NO: 33448 - DNA, 720 bp, synthetic construct
  source 1..720: mol_type = other DNA
gacgtggtcatgacacagagcccttctagcctgtctgccagcgtgggcgacagagtgaccatcacctgtatggcctccgaggacatctacatccggctggcctggtatcagcagaagcctggaaacgcccctaagctgctgatctacgccgccacctctctggaaacaggcgtgccaagcagattttccggcagcggctctggcaccgatttcaccctgacaatatccagcctccagcctgaggacttcgccacctactactgccagcagtattggagcagcccctggacatttggcggaggcaccaaggtggaaatcaaaggcggaggcggaagtggaggcggaggatctggcggcggaggctctcaggttcagctgcaagagtctggccccggactggtcaagcctagccaaacactgagcctgacctgtaccgtgtccggctacagcatcaccagcgactacacctggaactggatcagacagcctcctggcaacggactggaatggatcggctacatcacctacagcggcagcaccagctacaaccccagcctgaaaagccgggtgctgatctccgtggacaccagcaagaatcaggtgtccctgaagctgagcagcgtgacagccgctgataccgccgtgtactactgtgccagactggggagaagatacacaatggactactggggccagggcaccaccgtgacagtttcttct

SEQ ID NO: 33449 - DNA, 732 bp, synthetic construct
  source 1..732: mol_type = other DNA
gagatcgtgctgacacagtctcccgccacactgtcactgtctccaggcgaaagagccacactgagctgtagcgccagcagcagcgtgtcctacatgtactggtatcagcagaagcccggacaggcccctagactgctgatctacagaaccagcaacctggcctctggcatccccgccagattttctggctctggcagcggcaccgatttcaccctgaccataagcagcctggaacctgaggacttcgccgtgtactactgccagcagtaccacagctaccccaccacctttggacagggcaccaaggtggaaatcaagcggacagttggcggaggcggaagtggaggcggaggatctggcggcggaggctctgaagtgcagctggttgaatcaggtggcggcctggttcaacctggcggatctctgagactgtcttgtgccgccagcggcttcagcttcaacacctacgccatgaactgggtccgacaggctcctggcaaaggactggaatgggtgtcccacatcagaagcaagagcaacaacttcgccacctactacgccgacagcgtgaaggacagattcaccatcagccgggacaacgccaagaacagcctgtacctccagatgaactccctgagagccgaggacaccgccgtgtattattgcgccagacaaggcggcgacttccctatggattattggggccagggcaccctggtcaccgtttcttct

SEQ ID NO: 33450 - DNA, 720 bp, synthetic construct
  source 1..720: mol_type = other DNA
gacgtggtcatgacacagagcccttctagcctgtctgccagcgtgggcgacagagtgaccatcacctgtaaagccagcgaggacatctacatccggctggcctggtatcagcagaagcctggaaaggcccctaagctgctgatctacgccgccacctctctggaaacaggcgtgccaagcagattttccggcagcggctctggcaccgatttcaccctgacaatatccagcctccagcctgaggacttcgccacctactactgccagcagtattggaccacaccttggacctttggcggaggcaccaaggtggaaatcaaaggcggaggcggaagtggaggcggaggatctggcggcggaggctctcaggtgcagctccaagagtctggccctggactggtcaagcctagccagacactgagcctgacctgtaccgtgtccggctacagcatcaccatcgactacacctggaactggatcagacagcctcctggcaaaggactggaatggatcggctacatcacctacagcggcagcaccgactacaaccccagcctgaaaagccgggtgctgatctccgtggacaccagcaagaatcaggtgtccctgaagctgagcagcgtgacagccgctgataccgccgtgtactactgtgccagactgggcagaagatacgccctggattattggggccagggcaccaccgtgacagtgtcatct

SEQ ID NO: 33451 - DNA, 735 bp, synthetic construct
  source 1..735: mol_type = other DNA
gacatccagctgactcagagccctagctttctgagcgccagcgtgggcgacagagtgaccattacatgtagagccagccagggcatcagcaccgacctgaactggtatcagcagaagcctggcaaggcccctaagctgctgatctacgccgccagcaatctggaaagcggcgtgccaagcagattttccggctctggcagcggcaccgagttcaccctgacaatatctagcctccagcctgaggacttcgccacctactactgccagcagagctacaactggccctacacctttggcggaggcaccaaggtggaaatcaagagaggcggaggcggaagtggaggcggaggatctggcggcggaggctctgaagttcagctggttgaatcaggcggaggactcgtgaaacctggcggctctctgagactgtcttgtgccgccagcggcttcaccttcagcaacttcgagatgaactgggtccgacaggccccaggcaaaggactggaatgggtgtccggcatcagctccaatggccggtacatcaactacgccgacagcgtgaagggcagattcaccatcagccgggacaacgccaagaacagcctgtacctccagatgaactccctgagagccgaggacaccgccgtgtactattgtgccagagtggtggacttcgaccaggactacaacggcttcgactattggggccagggcaccctggttaccgttagctct

SEQ ID NO: 33452 - DNA, 729 bp, synthetic construct
  source 1..729: mol_type = other DNA
gacatccaactgactcagagccccagctttctgagcgcctctgtgggcgacagagtgaccatcacatgtagtctcagcctgggcatcagcacatggcgggattggtttccgccgaggcttggcaggggccttgagccgctgacctacgccgccagcacactgcaaagcggagtgcctagcagattttccggcagcggctctggcaccgagttcaccctgacaatatccagcctccagcctgaggacttcgccacctactactgccagcagctcaacagctaccctctgacctttggcggaggcaccaaggtggaaatcaagagaggcggaggcggaagtggaggcggaggatctggcggcggaggctctgaagttcaactggttgagtctggtggcggcctggttaagcctggcggatctctgagactgagctgtgccgccagcggcttcacctttagcacatacggcatgagctgggtccgacaggcccctggaaaaggacttgagtgggtcgcctacatcaacaacggctccggctacatctactacgccgacagcgtgaagggcagattcaccatcagccgggacaacgccaagaacagcctgtacctccagatgaactccctgagagccgaggacaccgccgtgtactattgtgccagaggacagtggtggagcggcggagactttgattattggggccagggcaccctggtcaccgtttcttct

SEQ ID NO: 33453 - DNA, 735 bp, synthetic construct
  source 1..735: mol_type = other DNA
gacatccagatgacccagaccacaagcagcctgtctgccagcctgggcgacagagtgaccatctcttgtagagccagccaggacatcagcaactacctgaactggtatcagcagaaacccgacggcaccgtgaagctgctgatctactacaccagcatcctgcacagcggcgtgcccagcagattttctggctctggcagcggcaccgactacagcctgaccatcagcaatctggaacaagaggacttcgctacctacttctgccagcaaggcaacaccctgccttggacatttggcggaggcaccaagctggaaatcaaagctggcggaggcggaagtggaggcggaggatctggcggcggaggctctgaagtgcaactggttgaatctggcggcggactggttaagcctggcggatctctgaagctgagctgtgccgcctctggcttcgccttcagcatctacgatatgagctgggtccgacagacccctgagaagagactggaatgggtcgcctacatctctagcggcggagggacctactatcccgacacagtgaagggcagattcaccatctccagagacaacgccaagaacaccctgtacctccagatgagcagcctgaagtccgaggacaccgccatgtactactgcgccagacacagcggctatggcacacattggggagtgctgtttgcctactggggccagggaacactggtcacagtttctgct

SEQ ID NO: 33454 - DNA, 765 bp, synthetic construct
  source 1..765: mol_type = other DNA
gacatcgtgatgacacagagccctgatagcctggccgtgtctctgggagagagagccaccatcaactgcaagagcagccagagcctgctgtacagaagcaaccagaagaactacctggcctggtatcagcagaagcccggccagcctcctaagctgctgatctactgggccagcaccagagaaagcggcgtgcccgatagattttctggctctggcagcggcaccgacttcaccctgacaatttctagcctgcaagccgaggacgtggccgtgtactactgccagcagtattacaactaccccagaaccttcggccagggcaccaaggtggaaatcaagagaacagttggcggaggcggaagtggaggcggaggatctggcggcggaggctctgaagttcagctgcttgaatcaggcggcggactggttcaacctggcggatctctgagactgagctgtgccgccagcggctacagcatcacaagcgactatgcctggaactgggtccgacaggcccctggcaaaggactggaatgggtgtcctacatcagcaacagcggcagcaccagctacaaccccagcctgaagtcccggttcaccatcagcagagacaacagcaagaacaccctgtacctccagatgaacagcctgagagctgaggacaccgccgtgtattattgcgccaaagagcggaactacgactacgacgattactactacgctatggactactggggccagggaaccctggtcacagtctcttct

SEQ ID NO: 33455 - DNA, 744 bp, synthetic construct
  source 1..744: mol_type = other DNA
gacgtggtcatgacacagagccctctgagcctgcctgtgacacttggacagcctgccagcatcagctgtagaagcagccagagcctgctgcacagcagcggcaatacctacctggaatggtatcagcagaggcccggacagagccccagacctctgatctacaagatcagcacccggttcagcggcgtgcccgatagattttctggctctggcagcggcaccgacttcaccctgaagattagcagagtggaagccgaggacgtgggcgtgtactactgcttccaaggcagccacgtgccatacacctttggcggcggaacaaaggtggaaatcaagagaggcggaggcggaagtggaggcggaggatctggcggcggaggctctcaagttcagctggttcagagcggagccgaagtgaagaaacctggggcctctgtgaaggtgtcctgcaaagcctctggcctgaccatcgaggactactacatgcactgggtccgacaggcccctggacaaggacttgaatggatgggctggatcgaccccgagaacggcgatacagagtacggccctaagttccagggcagagtgaccatgaccagagacaccagcatcaacaccgcctacatggaactgagccggctgagatccgatgacaccgccgtgtactattgcgccgtgcacaatgcccactacggcacttggtttgcctattggggccagggcacactggtcaccgttagctct

SEQ ID NO: 33456 - DNA, 720 bp, synthetic construct
  source 1..720: mol_type = other DNA
gacatccagatgacacagagccctagcagcctgtctgccagcgtgggagacagagtgaccatcacctgtagagccagcgagaacatctacagcaacctggcctggtatcagcagaagcctggcaaggcccctaagctgctgatctacgccgccaccaatctggctgatggcgtgccaagcagattttccggctctggcagcggcaccgatttcaccctgacaatatccagcctccagcctgaggacttcgccacctactactgccagcacttttggggcacccctacattcggccagggcaccaaggtggaaatcaagagaacagttggcggaggcggaagtggaggcggaggatctggcggcggaggctctgaagtgcagctggttgaatcaggtggcggcctggttcaacctggcggatctctgagactgagctgtgccgcctctggcttcagcctgacaaattacggcgtgcactgggtccgacaggcccctggaaaaggactggaatgggtgtccgtgatttggagcggcggcagcaccgattacaacgccgccttcatcagccggttcaccatcagcgccgacaccagcaagaataccgcctacctccagatgaactccctgagagccgaggacaccgccgtgtactattgcgccagagaactgatccacgctatggacaactggggccagggaaccctggtcacagtctcttct

SEQ ID NO: 33457 - DNA, 741 bp, synthetic construct
  source 1..741: mol_type = other DNA
gacttcgtgatgacacagagccctctgagcctgcctgtgacacctggcgaacctgccagcatcagctgtagaagcagccagagcatcgtgcacagcaacggcaacacctacctggaatggtatctccagaagcctggacagagcccacagctgctgatctacaaggtgtccaacagattcagcggcgtgcccgacagattttctggcagcggctctggcaccgacttcaccctgaagattagcagagtggaagccgaggacgtgggcgtgtactactgcttccaaggctctcacgtgcccctgacctttggacagggcaccaagctggaaatcaagagaggcggaggcggaagtggaggcggaggatctggcggcggaggctctgaagtgcagctggttgaaagcggagccgaagtgaagaaacctggggcctctgtgaaggtgtcctgcaaggccagcggctacacctttaccagctactggattcactgggtccgacaggcccctggacaaggacttgagtggatgggcgagaacgacccctccaacggcaggaccaactacaacgagaagttcaagaaccgcgtgaccctgaccgtggacaccagcatctctaccgcctacatggaactgagccggctgagatccgatgacaccgccgtgtactattgcgccagaggacccaactacttttacagcatggactactggggccagggcacaatggtcaccgttagctct

SEQ ID NO: 33458 - DNA, 720 bp, synthetic construct
  source 1..720: mol_type = other DNA
gacatccagctgactcagagccctagctttctgagcgccagcgtgggcgacagagtgaccatcacatgtagcgccagatccagcatcagcttcatgtactggtatcagcagaagcccggcaaggcccctaagctgctgatctacgacaccagcaatctggcctctggcgtgcccagcagattttctggaagcggcagcggcaccgagttcaccctgacaatctctagcctggaagccgaggatgccgccacctactattgccagcagtggtccagctatcccctgacatttggacagggcaccaagctggaaatcaaaggcggaggcggaagtggaggcggaggatctggcggcggaggctctcaggttcagctggttcagtctggggccgaagtgaagaaacctggggcctctgtgaaggtgtcctgcaaggcttccggctacacctttaccggctcttggatgaactgggtccgacaggctcctggacagggactcgaatggatcggcagaatctatcctggcgacggcgagacaaactacaacggcaagttcaaggaccgcgtgacaatcaccgccgacaagagcacaagcaccgcctacatggaactgagcagcctgcggagcgaagataccgccgtgtactactgcgcccggatctacggcaacaacgtgtacttcgatgtgtggggccagggcacaaccgtgacagtctcttct

SEQ ID NO: 33459 - DNA, 744 bp, synthetic construct
  source 1..744: mol_type = other DNA
cagctggtgctgacacagtctccaagcgcctctgccagcctgggatctagcgtgaagctgacctgtacactgagcagcggccacaagaccgacaccatcgactggtatcagcagcagcctggcaaggcccctagatacctgatgaagctggaaggcagcggcagctacaacaaaggctctggcgtgcccgatagattcagcggcagttcttctggcgctgattggtatctgaccatcagcagcctccagagcgaggacgaggccgattactactgcggcacagactaccccggcaactacctgtttggcggcggaacacagctgacagtgcttggcggcggaggcggaagtggaggcggaggatctggcggcggaggctctcaagaacagctggttgaaagcggcggaggactggttcaacctggcggttctctgagactgagctgtgccgccagcggcttcaccttcagcgactactacatgagctggatcagacaggccccaggcaaaggactggaatgggtcgccacaatctaccccagcagcggcaagacctactacgccgattctgccaagggcagactgaccatctccagcgacaacgccaaggacagcctgtacctccagatgaacagcctgagagccgaggacaccgccgtgtactactgcaccagagatagctacgccgacgacgccgctctgtttgacatttggggccagggcaccaccgtgaccgtttcttct

SEQ ID NO: 33460 - DNA, 741 bp, synthetic construct
  source 1..741: mol_type = other DNA
caggtacagctgcaggaatctgggcccggacttgtcaagccaagtcagacactttctcttacatgtaccgtgagcggcggaagtataagcagtggaggcttttactggtcttggatacggcagcacccaggcaaaggcttggagtggattggatacattcatcattcaggatctacacactataatccatcccttaagtcccgggtcaccattagcattgatacgtctaagaatctgttcagtctcaggctgtcctccgtcactgctgccgacacagccgtgtactactgcgcctccttggtttactgcggaggcgactgttatagcggctttgattattgggggcaggggaccctcgtaaccgtgagctctggaggcggaggatcaggtggcggtggatctggcggtggcggatctgatatccagctcactcaaagcccctctagtctctctgcctcagtgggggatcgggtcagttttacttgtcaagcttcacaggatatcaacaacttccttaattggtatcagcagaagccaggaaaagcacccaagctgctcatctatgatgcctcaaatttggagacgggtgttcccagtcgattctctgggtcagggtccgggaccgactttacgtttacgatctcctctctgcagcccgaagacatcgccacatactattgtcaacagtacggcaacttgcctttcacatttgggggcgggactaaggttgaaatcaagagg

SEQ ID NO: 33461 - DNA, 735 bp, synthetic construct
  source 1..735: mol_type = other DNA
caggtccaactgcaagaaagcggacccggactggtgaagccttctgagacacttagtctgacgtgcacggtcagtggcggctccatctcctcctattattggtcatggatacgacaacccccaggtaagggcctggaatggattggctatatctactattcaggaagcacgaactacaatcccagcctgaagtcccgagtgacaatttcagtagataccagtaaaaaccagttcagtcttaaactgtcaagcgtgacagctgccgacaccgctgtgtattactgcgtctcactggtgtattgtggaggggattgttatagcgggttcgattattggggacagggaaccctggtgactgtatcttccggaggcggaggatcaggtggcggtggatctggcggtggcggatctgatattcaactgacacaatcccccagctcactcagcgccagcgtgggggacagggttagctttacctgtcaagcctctcaggatataaataactttctgaactggtatcaacagaagcctgggaaggcgcccaaactcctgatctatgatgcgtccaacctggaaactggcgtgccttcacgctttagcggctctggcagtggtacagacttcacttttaccatctcttcacttcagccggaggacatcgccacatattactgtcaacagtacggaaacttgccctttacttttggaggcggcaccaaagttgaaatcaaaaga

SEQ ID NO: 33462 - DNA, 750 bp, synthetic construct
  source 1..750: mol_type = other DNA
caagttactttgaaggagtctggacctgtactggtgaagccaaccgagacactgacactcacgtgtacagtgagtggtttttccttgatcaacgcaaggatgggcgtcagctggatcaggcaaccccctggcaaggctctggaatggctcgctcacatattcagcaatgccgaaaaaagctaccggacaagcctgaaatcccgcctgactatttccaaggacacttctaagtctcaggtggtgctgaccatgaccaacatggacccggtggacaccgccacctattactgcgcaagaatccctgggtatggtgggaatggtgactaccattattatgggatggatgtgtgggggcaaggcacaaccgtaacggtctcaagcggaggcggaggatcaggtggcggtggatctggcggtggcggatctgacattcagatgacccaaagcccgtccagcctgtccgccagcctgggagatagagtgacaatcacgtgtagagcttcccaagggataagaaatgatctcgggtggtatcagcagaagcccggcaaagcccccaaaaggcttatatatgctagtagtacactgcagtctggagttccttcccgattttcaggtagcggctccggtacagagttcaccctcacgataagctcactccagcctgaggatttcgcaacgtactactgcctccagcacaacaattttccctggactttcggccagggcaccaaggtggagatcaagagg

SEQ ID NO: 33463 - DNA, 732 bp, synthetic construct
  source 1..732: mol_type = other DNA
cagatccagttggtggaatcagggggcggtgtggtgcagccgggtaggagcctgagactgtcatgcgtggcgtctggcttcacattcaagaactacggcatgcactgggtgcgacaggcccccggaaagggtttggagtgggtcgccgtgatctggtacgacggatctaatgagtattacggagatcctgtgaagggaaggttcaccatctcccgcgacaatagcaaaaatatgctctacctgcaaatgaactcactcagggcggatgatacggcggtctactattgcgctcgctcagggattgctgtggccggcgcattcgattactggggacagggtaccctggtgacagtatcaagcggaggcggaggatcaggtggcggtggatctggcggtggcggatctgagattgtgttgacacagtctcccgataccctgtcactgtcacccggcgagaaggcaacgctgagttgcagagcaagccagtcagtctcctcttcttttctggcctggtatcagcaaaaaccaggtcaggcaccatctctcctgatttacgttgccagcagacgggcggctggcattcccgacaggttctctggaagcggatctgggaccgattttaccctgacaattagccgcttggagcccgaagactttggtatgttttactgccagcactacggaaggacacctttcacatttggcccgggcacgaaagtcgatataaaacgc

SEQ ID NO: 33464 - DNA, 735 bp, synthetic construct
  source 1..735: mol_type = other DNA
gacatccaactgactcagagccccagctttctgagcgcctctgtgggcgacagagtgaccatcacatgtagagccagccagggcatcagcagctacctggcttggtatcagcagaagcctggcaaggcccctaaactgctgatctacgccgccagcacactccagtctggcgtgccaagcagattttctggcagcggctctggcaccgagttcaccctgacaatatccagcctccagcctgaggacttcgccacctactactgccagcaagtgaacagctaccctctgacctttggcggaggcaccaaggtggaaatcaagagaggcggaggcggaagtggaggcggaggatctggcggcggaggctctcaactgcaactgcaagagtctggccctggcctggtcaagcctagcgaaacactgagcctgacctgtaccgtgtctggcggcagcatcagctccagcacatattactggggctggatcagacagcctcctggcaaaggactggaatggatcggctccatctacttcaccggcagcaccgactacaaccccagcctgaagtccagggtgtccatctccgtggacaccagcaagaaccagttctccctgaagctgagcagcgtgacagccgctgataccgccgtgtactactgcgccaaagaggacgatagcagcggctactacagcttcgactattggggccagggcaacctggtcaccgttagctct

SEQ ID NO: 33465 - DNA, 744 bp, synthetic construct
  source 1..744: mol_type = other DNA
cagtctgctctgacccagcctagatccgtgtctggctctcctggacacagcgtgaccatcagctgtaccggcacctcttccgacgtgggcgactacaattacgtgtcctggtatcagcagaggcccggcaaggtgccaaagctgctgatctacgacgtgtccaagaggccaagcggcgtgcccgatagattttccggcagcaagtctggcaacaccgccagcctgacaatctctggactgcaagccgaggacgaggccatctacttttgtgccagctacgccggcaactacaacgtggtgtttggcggaggcaccaagctgacagtgcttggacaaggcggaggcggaagtggaggcggaggatctggcggcggaggctctcaagttcagctggtgcagtctggcagcgagctgaagaaacctggggcctctgtgaaggtgtcctgcaaggcttccggctacaccttcaacacctacgccatgaattgggtccgacaggctccaggccaaggactggaatggatgggctggatcaacaccaacaccggcaatcccacatacgcccagggcttcaccggcagattcgtgttctctctggacacctccgtgtccaccgcctacctccagatcagctctctgaaggccgaggataccgccgtgtactactgcgccagacggtacttcgattggctgctgggagccttcgacatctggggccagggaacaatggtcaccgtgtctagt

SEQ ID NO: 33466 - DNA, 720 bp, synthetic construct
  source 1..720: mol_type = other DNA
gacatccagatgacacagagccctagcagcctgtctgccagcgtgggagacagagtgaccatcacatgtagcgccagccagggcatcaacaactacctgaactggtatcagcagaagcccggcaaggcccctaagctgctgatccactacacatctggactgcacgctggcgtgcccagcagattttctggctctggcagcggcaccgactacaccctgacaatatctagcctccagcctgaggacgtggcaacctactactgccagcagtacagcatcctgccttggacctttggcggaggcaccaaggtggaaatcaagagaggcggaggcggaagtggaggcggaggatctggcggcggaggctctcaagttcagcttgttcagagcggagccgaagtgaagaaacccggcagctctgtgaaggtgtcctgcaaggcttccggctacgcctttagcagcagctggatgaactgggtccgacaggctcctggacagggccttgaatggatgggcagaatctatcccggcgacggcaatacccactacgcccagaaattccagggccgcgtgacactgacagccgacaagtctacaagcaccgcctacatggaactgagcagcctgagaagcgaggacaccgccgtgtactattgcggcgaaggctatctggaccctatggactattggggccagggcacactggtcaccgttagctct

SEQ ID NO: 33467 - DNA, 729 bp, synthetic construct
  source 1..729: mol_type = other DNA
gaggtgcagctggttgaatctggcggaggactggttcagcctggcggatctctgagactgtcttgtgccgccagcggctacaccttcaccacctattggatgcactgggtccgacaggcccctggcaaaggacttgagtgggtcggatatatcaggcccagcaccggctacacagagtacaaccagaagttcaaggaccgcttcaccatcagcgccgacaccagcaagaataccgcctacctccagatgaacagcctgagagccgaggacaccgccgtgtactactgtgccagatccagatggctgctggactattggggccagggcacactggttacagtttctggcggaggcggaagtggaggcggaggatctggcggcggaggctctgacattcagatgacacagagccctagcagcctgagcgcctctgtgggagacagagtgaccatcacatgcaagagcagccagagcgtgctgtactccagcaatcagaagaactacctggcctggttccagcagaagcctggcaaggctcctaagctgctgatctactgggccagcaccagagaaagcggcgtgccaagcagattttctggcagcggctctggcaccgacttcaccctgacaatatccagcctccagcctgaggacttcgccacctacttttgccaccagtacctgagcagctacacattcggacagggcaccaaggtggaaatcaagcgg

SEQ ID NO: 33468 - DNA, 720 bp, synthetic construct
  source 1..720: mol_type = other DNA
gacatccagatgacacagagccctagcagcctgtctgccagcgtgggagacagagtgaccatcacctgtagagccagccaggacatcagcaactacctgaactggtatcagcagaagcccggcaaggcccctaagctgctgatctactacaccagcagactgcacagcggcgtgcccagcagattttctggctctggcagcggcaccgacttcaccctgacaatatctagcctccagcctgaggacttcgccacctactattgccagcagggcaacaccctgccttacacatttggacagggcaccaaggtggaaatcaagagaggcggaggcggaagtggaggcggaggatctggcggcggaggctctgaagtgcagctggttgaatcaggtggcggcctggttcaacctggcggatctctgagactgagctgtgccgccagcggcttcaccttcagcgactactttatgagctgggtccgacaggcccctggcaaaggacttgaatgggtcgccaccatcagcaatggcggcacctacacttactaccccgacagcgtgaagggcagattcaccatctccagagacaacagcaagaacaccctgtacctccagatgaactccctgagagccgaggacaccgccgtgtactactgcgccagattcgacggctacatcttcgactattggggccagggcaccctggtcacagtctcttct

SEQ ID NO: 33469 - DNA, 741 bp, synthetic construct
  source 1..741: mol_type = other DNA
gacatccagatgacacagagccctagcagcctgtctgccagcgtgggagacagagtgaccatcacctgtaccgccagcagcagagtgtccagcagctacctgcactggttccagcagaagcctggcaaggcccctaagctgctgatctacagcaccagcaatctggcctctggcgtgcccagcagattttctggctctggcagcggcaccgacttcaccctgacaatatctagcctccagcctgaggacttcgccacctactactgccaccagtaccacagaagcccctacacattcggccagggcaccaaggtggaaatcaagagaggcggaggcggaagtggaggcggaggatctggcggcggaggctctgaagttcagctggttgaatctggcggcggactggttcaacctggcggatctctgagactgagctgtgccgcctctggctacgccttcagcaacagctggatcaactgggtccgacaggcccctggcaaaggactggaatgggtcggacaaatctaccccggcgactacgacaccaactacaacggcaagttcaagggcagattcaccatcagccgggacaagagcaagaacaccgcctacctccagatgaactccctgagagccgaggacaccgccgtgtactattgtgctagaggcggctccatctactacggcaacctgggcttcttcgacgtgtggggacagggcacactggtcacagtctcttct

SEQ ID NO: 33470 - DNA, 711 bp, synthetic construct
  source 1..711: mol_type = other DNA
gacatccagatgacacagagccctagcagcctgtctgccagcgtgggagacagagtgaccatcacatgtagcgccagcagcagcgtgacctacatgtactggtatcagcagaagcccggcaaggcccctaagctgctgatctacgacaccagcaatctggcctctggcgtgcccagcagattttctggctctggcagcggcaccgactacaccctgacaatatctagcctccagcctgaggacttcgccacctactactgccagcagtggtccaactatcccctgacattcggccagggcaccaaggtggaaatcaaaggcggaggcggaagtggaggcggaggatctggcggcggaggctctcaagttcagctggttcagagcggagccgaagtgaagaaacctggggcctctgtgaaggtgtcctgcaaggccagcggctacagcttcatcgagtacaccatcaactgggtccgacaggcccctggacaaggcctggaatggatcggcaacatcgacccctactacggcacaacctactacaaccagatgttcaccggcagagccacactgaccgtggacacctctatcagcaccgcctacatggaactgagccggctgagatccgatgacaccgccgtgtactattgtgccagaggcagcgcctggtttccctattggggacagggaaccctggtcaccgttagctct

SEQ ID NO: 33471 - DNA, 711 bp, synthetic construct
  source 1..711: mol_type = other DNA
gagatcgtgctgacacagagcccttctagcctgtctgccagcgtgggcgacagagtgaccatcacatgtagagccagcgagaacatctacagctacctggcctggtatcagcagaagcctggcaaggcccctaagctgctgatctacaacaccaagacactcggcgagggcgtgcccagcagattttctggttctggcagcggcaccgacttcaccctgaccatatctagcctgcagcctgaggacttcgccacctactactgccagcaccactacggcacccctttcacatttggccctggcaccaaggtggacatcaaaggcggaggcggaagtggaggcggaggatctggcggcggaggctctcaagttcagctggttcagagcggagccgaagtgaagaaacctggggcctctgtgaaggtgtcctgcaaggccagcggctacaccttcagcgactattgggtgcactgggtccgacaggctccaggacaaggactggaatggatgggagccatcgacggcagcgataccttcaacgattacagccagaaattcaaaggccgcgtgaccatgaccagagacaccagcatcagcaccgcctacatggaactgagccggctgagatccgatgacaccgccgtgtactattgtgccagaggcggcctgctgcagtattggggacagggaacactggtcaccgtgtcctct

SEQ ID NO: 33472 - DNA, 723 bp, synthetic construct
  source 1..723: mol_type = other DNA
caggttcagctccagcagtctggacctgagctggttaagcctggcgcttccgtgaagatcagctgcaaggcttccggctacgccttcagcagcagctggatgaactgggtcaaacagaggcccggcaaaggactggaatggatcggcagaatctaccccggcgacgaggacaccaattacagcggcaagttcaaggacaaggccacactgaccgccgacaagagcagcaccacagcctacatgcagctgagcagcctgaccagcgaggatagcgccgtgtacttctgtgccagaagcctgctgtacggcgactacctggattattggggccagggcacaaccctgacagtgtctagcggcggaggcggaagtggaggcggaggatctggcggcggaggctctcaaattgtgctgacacagagccccgccatcatgagcgcttctccaggcgagaaagtgaccatgacctgtagcgccagcagctccgtgtcttacatgcactggtatcagcagaagtccggcacaagccccaagcggtggatctacgataccagcaaactggcctccggcgtgcccgatagattttctggcagcggcagcggaaccagctacttcctgaccatcaacaacatggaagccgaggacgccgccacctactactgccagcagtggaacatcaaccctctgacctttggagccggcaccaagctggaactgaagaga

SEQ ID NO: 33473 - DNA, 732 bp, synthetic construct
  source 1..732: mol_type = other DNA
gacatccagatgacacagagcagcgcctacctgagcgtgtcccttggaggcagagtgaccatcacatgcaaggccagcgaccacatcaacaactggctggcctggtatcagcacaagcccggcaatgcccctagactgctgatctctggcgctaccacactggaaacaggcgtgcccagcagattttctggcagcggctctggcaaggactacaccctgagcatcaccagcctccagaccgaggatgtggctacctactactgccagcagagctggaacaccccttggacatttggcggaggcaccaagctggaaatcaagagaggcggaggcggaagtggaggcggaggatctggcggcggaggctctcaagttcagctgcaacagagcggagccgagcttgtcagacctggcagctctgtgaagattagctgcaaagccagcggctacgccttcagcagctactgggtcaactggatgaagcagcggcctggacagggcctcgaatggatcggccaaatctatcctggcgacggcgacaccaactacaacggcaagtttaagggcagagccaccgtgaccgccgacaagagcagcagcacatcctacatgcagttcagcagcctgaccagcgaggacagcgccgtgtatttctgtgccagatccatcaccaccgtcgtgggctgcgctatggattattggggccagggcacaagcgtgaccgtgtcatct

SEQ ID NO: 33474 - DNA, 729 bp, synthetic construct; identical to SEQ ID NO: 19806
  source 1..729: mol_type = other DNA

SEQ ID NO: 33475 - DNA, 723 bp, synthetic construct
  source 1..723: mol_type = other DNA
gagatcgtgctgacacagagccctggcacactgtcactgtctccaggcgaaagagccacactgagctgtagagccagccagagcgtgtccagctcttacctggcttggtatcagcagaagcccggacaggctcccagactgctgatctacggtgcctctagcagagccacaggcatccccgatagattttctggcagcggctccggcaccgacttcaccctgacaatcagcagactggaacccgaggacttcgccgtgtactactgccagcagtaccaccactctccactgacctttggcggaggcaccaaggtggaaatcaagagaggcggaggcggaagtggaggcggaggatctggcggcggaggctctgaagttcagctggttgaatcaggtggcggcctggttcaacctggcggatctctgagactgtcttgtgccgccagcggcttcactttcagcggcagatccatgaactgggtccgacaggcccctggcaaaggactggaatgggtgtcctacatcagcagcgacagccggaccatctactacgccgatagcgtgaagggcagattcaccatctccagagacaacgccaagaacagcctgtacctccagatgaactccctgagagccgaggacacagccgtgtattattgtgccagaggcggccacggctacttcgatctttggggcagaggcaccctggtcaccgtttcttct

SEQ ID NO: 33476 - DNA, 732 bp, synthetic construct
  source 1..732: mol_type = other DNA
gagatcgtgctgacacagagccctggcacactgtcactgtctccaggcgaaagagccacactgagctgtagagccagccagagcgtgtccagcgattacctggcttggtatcagcagaagcccggacaggctcccagactgctgatctatggtgcctctcggagagccacaggcatccccgatagattttctggcagcggctccggcaccgacttcaccctgacaatcagcagactggaacccgaggacttcgccgtgtactactgccagcagtacgtgtcctactggacctttggcggaggcaccaaggtggaaatcaagagaggcggaggcggaagtggaggcggaggatctggcggcggaggctctcaagttcagctggttgaatcaggcggaggcgttgtgcagcctggcagaagtctgagactgtcttgtgccgccagcggcttcaccttcagcagctatggaatgcactgggtccgacaggcccctggcaaaggacttgaatgggtggccggcatttggtgggacggcagcaatgagaagtacgccgacagcgtgaagggcagattcaccatctccagagacaacagcaagaacaccctgtacctccagatgaacagcctgagagccgaggacacagccgtgtattattgcgccaaagaggccccttactacgccaaggactacatggacgtgtggggcaagggcaccacagtgactgtctcttct

SEQ ID NO: 33477 - DNA, 732 bp, synthetic construct
  source 1..732: mol_type = other DNA
gacatccagatgacacagagccctagcagcctgtctgccagcgtgggagacagagtgaccatcacctgtagagccagccaggacgtgaacacagccgtggcttggtatcagcagaagcctggcaaggcccctaagctgctgatctacagcgccagctttctgtacagcggcgtgcccagcagattcagcggaagcagaagcggcaccgacttcaccctgacaatatccagcctccagcctgaggacttcgccacctactactgccagcagcactacaccacacctccaacattcggccagggcaccaaggtggaaatcaagagaacaggcggaggcggaagtggaggcggaggatctggcggcggaggctctgaagtgcagctggttgaatcaggtggcggcctggttcaacctggcggatctctgagactgagctgtgccgccagcggcttcaacatcaaggacacctacatccactgggtccgacaggcccctggcaaaggacttgaatgggtcgccagaatctaccccaccaacggctacaccagatacgccgactctgtgaagggcagattcaccatcagcgccgacaccagcaagaacaccgcctacctccagatgaactccctgagagccgaggacaccgccgtgtactactgtagcagatggggcggctggggcttctacgctatggattattggggccagggaaccctggtcaccgtgtcatct

SEQ ID NO: 33478 - DNA, 717 bp, synthetic construct
  source 1..717: mol_type = other DNA
caggtgcagctggttgaatctggcggcggacttgtgaagcctggcggatctctgagactgagctgtgccgccagcggcttcaccttcagcgactactacatgacctggatcagacaggcccctggcaaaggactggaatggatcagctacatcagcagcagcggcagcaccatctactacgccgatagcgtgaagggcagattcaccatcagccgggacaacgccaagaacagcctgtacctccagatgaactccctgagagccgaggacaccgccgtgtactactgcgccagagacagaaacagccacttcgactattggggccagggcaccctggtcacagtttctagcggcggaggcggaagtggaggcggaggatctggcggcggaggctctgatattcagatgacacagagccccagcagcgtgtccgcctctgtgggagatagagtgaccatcacctgtagagccagccagggcatcacaagatggctggcctggtatcagcagaagccaggcaaggcccctaagctgctgatctacgccgcttctgtgctccagagcggagtgcctagcagattttctggcagcggctccggcaccgatttcaccctgacaatatccagcctccagcctgaggacttcgccacctactactgccagcagagcaacagcttccccagaacattcggacagggcaccaaggtggaaatcaag

SEQ ID NO: 33479 - DNA, 717 bp, synthetic construct
  source 1..717: mol_type = other DNA
caggtgcagctggttgaatctggcggcggacttgtgaagcctggcggatctctgagactgagctgtgccgccagcggcttcaccttcagcgatcactacatgagctggatcagacaggcccctggcaaaggactggaatggttcagctacatcagcagcagcggcggcatcatctactacgccgatagcgtgaagggcagattcaccatcagccgggacaacgccaagaacagcctgtacctccagatgaactccctgagagccgaggacaccgccgtgtactactgtgccagagatgtgggcagccacttcgactattggggccagggaacactggtcaccgtttctagcggcggaggcggaagtggaggcggaggatctggcggcggaggctctgatattcagatgacacagagccccagcagcgtgtccgcctctgtgggagatagagtgaccatcacctgtcgggccagccaggacattagcagatggctggcttggtatcagcagaagccaggcaaggcccctaagctgctgatttcagccgccagcagactccagagcggagtgcctagcagattttctggctctggcagcggcaccgacttcaccctgacaatatctagcctccagcctgaggacttcgccatctactattgccagcaggccaagagcttccccagaacatttggacagggcaccaaggtggaaatcaag

SEQ ID NO: 33480 - DNA, 753 bp, synthetic construct
  source 1..753: mol_type = other DNA
caggtgcagctggttgaatctggtggcggagtggtgcagtctggcagaagcctgagactgtcttgtgccgccagcggcttcaccttcagaaactacggaatgcactgggtccgacaggcccctggcaaaggacttgaatgggtcgccgtgatttggtacgacggcagcgacaagtactacgccgattctgtgcggggcagattcaccatcagccgggacaacagcaagaacaccctgtacctccagatgaacagcctgagagccgaggacaccgccgtgtactactgtgccagagatggctacgacatcctgaccggcaatcccagagacttcgactattggggccagggcacactggtcacagtttctagcggcggaggcggaagtggaggcggaggatctggcggcggaggctctgataccgtgatgacccagacacctctgagcagccacgtgacacttggacagcctgccagcatcagctgtagaagcagccagagcctggtgcacagcgacggcaatacctacctgtcttggctccagcagaggccaggacagcctcctagactgctgatctaccggatcagcagacggttcagcggcgtgcccgatagattttctggaagcggagccggcaccgacttcaccctggaaatcagcagagtggaagccgaggatgtgggcgtctactactgtatgcagagcacccacgtgccacggacctttggacagggcaccaaggtggaaatcaag

SEQ ID NO: 33481 - DNA, 732 bp, synthetic construct
  source 1..732: mol_type = other DNA
gaggtgcagctggttgaatctggcggaggactggttcagcctggcggatctctgagactgtcttgtgccgccagcggcttcccattcagcagctacgatatgcactgggtccgacaggccacaggcaaaggactggaatgggtgtccgccatcggaacagccggcgctacctattatcccggctctgtgaagggcagattcaccatcagcagagagaacgccaagaacagcctgtacctccagatgaactccctgagagccggcgataccgccgtgtactattgtgccagaggcgactacgtgtggggcacctacagacccctgttcgattattggggccagggcaccctggtcacagtttctagtggcggaggcggaagtggaggcggaggatctggcggcggaggctctgatattcagctgactcagagccccagcttcctgtctgcctctgtgggcgacagagtgaccatcacatgttgggccagccagggcatcaacaactacctggcctggtatcagcagaagcccggcaaggctcctaagctgctgatctacgccgccagcacactgcaaacaggcgtgccaagcagattttccggctctggcagcggcaccgagttcaccctgacaatatctagcctccagcctgaggacttcgccacctactactgccagcagctgaacagctaccctctgacctttggaggcggcaccaaggtggaaatcaag

SEQ ID NO: 33482 - DNA, 723 bp, synthetic construct
  source 1..723: mol_type = other DNA
caggttcagctgcaagagtctggccctggcctggtcaagcctagcgaaacactgagcctgacctgtaccgtgtctggggccagcatcagcagcttctactggtcctggatcagacagcctcctggcaaaggactggaatggatcggctacatctactacagcggcaccaccaactacaaccccagcctgaagtccagagtgaccatcagcgtggacaccagcaagaaccagttctccctgaagctgagcagcgtgacagccgccgatacagccgtgtactactgtgccagaattgccgtggccggcttcttcttcgactattggggccagggcaccctggtcacagtttctagcggcggaggcggaagtggaggcggaggatctggcggcggaggctctgaaattgtgctgacacagagccccggcacactgtcactttctccaggcgaaagagccacactgagctgtagagccagccagagcgtgaacaagaactacctggcttggtatcagcagaagcccggacaggctcccagactgctgatctacggtgcctctagcagagccacaggcatccccgatagattttctggcagcggctccggcaccgacttcaccctgacaatcagcagactggaacccgaggacttcgccgtgtattattgccagcagtacgacagaagccctctgacctttggaggcggcaccaaggtggaaatcaag

SEQ ID NO: 33483 - DNA, 750 bp, synthetic construct
  source 1..750: mol_type = other DNA
caggttcagctggttcagtctggggccgaagtgaagaaacctggggcctctgtgaaggtgtcctgcaaggccagcggctacacctttaccaactactacatgcactgggtccgacaggcccctggactgggacttgagtggatgggcatcatcaaccctagcgacggcagcacaagctacgcccagaaattccagggcagagtgaccatgaccagagacaccagcaccaacaccgtgtacatggacctgagcagcctgagaagcgaggacaccgccgtgtactattgtgccagaggcggcaacagcgccttctacagctactacgacatggacgtgtggggccagggcaccacagtgacagtttctagcggcggaggcggaagtggaggcggaggatctggcggcggaggctctgatgtggtcatgacacagacccctctgagcctgcctgtgacacttggacagcctgccagcatcagctgtagatccagccagagcctggtgtacagagatggcaacacctacctgagctggttccagcagaggcctggacagtctcctcggcggctgatctacaaggtgtccaactggcagagcggcgtgcccgatagattttctggcggtggcagcggcaccgacttcaccctgaagatcagcagagtggaagccgaggacgtgggcgtgtactactgtatgcagggcacacactggcctccaacattcggccagggaacaaaggtggaaatcaag

SEQ ID NO: 33484 - DNA, 711 bp, synthetic construct
  source 1..711: mol_type = other DNA
caggttcagctccagcagtctggacctgagctggttaagcctggcgcttctgtgcggatctcttgcaaggccagcggctacaccttcaccacctactacatccactgggtcaagcagcggcctggacagggactcgaatggatcggctggatctaccccggcaacgtgaacaccaactacaacgagaagttcaagggcaaagccacactgaccgccgacaagagcagcagcacagcctacatgcagctgaccagcctgacctctgaggacagcgccgtgtacttttgtgccagaggcgtgtactacttcgactactggggccagggcaccatcctgacagtttctagcggcggaggcggaagtggaggcggaggatctggcggcggaggctctatcgtgatgacccagactcctaagttcctgctggtgtctgccggcgacagagtgaccatcacctgtaaagccagccagagcgtgaacaacgacgtgtcctggttccagcagaagcccggccaatctcctacactgctgatctactacgccagcaacagatacaccggcgtgcccgatagattcaccggctctggctacggcaccgacttcacctttaccatcagcaccgtgcaggccgaggacctggctgtgtacttctgccagcaagactacagcagcccttacacctttggaggcggcaccaagctggaaatcaag

SEQ ID NO: 33485 - DNA, 720 bp, synthetic construct
  source 1..720: mol_type = other DNA
caggttcagctgcaagagtctggccctggcctggtcaagcctagccaaacactgagcctgacctgtaccgtgtctggcggcagcatcaacaacaacaattactactggacctggatcagacagcaccccggcaaaggactggaatggatcggctacatctactacagcggcagcaccttctacaaccccagcctgaagtccagagtgaccatcagcgtggacaccagcaagacccagttctccctgaagctgagcagcgtgacagccgccgatacagccgtgtactactgcgccagagaagataccatgaccggcctggatgtgtggggccagggaacaacagtgacagtgtctagcggcggaggcggaagtggaggcggaggatctggcggcggaggctctgacattcagatgacacagagccctagcagcctgagcgcctctgtgggagacagagtgacaattacctgtcgggccagccagtctatcaacaactacctgaactggtatcagcagaagcccggcaaggcccctacactgctgatctatgccgccagctctctccagagcggagtgcctagcagattcagcggaagcagaagcggcaccgacttcaccctgacaatatccagcctccagcctgaggacttcgccgcctacttttgccagcagacctacagcaaccccacctttggccagggcaccaaggtggaagtgaag

SEQ ID NO: 33486 - DNA, 735 bp, synthetic construct
  source 1..735: mol_type = other DNA
agctacgagctgacacagcctccaagcgtgtccgtgtctcctggacagacagccagcatcacctgtagcggcgataagctgggcgataagtacgccagctggtatcagcagaagcccggccagtctcctgtgctggtcatctaccaggacaacagaaggcccagcggcatccccgagagattcagcggcagcaatagcggcaataccgccacactgaccatcagcggcacccaggctatggacgaggccgactactattgccaggcttgggacagcgacacctacgtgttcggcaccggcaccaaagtgacagtgcttggacaaggcggaggcggaagtggaggcggaggatctggcggcggaggctctgaagttcagctggttcagagcggagccgaagtgaagaaacctggggcctctgtgaaggtgtcctgcaaggcttccggcgataccttcaagcggtactacgtgcactgggtccgacaggctccaggacaaggactggaatggatgggcatcatcaaccccagcggcgtgtccacaacatacgcccagaaattccagggcagagtgaccatgaccagagacaccagcacctccaccgtgtacatggaactgagcagcctgagaagcgaggacaccgccgtgtactactgtgctgaagtgcgcggcagcggcttcaactacttcggcatggatgtgtggggccagggcacactggttaccgtttcttct

SEQ ID NO: 33487 - DNA, 732 bp, synthetic construct
  source 1..732: mol_type = other DNA
gaggttcagctgcttgagtctggcggaggactggttcaacctggcggaagcctgagactgtcttgtgccgccagcggcttcacctttagcagctacgccatgagctgggtccgacaggctcctggcaaaggactggaagtggtggtgtctgccatttctggcggcggaggcagaacctactacgccgattctgtgaagggcagattcaccatcagccgggacaacagcaagaacaccctgtacctgcagatgaacagcctgagagccgaggacaccgccgtgtactactgtgccagagaagagatggccttccgggcctacagattcgacatctggggccagggaaccctggtcacagtttctagcggcggaggcggaagtggaggcggaggatctggcggcggaggctctgatattcagatgacacagagccccagcagcctgtctgcctctgtgggagacagagtgaccatcacctgtagagccagccagagcatcagcagctacctgaactggtatcagcagaagcccggcaaggcccctaaactgctgatctatgccgcctccagtctgcagagcggagtgcctagcagattttctggctctggcagcggcaccgacttcaccctgacaatatctagcctgcagcctgaggacttcgccacctactactgccagcagagctacatcacccctctgacattcggtggcggcaccaaggtggaaatcaag

SEQ ID NO: 33488 - DNA, 756 bp, synthetic construct
  source 1..756: mol_type = other DNA
gacatcgtgctgacacagagccctgcttctctggccgtgtctcttggacagggcgctaccatcagctgtagagccagcaagagcgtgtccaccagcggctacacctacatgcactggtatcagcagaagcccggccagcctcctaagctgctgatctacctggcctccaacctggaaagcggagtgcctgccagattttctggcagcggctctggcaccgacttcaccctgaatatccatcctgtggaagaagaggacgccgccacctactactgtcagcactctggcgaactgccacctagctttggcggaggcaccaagctggaaatcaagagagctggcggaggcggaagtggaggcggaggatctggcggcggaggctctgaagtgcagctggtggaatctggcggcgaccttgtgaaacctggcggctctctgaagctgagctgtgccgtgtccggcttcacctttagcagctacggcatgagctgggtccgacagacccctgacaagagactggaatgggtcgccacagtgtctagcggcggcacctacacatattaccccgacagcgtgaagggcagattcaccatcagccgggacaacgccaagaacaccctgtacctccagatgagcagcctgaagtccgaggacagcgccatgtactactgcgccagacaccggggcaattactacgccacctattattacgctatggactactggggccagggcaccagcgtgacagtttcttct

SEQ ID NO: 33489 - DNA, 738 bp, synthetic construct
  source 1..738: mol_type = other DNA
gacatccagatgacacagagccctagcagcctgtctgccagcgtgggagacagagtgaccatcacatgtagcgccagccagggcatcagaaactacctgaactggtatcagcagaaacccggcaaggtgcccaagctgctgatctactacaccagcagactgcacagcggcgtgcccagcagattttctggctctggcagcggcaccgacttcaccctgacaatatctagcctccagcctgaggacgtggcaacctactactgtcagcagtacggcaagctgccctacacattcggccagggcaccaagctggaaatcaagagaacagtggctgccggcggaggcggaagtggaggcggaggatctggcggcggaggctctgaagttcagctggttgaatcaggcggcggactggttcaacctggcggatctctgagactgagctgtgccgccagcggcttcacattttccgacgcctggatggactgggtccgacaggctcctggaaaaggactggaatgggtcggagagatccggtccaaagtgaacaaccacgaaacctactatgccgagagcgtgaagggcagattcaccatcagccgggacgacagcaagaacagcctgtacctccagatgaactccctgaaaaccgaggacaccgccgtgtactactgcgccagaaacgactacttcgactactggggccagggaaccaccgtgacagtgtctagtgcttcc

SEQ ID NO: 33490 - DNA, 762 bp, synthetic construct
  source 1..762: mol_type = other DNA
gaggttcagctgcaagagtctggggccgaagtgaagaaacctggcagcagcgtgaaggtgtcctgcaaggccagcggcttcaacatcaaggacacctacatgcactgggtccgacaggcccctggacaaggacttgagtggatgggcagaatcgaccccgccaacggcaacagcaaatacgtgcccaagttccagggcagagtgaccatcacagccgacgagagcacaagcaccgcctacatggaactgagcagcctgagaagcgaggacaccgccgtgtactactgtgcccctttcggctactacgtgtccgactacgccatggcctattggggccagggaaccaccgtgacagtgtctagtgcatctggcggaggcggaagtggaggcggaggatctggcggcggaggctctgacatcgtgatgacacagagccccgatagcctggccgtgtctctgggagaaagagccaccatcaactgtagagccggcgagagcgtggacatcttcggcgtgggatttctgcactggtatcagcagaagcccggccagcctcctaagctgctgatctacagagccagcaacctggaaagcggcgtgcccgatagattttctggcagcggctctggcaccgacttcaccctgacaatcagacctctccaggccgaggatgtggccgtgtattattgccagcagaccaacgaggacccctacacatttggacagggcaccaagctggaaatcaagagaacagtggccgcc

SEQ ID NO: 33491 - DNA, 741 bp, synthetic construct
  source 1..741: mol_type = other DNA
caagttcagctggttcagtctggggccgaagtgaagaaacctggcagcagcgtgaaggtgtcctgcaaagcaagcggcggcacctttagcagctacgccatctcttgggtccgacaggcaccaggacaaggactggaatggatgggcctgattatccccagatacggcaaggccagatacgcccagaaattccagggcagagtgaccatcaccgccgacgagtctacaagcaccgcctacatggaactgagcagcctgagaagcgaggacacagccgtgtattattgcgcccggaactggccctactactacatggatttttggggccagggaaccctggtcaccgtgtctagtgcatctggcggaggcggaagtggaggcggaggatctggcggcggaggctctgacatcgtgctgacacagtctcccgccacactgtcactgtctccaggcgaaagagccacactgagctgtagagccagccagaacatcgtgttcaacctggcctggtatcagcagaagcctggacaggctccccggctgctgatctacgatgccagcaatagagccaccggcgtgcccgccagattttctggttctggcagcggcaccgacttcaccctgaccatatctagcctggaacctgaggacttcgccgtgtactactgccagcagaaaaagtccatgcctctgaccttcggccagggcaccaaggtggaaatcaagagaacagtggctgcc

SEQ ID NO: 33492 - DNA, 750 bp, synthetic construct
  source 1..750: mol_type = other DNA
gaggtgcagctggttgaatctggcggcggacttgtgaagcctggcggatctctgagactgagctgtgccgccagcggcttcacctttagcaatgcctggatgagctgggtccgacaggcccctggaaaaggactggaatgggtcggacggatcaagagcaagaccgaaggcggcaccaccgattatgctgcccctgtgaagggcagattcaccatcagcagggacgacagcaagaacaccctgtacctccagatgaacagcctgaaaaccgaggacaccgccgtgtactactgcaccacaccttacgagtggtcttggtacgactactggggccagggcacactggtcacagtgtcatctgcatctggcggaggcggaagtggaggcggaggatctggcggcggaggctctcagacagtggtcacccaagagcctagcctgacagtgtctcctggcggaaccgtgacactgacatgtggcagttctaccggcgctgtgaccaccagcaattacgccaactgggtgcagcagaagccaggccaagctcctagaggactgatcggcggcacaaacaagagagcccctggcacaccagccagattttctggctctctgctcggcggaaaggccgctcttacactgtctggtgtccagcctgaggacgaggccgagtattattgcgccctgtggtacagcaacctgtgggttttcggcggaggcaccaagctgacagtgctgactgttgctgct

SEQ ID NO: 33493 - DNA, 750 bp, synthetic construct
  source 1..750: mol_type = other DNA
caggttcagctggttcagtctggggccgaagtgaagaaacctggggcctctgtgaaggtgtcctgcaaggcttccggctacacctttaccagctactacatgcactgggtccgacaggcccctggacaaggacttgagtggatgggcatcatcaaccctagcggcggcagcacaagctacgcccagaaattccagggcagagtgaccatgacacacgacaccagcacctccaccgtgtacatggaactgagcagcctgagaagcgaggacaccgccgtgtactactgcgccagatccttcttcaccggcttccacctggattactggggccagggaacactggtcacagtgtcatctgcatctggcggaggcggaagtggaggcggaggatctggcggcggaggctctgaaattgtgctgacacagagccccggcacactgtcactttctccaggcgaaagagccacactgagctgtagagccagccagagcgtgtccagctcttacctggcttggtatcagcagaagcccggccaggctcctagactgctgatctacggtgccagcagcagagccacaggcatccccgatagattttctggcagcggctccggcaccgacttcaccctgacaatcagcagactggaacccgaggactttgccgtgtattattgccagcagtacaccaacgagcactactacaccttcggccagggcaccaaggtggaaatcaagagaacagtggccgcc

SEQ ID NO: 33494 - DNA, 768 bp, synthetic construct
  source 1..768: mol_type = other DNA
gagatcgtgctgacacagtctcccgccacactgtcactgtctccaggcgaaagagccacactgagctgtagcgtgtccagcagcatcagcagcagcaacctgcactggtatcagcagaagcctggacaggcccctcggctgctgatctacggcacatctaatctggcctctggcatccccgccagattttctggctctggaagcggcaccgacttcaccctgaccataagcagcctggaacctgaggacttcgccgtgtactactgccagcagtggtccagctatccccacacatttggcggaggcaccaaggtggaaatcaagagaacagtggctgccggcggaggcggaagtggaggcggaggatctggcggcggaggctctcaggttcagctggttcagagcggagccgaagtgaagaaacctggggcctctgtgaaggtgtcctgcaaggcttccggctacacctttaccaactacctgatcgagtgggtccgacaggctccaggacaaggactggaatggatgggcctgattaaccctggcagcggcggcaccaactacaacgagaagttcaagggcagagtgaccatgaccaccgacaccagcacaagcaccgcctacatggaactgcggagcctgagaagcgacgacaccgccgtgtattattgcgccagaagaagccctctcggctcttggatctactacgcctatgacggcgtggcctattggggccagggaacactggttacagtgtcctctgccagc

SEQ ID NO: 33495 - DNA, 723 bp, synthetic construct
  source 1..723: mol_type = other DNA
gacatccagatgacacagagccctagcagcctgtctgccagcgtgggagacagagtgaccatcacctgtaaagccggccagaacgtgggcacaagcgtggcatggtatcagcagaagcctggcaaggcccctaagctgctgatctacagcgccagctacagatacagcggcgtgcccagcagattttctggcagcggctctggcaccgacttcaccctgacaatatccagcctccagcctgaggacttcgccacctactactgccagcagtacatcacatacccctacaccttcggccagggcaccaaggtggaaatcaagagaacagtggctgccggcggaggcggaagtggaggcggaggatctggcggcggaggctctgaagttcagctggttgaatcaggcggcggactggttcaacctggcggatctctgagactgagctgtgccgccagcggcttcaccttcagcagatactggatgagctgggtccgacaggcccctggcaaaggacttgaatgggtcgccgagatcaaccccgacagcagcaccatccagtacaccccatctctgaaggcccggttcaccctgtccgtggacagaagcaagaacaccctgtacctccagatgaactccctgagagccgaggacaccgccgtgtactattgtgccagacctgcctattggggccagggaacactggtcacagtgtctagcgcttcc

SEQ ID NO: 33496 - DNA, 744 bp, synthetic construct
  source 1..744: mol_type = other DNA
gacatccagatgacacagagccctagcagcctgtctgccagcgtgggagacagagtgaccatcacatgtagcgccagccaggacatcggcaactttctgaactggtatcagcagaagcccggcaaggcccctaagctgctgatctactacacctccagcctgtacagcggcgtgcccagcagattttctggcagcggctctggcaccgacttcaccctgacaatatccagcctccagccagaggacttcgccacctactactgccagcagtacagcaagctgcccctgacctttggacagggcaccaagctggaaatcaagagaacagtggctgccggcggaggcggaagtggaggcggaggatctggcggcggaggctctcaagttcagctggttcagtctggggccgaagtgaagaaacctggggcctctgtgaaggtgtcctgcaaggcttccggctacacctttaccggctacaacatccactgggtccgacaggctcccggccaaagacttgaatggatgggcgctatctaccccggcaacggcgataccagctacaagcagaaattccggggcagagtgacaattaccagagacaccagcgccagcaccgcctacatggaactgtctagcctgagaagcgaggacaccgccgtgtactattgcgccagaggcgaaacagccagagccacctttgcctattggggccagggaaccctggtcacagtgtctagtgcttcc

SEQ ID NO: 33497 - DNA, 336 bp, synthetic construct; identical to SEQ ID NO: 33079
  source 1..336: mol_type = other DNA

SEQ ID NO: 33498 - DNA, 321 bp, synthetic construct; identical to SEQ ID NO: 33080
  source 1..321: mol_type = other DNA

SEQ ID NO: 33499 - DNA, 324 bp, synthetic construct; identical to SEQ ID NO: 33081
  source 1..324: mol_type = other DNA

SEQ ID NO: 33500 - DNA, 324 bp, synthetic construct; identical to SEQ ID NO: 32026
  source 1..324: mol_type = other DNA

SEQ ID NO: 33501 - DNA, 324 bp, synthetic construct; identical to SEQ ID NO: 33083
  source 1..324: mol_type = other DNA

SEQ ID NO: 33502 - DNA, 324 bp, synthetic construct; identical to SEQ ID NO: 33084
  source 1..324: mol_type = other DNA

SEQ ID NO: 33503 - DNA, 336 bp, synthetic construct; identical to SEQ ID NO: 33085
  source 1..336: mol_type = other DNA

SEQ ID NO: 33504 - DNA, 336 bp, synthetic construct; identical to SEQ ID NO: 33086
  source 1..336: mol_type = other DNA

SEQ ID NO: 33505 - DNA, 327 bp, synthetic construct; identical to SEQ ID NO: 33087
  source 1..327: mol_type = other DNA

SEQ ID NO: 33506 - DNA, 726 bp, synthetic construct
  source 1..726: mol_type = other DNA
gagatcgtgctgacacagtctcccgccacactgtcactgtctccaggcgaaagagccacactgagctgtagagccagccagagcgtgtcctcttacctggcctggtatcagcagaagcctggacaggctccccggctgctgatctacgatgccagcaatagagccacaggcatccccgccagattttctggctctggcagcggcaccgatttcaccctgaccataagcagcctggaacctgaggacttcgccgtgtactactgccagcagagaagcaactggcccctgacctttggacagggcaccaaggtggaaatcaaaggcggaggcggaagtggaggcggaggatctggcggcggaggctctcaagttcagctggttcagagcggagccgaagtgaagaaacctggcagcagcgtgaaggtgtcctgcaaagcaagcggcggcacctttagcacctacgccatccactgggttcgacaggcaccaggacaaggactggaatggatgggcagaatcatccccatcgagggcagagcctactacgcccagaaattccagggcagagtgaccatcaccgccgacgagtctacaagcaccgcctacatggaactgagcagcctgagaagcgaggataccgctgtgtactattgcgccagaggccggtacagctacagatattggttcgactactggggccagggcaccctggttacagtctcttct

SEQ ID NO: 33507 - DNA, 750 bp, synthetic construct
  source 1..750: mol_type = other DNA
gacatcgtgatgacacagagccctgatagcctggccgtgtctctgggagagagagccaccatcaactgcaagagcagccagagcgtgctgtactccagcaacaacaagaactacctggcctggtatcagcagaagcccggccagcctcctaagctgctgatctactgggccagcaccagagaaagcggcgtgcccgatagattttctggcagcggctctggcaccgacttcaccctgacaattagcagcctccaggccgaggatgtggccgtgtactactgccagcagtattacagcacccctctgaccttcggccagggcaccaaggtggaaatcaaaggcggaggcggaagtggaggcggaggatctggcggcggaggctctgaagttcagctggttcagagcggagccgaagtgaagaagccaggcgagagcctgaagattagctgcaaaggctccggctacagcttcaccagctactggatcggctgggtccgacagatgcctggcaaaggactggaatggatgggcatcatctaccccggcgacagcgacaccagatacagccctagctttcagggccaagtgaccatcagcgccgacaagagcatcagcacagcctacctccagtggtcctctctgaaggccagcgataccgccatgtactattgcgccagagatgtcggcagatgggctcctggcggcttcctggattattggggacagggcacactggtcaccgtgtctagt

SEQ ID NO: 33508 - DNA, 723 bp, synthetic construct
  source 1..723: mol_type = other DNA
gacatccagatgacacagagccctagcagcctgtctgccagcgtgggagacagagtgaccatcacctgtagagccagccagagcatcaacaagtggctgaactggtatcagcagaagcccggcaaggcccctaagctgctgatctatgccgccagctctctccagagcggagtgcctagcagattttctggcagcggctccggcaccgatttcaccctgacaatatccagcctccagcctgaggacttcgccacctactactgccagcaggactacaacttcccctacaccttcggccagggcaccaaggtggaaatcaaaagaggcggaggcggaagtggaggcggaggatctggcggcggaggctctcaagttcagctggttcagagcggcgctgaagtgaagaaacctggcagcagcgtgaaggtgtcctgcaaagcaagcggcggcacctttagcagctacggcatctcttgggtccgacaggctcctggacaaggactggaatggatgggctggatcagcgccatcttcggcacagccaattacgcccagaaattccagggccgcgtgacaatcacagccgacgagtctacaagcaccgcctacatggaactgagcagcctgagaagcgaggacaccgccgtgtactattgtgccagaggcgtggcctcctggtatctggattattggggccagggaaccctggtcaccgtgtcatct

SEQ ID NO: 33509 - DNA, 723 bp, synthetic construct
  source 1..723: mol_type = other DNA
gatattcagctgacccagagccacaagtttctgagcaccagcgtgggcgacagagtgtccatcacctgtaaagccagccaggacgtgtacaacgccgtggcctggtatcagcagaagcctggacagagccccaagctgctgatctacagcgccagcagcagatacacaggcgtgcccagcagattcaccggctctggatctggccccgacttcacctttaccatcagctctgtgcaggccgaggacctggccgtgtacttttgtcagcagcacttcagaacccctttcaccttcggcagcggcaccaagctggaaatcaagggcggaggcggaagtggaggcggaggatctggcggcggaggctctcaggttcagctccagcagtctggacccgagctgaagaaacctggcgagacagtgaagatcagctgcaaggccagcggctaccccttcaccaactacggcatgaactgggtcaagcaggcccctggacagggcctgaaatggatgggctggatcaataccagcaccggcgagagcaccttcgccgacgatttcaagggcagattcgacttcagcctggaaaccagcgccaacaccgcctacctccagatcaacaacctgaagtccgaggatatggctacctacttctgcgccagatgggaagtgtaccacggctacgtgccatattggggccagggcacaaccgtgacagtctcttct

SEQ ID NO: 33510 - DNA, 720 bp, synthetic construct
  source 1..720: mol_type = other DNA
gacatccagctgacacagagcccttctagcctgtctgccagcgtgggcgacagagtgaccatcacctgtaaagccagccaggacgtgggcacaagcgtggcatggtatcagcagaagcctggcaaggcccctaagctgctgatctactggaccagcaccagacacacaggcgtgcccagcagattttctggcagcggctctggcaccgacttcaccttcacaatatccagcctccagcctgaggacattgccacctactactgccagcagtacagcctgtaccgctctttcggccagggcaccaaggtggaaatcaaaggcggaggcggaagtggaggcggaggatctggcggcggaggctctgaagtgcagctggttgaatcaggtggcggcgttgtgcagcctggcagaagtctgagactgagctgtagcgccagcggcttcgatttcaccacctactggatgagctgggtccgacaggcccctggcaaaggactggaatggatcggcgagattcaccccgacagcagcaccatcaattacgcccctagcctgaaggacagattcaccatcagccgggacaacgccaagaacaccctgttcctccagatggactccctgaggccagaggataccggcgtgtacttttgcgccagcctgtatttcggcttcccttggtttgcctactggggccagggaacccctgtgacagttagctct

SEQ ID NO: 33511 - DNA, 732 bp, synthetic construct
  source 1..732: mol_type = other DNA
gacatccagctgacacagagcccttctagcctgtctgccagcgtgggcgacagagtgaccatcacctgtagcacaagcagcagcgtgtcctacatgcactggtatcagcagaagcccggcaaggcccctaagctgctgatctacagcaccagcaatctggcctctggcgtgcccagcagattttctggctctggcagcggcaccgacttcaccttcacaatatccagcctccagcctgaggacattgccacctactactgccaccagtggtctagctaccccacattcggccagggcaccaaggtggaaatcaaaggcggaggcggaagtggaggcggaggatctggcggcggaggctctggagtgcattctcaggttcagctgcaagagtctggccctggacttgtgcggcctagccaaacactgagcctgacctgtaccgtgtccggcttcacaatcagctccggctacagctggcactgggtccgacaaccacctggcagaggactggaatggatcggctacatccagtacagcggcatcaccaactacaaccccagcctgaagtcccgcgtgaccatgctggtggacacctccaagaaccagttcagcctgagactgagcagcgtgacagccgccgatacagccgtgtactactgcgccagagaggactacgactaccactggtacttcgacgtgtggggccagggaaccaccgtgacagtttcttct

SEQ ID NO: 33512 - DNA, 732 bp, synthetic construct; identical to SEQ ID NO: 402
  source 1..732: mol_type = other DNA

SEQ ID NO: 33513 - DNA, 741 bp, synthetic construct
  source 1..741: mol_type = other DNA
gagatcgtgctgacacagagccctggcacactgtcactgtctccaggcgaaagagccacactgagctgtagagccagccagagcgtgtccagcgattacctggcttggtatcagcagaagcccggacaggctcccagactgctgatctacggtgcctctagcagagccacaggcatccccgatagattttctggcagcggctccggcaccgacttcaccctgacaattagcagactgcccgaggacttcgccgtgtactactgccagcagtacgtgtcctactggacctttggcggaggcaccaaggtggaaatcaaaagaacagtggctgccggcggaggcggaagtggaggcggaggatctggcggcggaggctctcaggtgcagctggttgaatctggtggcggagttgtgcagcctggcagaagcctgagactgtcttgtgccgccagcggcttcacctttagcagctatgccatgcactgggtccgacaggcccctggcaaaggacttgaatgggtcgccgtgatctcctacgacggcagcaacaagtattacgccgacagcgtgaagggcagattcaccatcagccgggacaacagcaagaacaccctgtacctccagatgaacagcctgagagccgaggacaccgccgtgtactactgtgccaaagaggccccttactacgccaaggactacatggacgtgtggggcaagggcaccaccgtgacagtttcttct

SEQ ID NO: 33514 - DNA, 738 bp, synthetic construct
  source 1..738: mol_type = other DNA
agctacgagctgatccagcctccttctgccgctgtgacactgggcaataccgtgtctctgacctgtgtgggagatgagctgcccaagagatacgcctactggtatcagcagaagcccgaccagagcatcgtgcgcgtgatctacgaagatagcgtgcggcctcctggcatcagcgatagattttctggcagcagcagcggcaccaccgccacactgacaattagagatgcccagaacgaggacgaggccgactactactgtcagagcacctacggcgacgacaagctgtacatctttggcggaggcaccaagctgacagtgcttggaggcggaggcggaagtggaggcggaggatctggcggcggaggctctgaagttcagctggttgaaacaggtggcggcctggtgcagcctggcaaatctctggaactgacctgcgccaccagcggcttcacctttaataccgcctggatgcactgggtccgacagagccccgataagcggctggaatggatcgccagaatcaaggacaccagcaacaactacgccaccgactacgtggaatccatgaagggcagattcaccatcagccgggacgacagcaagggctccgtgaacctccagatgaacagcctgaaagaagaggacaccgccacctactactgcaccaccgacttctacgacggcacctactattggaactactggggccagggcgtgatggtcacagtgtcatct

SEQ ID NO: 33515 - DNA, 750 bp, synthetic construct
  source 1..750: mol_type = other DNA
agcgtgatcgagctgacacagagccccaagttcatgagcaccagcgtgggcgacagagtgaacgtgacatacaaggccagccagaacgtgggcaccaacgtggcatggttccagcagaagcctggacagagccctaaggtgctgatctacagcgccagctacagatacagcggcgtgcccgatagattcacaggctctggcagcggcaccgacttcaccctgacaatcagcaacgtgcagagcgaggacctggccgagtatttctgccagcagtaccacacataccctctgacctttggcggaggcaccaagctggaaatcaagagaggcggaggcggaagtggaggcggaggatctggcggcggaggctctagaatggctcaggttcagctgcaacagagcggagccgaacttgctagacctggcgcttccgtgaagatgagctgtaaagccagcggctacaccttcaccacctacaccatccactgggtccgaagaaggccaggccacgaccttgagtggatcggctacatcaaccccagcagcggctgctccgactacaaccagaacttcaagggcaagaccacactgaccgccgacaagagcagcaacaccgcctacatgcagctcaacagcctgaccagcgaggacagcgccgtgtactattgtgccagaagggccgactacggcaactacgagtacacttggtttgcctactggggccagggcaccaccgtgacagtttcttct

SEQ ID NO: 33516 - DNA, 723 bp, synthetic construct
  source 1..723: mol_type = other DNA
gacatccagatgacacagagccctagcagcgtgtccgcctctgtgggagacagagtgaccatcacctgtagagccagccagagcgtgtccagctacctgaactggtatcagcagaagcccggcaaggcccctaagctgctgatctatgctgccagctctctgcagtctggcgtgcccagcagattttctggcagcggctctggcaccgacttcaccctgaccatatctagcctgcagcctgaggacttcgccacctactactgccagcagagctacagcaccccttggacctttggacagggcaccaagctggaaatcaagagaggcggaggcggaagtggaggcggaggatctggcggcggaggctctgaagtgcagctggttgaatcaggtggcggcctggttcagcctggcagaagtctgagactgagctgtgccgccagcggcttcaccttcgacgattacggaatgcactgggtccgacaggcccctggcaaaggacttgaatgggtgtccggcatcagctggaacagcggcagcatcggctatgccgatagcgccaagggcagattcaccatcagccgggacaacagcaagaacaccctgtacctgcagatgaacagcctgagagccgaggacaccgccgtgtactactgtgccaagaggggcaacagcaacagcttcgactattggggccagggcaccctggtcacagtctcttct

SEQ ID NO: 33517 - DNA, 744 bp, synthetic construct
  source 1..744: mol_type = other DNA
cagtctgctctgacccagcctagatccgtgtctggctctcctggacagagcgtgaccatcagctgtaccggcacctcttctgacgtgggcagctacaactacgtgtcctggtatcagcagagccccggcaaggcccctaagctgatgatctacgacgtgtccaacagacccagcggcgtgtccaatagattctccggcagcaagagcggcaacaccgccagcctgacaatctctggactccagtctgaggacgaggccgactactactgtaccagctacggcagctacgacatccccgtgatttttggcggaggcaccaaggtggaaatcaaaggcggaggcggaagtggaggcggaggatctggcggcggaggctctcagatgcagctggtgcagtctggggccgaagtgaagaaacctggcagcagcgtgaaggtgtcctgcaaagcaagcggcggcacctttagctcctacgccatctcttgggtccgacaggctccaggacaaggactggaatggatgggcggcatcatccccatcttcggcacagccaattacgcccagaaattccagggcagagtgacaatcaccgccgacaagagcaccagcaccgcctacatggaactgagcagcctgagaagcgacgacaccgccgtgtactactgcgccagagatgaactgtgggccaccaactactactacatggacgtgtggggcaagggcaccctggtcacagtttcttct

SEQ ID NO: 33518 - DNA, 723 bp, synthetic construct
  source 1..723: mol_type = other DNA
gacgtggtcatgacacagagcccttctagcctgtctgccagcgtgggcgacagagtgaccatcacctgtaaagccagccagagcgtgtccagctacctgaactggtatcagcagaagcccggcaaggcccctaagctgctgatctatgctgccagcagcctggaaacaggcgtgcccagcagattttctggcagcggctctggcaccgacttcaccctgacaatatccagcctccagcctgaggacttcgccacctactactgtcagcagagctacagcaccccttggacctttggccagggcaccaaggtggaaatcaagagaggcggaggcggaagtggaggcggaggatctggcggcggaggctctgaagttcagctggttgaatctggcggcggactcgttagacctggcggatctctgagactgagctgtgccgccagcggcttcaccttcgatgattacggcatgagctgggtccgacaggcccctggaaaaggactggaatgggtgtccggcatcagctggaatagcggctctatcggctacgccgacagcgtgaagggcagattcaccatcagccgggacaacgccaagaacagcctgtacctccagatgaactccctgagagccgaggacacagccctgtactactgtgccaagcggggcaacagcaacagcttcgattattggggccagggaaccaccgtgaccgtgtcatct

SEQ ID NO: 33519 - DNA, 723 bp, synthetic construct
  source 1..723: mol_type = other DNA
gacatccagatgacacagagccctagcagcgtgtccgcctctgtgggagacagagtgaccatcacctgtagagccagccagagcatcagcagctacctgaactggtatcagcagaagcccggcaaggcccctaaactgctgatctatgccgccagctctctccagagcggagtgcctagcagattttctggcagcggctccggcaccgatttcaccctgacaatatccagcctccagcctgaggacttcgccacctactactgccagcagagctacagcaccccttggacctttggacagggcaccaaggtggaaatcaagagaggcggaggcggaagtggaggcggaggatctggcggcggaggctctgaagtgcagctggttgaatcaggtggcggcctggttcagcctggcagaagtctgagactgagctgtgccgcctccggcttcaccttcgatgattacgccatgcactgggtccgacaggcccctggaaaaggactggaatgggtgtccggcatcagctggaatagcggctctatcggctacgccgattccgccaagggcagattcaccatcagccgggacaacagcaagaacaccctgtacctccagatgaactccctgagagccgaggacaccgccgtgtactactgtgccaagaggggcaacagcaacagcttcgactattggggccagggcaccctggtcacagtctcttct

SEQ ID NO: 33520 - DNA, 723 bp, synthetic construct
  source 1..723: mol_type = other DNA
gacacagtgctgacacagtctccagctctggctgtgtctcctggcgagagagtgaccatctcttgcaaggccagcgagagcgtgtccaccagaatgcactggtacagacagaagcccggccagcagccaaagctgctgatctacaagaccagcaacctggcctctggcgtgccagccagattttctggctctggcagcggcaccgacttcaccctgaccattgatcccgtggaagccgacgacaccgccacctacttttgtcagcagtcctggaacggccctctgacatttggaagcggcaccaagctggaaatcaagagaggcggaggcggaagtggaggcggaggatctggcggcggaggctctcaggtgcagctgaaagagtctggccctggactggtgcagcctagccaaacactgagcctgacctgtaccgtgtctggcctgtctctgaccagcaatggcgtgtcctggatcagacagcctcctggcaaaggactggaatggctgggcgtgatctggtccaatggcggcacagactacaacagcgccatcaagagccggctgagcttcagcagagacaccagcaagagccaggtgttcctgaagatgaacagcctccagaccgaggataccgccatgtacttttgcgccagacctcggtacaactccggctacttcttcgactattggggccagggcgtgatggtcaccgttagctct

SEQ ID NO: 33521 - DNA, 759 bp, synthetic construct
  source 1..759: mol_type = other DNA
gacctggtcatgacacagagcccttttagcctggccgtgtccgagggcgagatggtcacaatcaagtgcaagagcagccagagcctgctgagcagcagacaccagaagaactttctggcctggtacagacagaagcccggacagtctcccaagctgctgatctaccacgccagcacaagacagagcggcgtgcccgatagattcatcggctctggcagcggcaccgacttcaccctgacaatctctgatgtgcaggccgaggacctggccgactactattgtctccagcactacacaagcccctacacctttggagccggcaccaagctggaactgaaaagaggcggaggcggaagtggaggcggaggatctggcggcggaggctctcaagtgcagctgaaagagtctggccccggactggttcagcctagccaaacactgagcctgacctgtaccgtgtccggctttagcctgaccagctaccacgtgcactgggtccgacaacctccaggcaaaggactggaatggatgggcgtgatgtggagcgacggcgacaccctgtataacagcgccctgaagtcccggctgagcatcagcagagataccagcaagagccaggtgctgctccagatggatagcctccagagcgaggataccgccacctactactgtgccagactccaggtgttcggctaccccggcatcagagactacgtgatggatgcctggggacagggcgcttctgtgacagtctcttct

SEQ ID NO: 33522 - DNA, 762 bp, synthetic construct
  source 1..762: mol_type = other DNA
gacatccagctgactcagagccctagctttctgagcgccagcgtgggcgacagagtgaccattacatgtagagccagccaggacatcagcagctacctggcctggtatcagcagaagcctggcaacgcccctaaactgctgatctacgccgccagcctgctgcaatctggcgtgccaagcagattcagcgcctttggcagcggcaccgagttcaccctgacaatatctagcctccagccagaggacttcgccacctactactgccagcacctgaagtcttaccctctgttcaccttcggacccggcaccaaggtggacatcaaaagaggcggaggcggaagtggaggcggaggatctggcggcggaggctctgaagttcagctggttgagtctggcggcagagtcgttagacctggcggaagcctgagactgtcttgtgccgccagcggcttcacctttgacgactacggcatgagctgggtccgacagcctcctggaaagggcctcgaatttgtgtccggcctgaactggaacggcgacatcaccgcctttaccgacagcgtgaagggcagattcaccatcagccgggacaacgtgaagtccagcctgtacctccagatgaacagcctgagagccgacgacaccgccttctactactgtgccagagtgcggacctggggcgattacacaacaggcgaggaaatcatcaacagctggtacttcgacctgtggggcagaggcacactggtcacagtctcttct

SEQ ID NO: 33523 - DNA, 726 bp, synthetic construct
  source 1..726: mol_type = other DNA
gaactccagatgacacagagccctagcagcctgtctgccagcgtgggagacagagtggctatcacctgtagagccagccagagcatcagcagccacctgaactggtatcagcagaagcctggcaaggcccctaagctgctgatctatgccgccagctctctccagagcggagtgcctagcagattttctggcagcggctccggcaccgatttcaccctgacaatatccagcctccagcctgaggacttcgccacctactactgccagcagagctacagcaccccttacacattcggccagggcaccaagctggaaatcaaaggcggaggcggaagtggaggcggaggatctggcggcggaggctctgaagtgcagctggttgaatcaggtggcggcctggttcaacctggcggatctctgagactgagctgtgccgcctccggcttcacctttagcagctactggatgagctgggtccgacaggcccctggcaaaggacttgagtgggtcgccaacatcaagcaggacggcagcgagaagtattacgtggacagcgtgaagggcagattcaccatcagccgggacaacgccaagaacagcctgtacctgcggatgaactccctgagagccgaggataccgccgtgtactattgtgccagagcctggggctacagctcctactacttcgactattggggccagggaaccctggtcaccgtttctcca

SEQ ID NO: 33524 - DNA, 714 bp, synthetic construct
  source 1..714: mol_type = other DNA
gacatcgtgatgacccagagccacaagttcatgagcaccagcgtgggcgacagagtgtccatcatctgcaaggccagccaggatgtgggcacagccgtggattggtatcagcagaagcctggacagagccccaagctgctgatctactgggccagcacaagacacaccggcgtgcccgatagattcacaggctctggcagcggcaccgatttcaccctggccatcacaaacgtgcagagcgaggacctggccgactacttctgccagcagtacaacagctaccctctgacctttggagccggcaccaagctggaaatcaagagaggcggaggcggaagtggaggcggaggatctggcggcggaggctctgaagttcagctgcaacagtctggccccgagctggttaagcctggaacaagcgtgcggatctcctgcaagaccagcggctacaccttcaccgagtacaccatccactgggtcaagcagagccacggcaagagcctggaatggatcggcaacatcaaccccaacaacggcggcaccacctacaaccagaagttcgaggacaaggccacactgaccgtggacaagagcagcagcaccgcctacatggaactgagaagcctgaccagcgaggacagcgccgtgtactattgtgccgccggatggaacttcgactactggggccagggaacaaccctgaccgttagctct

SEQ ID NO: 33525 - DNA, 714 bp, synthetic construct; identical to SEQ ID NO: 401
  source 1..714: mol_type = other DNA

SEQ ID NO: 33526 - DNA, 714 bp, synthetic construct
  source 1..714: mol_type = other DNA
gacatccagatgacacagagccctagcagcctgtctgccagcgtgggagacagagtgaccatcacatgcaaggccagccaggatgtgggcacagccgtggattggtatcagcagaagcctggcaaggcccctaagctgctgatctactgggccagcacaagacacacaggcgtgcccagcagattttctggcagcggctctggcaccgacttcaccctgacaatatccagcctccagcctgaggacttcgccacctactactgccagcagtacaacagctaccctctgaccttcggccagggcaccaaggtggaaatcaaaagaggcggaggcggaagtggaggcggaggatctggcggcggaggctctgaagttcagctgcaacagtctggccccgagctggttaagcctggaacaagcgtgcggatctcctgcaagaccagcggctacaccttcaccgagtacaccatccactgggtcaagcagagccacggcaagagcctggaatggatcggcaacatcaaccccaacaacggcggcaccacctacaaccagaagttcgaggacaaggccacactgaccgtggacaagagcagcagcaccgcctacatggaactgagaagcctgaccagcgaggacagcgccgtgtactattgtgccgccggatggaacttcgactactggggccagggaacaaccctgaccgttagctct

SEQ ID NO: 33527 - DNA, 714 bp, synthetic construct
  source 1..714: mol_type = other DNA
gacatcgtgatgacccagagccacaagttcatgagcaccagcgtgggcgacagagtgtccatcatctgcaaggccagccaggatgtgggcacagccgtggattggtatcagcagaagcctggacagagccccaagctgctgatctactgggccagcacaagacacaccggcgtgcccgatagattcacaggctctggcagcggcaccgatttcaccctggccatcacaaacgtgcagagcgaggacctggccgactacttctgccagcagtacaacagctaccctctgacctttggagccggcaccaagctggaaatcaagagaggcggaggcggaagtggaggcggaggatctggcggcggaggctctgaagtgcagctggttgaatcaggtggcggcctggttcaacctggcggatctctgagactgagctgtgccgccagcggctacacctttaccgagtacacaatccactgggtccgacaggcccctggcaaaggacttgagtgggtcgccaacatcaaccccaacaatggcggcaccacctacaaccagaagttcgaggacagattcaccatcagccgggacaacagcaagaacaccctgtacctccagatgaactccctgagagccgaggacaccgccgtgtactattgtgccagaggctggaacttcgactactggggccagggaacactggtcaccgttagctct

SEQ ID NO: 33528 - DNA, 732 bp, synthetic construct
  source 1..732: mol_type = other DNA
gagatcgtgctgacacagtctcccgccacactgtcactgtctccaggcgaaagagccacactgagctgtagcgccaccagcagcgtgtcctacatccactggtatcagcagaagcccggacaggcccctagactgctgatctacagcaccagcaatctggcctctggcatccccgccagattttctggctctggaagcggcaccgacttcaccctgacaatcggcagactggaacccgaggacttcgccgtgtactactgccagcagagaagcagcagccccttcacctttggacagggcaccaaggtggaaatcaagagaggcggaggcggaagtggaggcggaggatctggcggcggaggctctgaagtgcagctggttgagtctggcggcggactggttaagcctgagggaagcctgagactgtcttgtgccgccagcggcttcaccttcagcagatacggcatgagctgggtccgacaggctcctggcaaaggactggaatgggtgtccacaatttccggcggaggcacctacatctactaccccgatagcgtgaagggcagattcaccatctccagagacaacgccaagaacagcctgttcctccagatgaactccctgagagccgaggacacagccgtgtattattgcgctcgggacaactacggcagaaactacgactacggcatggactactggggccagggcacactggttaccgttagctct

SEQ ID NO: 33529 - DNA, 729 bp, synthetic construct
  source 1..729: mol_type = other DNA
cagatcgtgctgacacagagccctgccatcatgagtgcctctccaggcgaggaagtgaccctgacctgtagcgccaccagcagcgtgtcctacatccactggtttcagcagaggcccggcacaagccctaagctgtggatctacagcaccagcaatctggcctctggcgtgccagtgcggtttagcggatctggctacggcaccagctacagcctgaccatcagcagaatggaagccgaggatgccgccacctactactgccagcagagaagcagcagccccttcacatttggcagcggcaccaagctggaaatcaaaggcggaggcggaagtggaggcggaggatctggcggcggaggctctgaagtgaaggtggtggaatctggcggcgacctggttaagcctggcggatctctgaagctgagctgtgtggtgtccggcttcaccttcagcagatacggcatgagctgggtccgacagacccctggcaaaagactggaatgggtcgccacaatttccggcggaggcacctacatctactaccccgatagcgtgaagggcagattcaccatctccagagacaacgccaagaacaccctgtacctccagatgagcagcctgaagtctgaggacaccgccatgtaccactgcaccagggacaactacggcagaaactacgactacggcatggactactggggccagggcacaagcgtgacagtctcttct

SEQ ID NO: 33530 - DNA, 747 bp, synthetic construct
  source 1..747: mol_type = other DNA
gacatcgtgctgacacagagccctgcttctctggccgtttctcctggacagagggccaccatcacatgcagagccagcaagagcgtgtccaccagcggctacagctacatgcactggtatcagcagaagcccggccagcctcctaagctgctgatctacctggcctccaacctggaaagcggagtgcctgccagattttctggcagcggctctggcaccgacttcaccctgacaatcaaccccgtggaagccaacgacaccgccaactactactgccagcacagcagagagctgcccttcacatttggcggaggcaccaaggtggaaatcaagagaacaggcggaggcggaagtggaggcggaggatctggcggcggaggctctgaagtgcagctggttgagtctggcggcggacttgtgaaacctggcggaagcctgagactgagctgtgccgcttccggctttacctttagcggctacgccatgagctgggtccgacaggctcctggcaaaggactggaatgggtgtccacaatcagcagcggcggcacctacatctactaccccgatagcgtgaaaggccggttcaccatcagccgggacaacgccaagaacagcctgtacctccagatgaactccctgagagccgaggacaccgccgtgtactattgtgccagactcggcggcgacaattactacgagtatttcgacgtgtggggcaagggcaccaccgtgacagtttcttct

SEQ ID NO: 33531 - DNA, 720 bp, synthetic construct
  source 1..720: mol_type = other DNA
gacatccagatgacacagagccctagcagcctgtccgtgtccgtgggagacagagtgaccatcacatgcaaggccagccagaacgtgcggacagtggtggcttggtatcagcagaagcctggactggcccctaagacactgatctacctggcctccaacagacacaccggcgtgccaagcagattttctggcagcggctctggcaccgacttcaccttcacaatatccagcctccagcctgaggacattgccacctacttttgccagcagcactggtcttaccctctgacctttggacagggcaccaaggtggaagtgaagagaggcggaggcggaagtggaggcggaggatctggcggcggaggctctgaagttcagctgcttgaatctggcggcggactggttcaacctggcggatctctgagactgagctgtgccgcctctggcttcgccttcagcacctacgatatgagctgggtccgacaggcccctggcaaaggacttgaatgggtcgccacaatcagcagcggcggcagctacacctactacctggatagcgtgaagggcagattcaccatcagccgggacagcagcaagaacaccctgtacctccagatgaactccctccaggccgaggactccgccatctactattgtgcccctaccaccgtggtgcctttcgcctattggggacagggaaccctggtcaccgttagctct

SEQ ID NO: 33532 - DNA, 732 bp, synthetic construct
  source 1..732: mol_type = other DNA
gacattcagatgacacagagccctagcagcctgagcgcctctgtgggagacagagtgaccatcacatgcaagagcagccagagcctgctgtactccagcaatcagaagaactacctggcctggttccagcagaagcctggcaaggctcctaagctgctgatctactgggccagcaccagagaaagcggcgtgccaagcagattttctggcagcggctctggcaccgacttcaccctgacaatatccagcctccagcctgaggacttcgccacctacttttgccaccagtacctgagcagctacacattcggacagggcaccaaggtggaaatcaagcggggcggaggcggaagtggaggcggaggatctggcggcggaggctctgaggtgcagctggttgaatctggcggaggactggttcagcctggcggatctctgagactgtcttgtgccgccagcggctacaccttcaccagctattggctgcactgggtccgacaggcccctggcaaaggacttgagtgggtcggatatatcaggcccagcaccggctacacagagtacaaccagaagttcaaggaccgcttcaccatcagcgccgacaccagcaagaataccgcctacctccagatgaacagcctgagagccgaggacaccgccgtgtactactgtgccagatccagatggctgctggactattggggccagggcacactggttacagttagctct

SEQ ID NO: 33533 - DNA, 729 bp, synthetic construct
  source 1..729: mol_type = other DNA
gacattcagatgacacagagccctagcagcctgagcgcctctgtgggagacagagtgaccatcacatgcaagagcagccagagcgtgctgtactccagcaatcagaagaactacctggcctggttccagcagaagcctggcaaggctcctaagctgctgatctactgggccagcaccagagaaagcggcgtgccaagcagattttctggcagcggctctggcaccgacttcaccctgacaatatccagcctccagcctgaggacttcgccacctacttttgccaccagtacctgagcagctacacattcggacagggcaccaaggtggaaatcaagcggggcggaggcggaagtggaggcggaggatctggcggcggaggctctgaggtgcagctggttgaatctggcggaggactggttcagcctggcggatctctgagactgtcttgtgccgccagcggcttcaccttcaccacctattggatgcactgggtccgacaggcccctggcaaaggacttgagtgggtcggatatatcaggcccagcaccggctacacagagtacaaccagaagttcaaggaccgcttcaccatcagcgccgacaccagcaagaataccgcctacctccagatgaacagcctgagagccgaggacaccgccgtgtactactgtgccagatccagatggctgctggactattggggccagggcacactggttacagtttct

SEQ ID NO: 33534 - DNA, 729 bp, synthetic construct
  source 1..729: mol_type = other DNA
gaggtgcagctggttgaatctggcggaggactggttcagcctggcggatctctgagactgtcttgtgccgccagcggctacaccttcaccacctattggatgcactgggtccgacaggcccctggcaaaggacttgagtgggtcggatatatcaggcccagcaccggctacacagagtacaaccagaagttcaaggaccgcttcaccatcagcgccgacaccagcaagaataccgcctacctccagatgaacagcctgagagccgaggacaccgccgtgtactactgtgccagatccagatggctgctggactattggggccagggcacactggttacagtttctggcggaggcggaagtggaggcggaggatctggcggcggaggctctgacattcagatgacacagagccctagcagcctgagcgcctctgtgggagacagagtgaccatcacatgcaagagcagccagagcctgctgtactccagcaatcagaagaactacctggcctggttccagcagaagcctggcaaggctcctaagctgctgatctactgggccagcaccagagaaagcggcgtgccaagcagattttctggcagcggctctggcaccgacttcaccctgacaatatccagcctccagcctgaggacttcgccacctacttttgccaccagtacctgagcagctacacattcggacagggcaccaaggtggaaatcaagcgg

SEQ ID NO: 33535 - DNA, 720 bp, synthetic construct; identical to SEQ ID NO: 400
  source 1..720: mol_type = other DNA

SEQ ID NO: 33536 - DNA, 720 bp, synthetic construct
  source 1..720: mol_type = other DNA
gacatccagatgacacagagccctagcagcctgtctgccagcgtgggagacagagtgaccatcacctgtagagccagccaggacatcagcagctacctgaactggtatcagcagaagcccggcaaggcccctaagctgctgatctactacaccagcagactgcacagcggcgtgcccagcagattttctggctctggcagcggcaccgacttcaccctgacaatatctagcctccagcctgaggacttcgccacctactattgccagcagggcaacaccctgccttacacatttggacagggcaccaaggtggaaatcaagagaggcggaggcggaagtggaggcggaggatctggcggcggaggctctgaagtgcagctggttgaatcaggtggcggcctggttcaacctggcggatctctgagactgagctgtgccgccagcggcttcaccttcagcgactactttatgagctgggtccgacaggcccctggcaaaggacttgaatgggtcgccaccatcagcaatggcggcacctacacttactaccccgacagcgtgaagggcagattcaccatctccagagacaacagcaagaacaccctgtacctccagatgaactccctgagagccgaggacaccgccgtgtactactgcgccagattcgacggctacatcttcgactattggggccagggcaccctggtcacagtctcttct

SEQ ID NO: 33537 - DNA, 720 bp, synthetic construct
  source 1..720: mol_type = other DNA
gacatccagatgacacagagccctagcagcctgtctgccagcgtgggagacagagtgaccatcacctgtagagccagccaggacatcagcaactacctgaactggtatcagcagaagcccggcaaggcccctaagctgctgatctactacaccagcagactgcacagcggcgtgcccagcagattttctggctctggcagcggcaccgacttcaccctgacaatatctagcctccagcctgaggacttcgccacctactattgccagcagggcaacaccctgccttggacatttggacagggcaccaaggtggaaatcaagagaggcggaggcggaagtggaggcggaggatctggcggcggaggctctgaagtgcagctggttgaatcaggtggcggcctggttcaacctggcggatctctgagactgagctgtgccgccagcggcttcaccttcagcgactactttatgagctgggtccgacaggcccctggcaaaggacttgaatgggtcgccaccatcagcaatggcggcacctacacttactaccccgacagcgtgaagggcagattcaccatctccagagacaacagcaagaacaccctgtacctccagatgaactccctgagagccgaggacaccgccgtgtactactgcgccagattcgacggctacatcttcgactattggggccagggcaccctggtcacagtctcttct

SEQ ID NO: 33538 - DNA, 732 bp, synthetic construct
  source 1..732: mol_type = other DNA
agctacgtgctgacacagcctccatccgtgtctgtggctccaggacagaccgccagaatcacatgcggcggcaacaacatcggcggcaagagcgtgcactggtatcagcagccacctggacaggctccagtggtggtggtgtacgacgacagcgatagacctagcggcatccccgagagattcagcggcagcaattccggcaataccgccacactgaccatcagcagagtggaagctggcgacgaggccgtgtactactgccaagtgtgggacagcagcagcgatcacgtggtgtttggcggcggaacaaagctgacagtgcttggcggaggcggaagtggaggcggaggatctggcggcggaggctctcaactccagctgcaagagtctggccctggcctggtcaagcctagcgaaacactgagcctgacctgtaccgtgtctggcggctctatcagctccagcagctatttctggggctggatcagacaacctcctggcaaaggactggaatggatcggctccatctactacagcggcatcacctactacaaccccagcctgaagtccagagtgaccatctccgtggacaccagcaagaaccagttctccctgaagctgagcagcgtgacagccgccgataccgccgtgtattattgtgccagacatgacggcgctgtggccggcctgtttgattattggggacagggcaccctggtcaccgtgtcatct

SEQ ID NO: 33539 - DNA, 37 bp, synthetic construct
  source 1..37: mol_type = other DNA
ggggggggggggggggggggggggggggggggggggg

SEQ ID NO: 33540 - DNA, 37 bp, synthetic construct; identical to SEQ ID NO: 33539
  source 1..37: mol_type = other DNA

SEQ ID NO: 33541 - DNA, 37 bp, synthetic construct; identical to SEQ ID NO: 33539
  source 1..37: mol_type = other DNA

SEQ ID NO: 33542 - DNA, 37 bp, synthetic construct; identical to SEQ ID NO: 33539
  source 1..37: mol_type = other DNA

SEQ ID NO: 33543 - DNA, 37 bp, synthetic construct; identical to SEQ ID NO: 33539
  source 1..37: mol_type = other DNA

SEQ ID NO: 33544 - DNA, 37 bp, synthetic construct; identical to SEQ ID NO: 33539
  source 1..37: mol_type = other DNA

SEQ ID NO: 33545 - DNA, 37 bp, synthetic construct; identical to SEQ ID NO: 33539
  source 1..37: mol_type = other DNA

SEQ ID NO: 33546 - DNA, 1464 bp, synthetic construct
  source 1..1464: mol_type = other DNA
atggccttaccagtgaccgccttgctcctgccgctggccttgctgctccacgccgccaggccgagctacgtgctgacacagcctccatccgtgtctgtggctccaggacagaccgccagaatcacatgcggcggcaacaacatcggcggcaagagcgtgcactggtatcagcagccacctggacaggctccagtggtggtggtgtacgacgacagcgatagacctagcggcatccccgagagattcagcggcagcaattccggcaataccgccacactgaccatcagcagagtggaagctggcgacgaggccgtgtactactgccaagtgtgggacagcagcagcgatcacgtggtgtttggcggcggaacaaagctgacagtgcttggcggaggcggaagtggaggcggaggatctggcggcggaggctctcaactccagctgcaagagtctggccctggcctggtcaagcctagcgaaacactgagcctgacctgtaccgtgtctggcggctctatcagctccagcagctatttctggggctggatcagacaacctcctggcaaaggactggaatggatcggctccatctactacagcggcatcacctactacaaccccagcctgaagtccagagtgaccatctccgtggacaccagcaagaaccagttctccctgaagctgagcagcgtgacagccgccgataccgccgtgtattattgtgccagacatgacggcgctgtggccggcctgtttgattattggggacagggcaccctggtcaccgtgtcatctgctacgcgtaaaattgaagttatgtatcctcctccttacctagacaatgagaagagcaatggaaccattatccatgtgaaagggaaacacctttgtccaagtcccctatttcccggaccttctaagcccttttgggtgctggtggtggttgggggagtcctggcttgctatagcttgctagtaacagtggcctttattattttctgggtgaggagtaagaggagcaggctcctgcacagtgactacatgaacatgactccacgccgccccggacccacccgcaagcattaccagccctatgccccaccacgcgacttcgcagcctatcgctccagagtgaagttcagcaggagcgcagacgcccccgcgtaccagcagggccagaaccagctctataacgagctcaatctaggacgaagagaggagtacgatgttttggacaagagacgtggccgggaccctgagatggggggaaagccgagaaggaagaaccctcaggaaggcctgtacaatgaactgcagaaagataagatggcggaggcctacagtgagattgggatgaaaggcgagcgccggaggggcaaggggcacgatggcctttaccagggtctcagtacagccaccaaggacacctacgacgcccttcacatgcaggccctgccccctcgc

SEQ ID NO: 33547 - DNA, 1482 bp, synthetic construct
  source 1..1482: mol_type = other DNA
atggccttaccagtgaccgccttgctcctgccgctggccttgctgctccacgccgccaggccgagctacgtgctgacacagcctccatccgtgtctgtggctccaggacagaccgccagaatcacatgcggcggcaacaacatcggcggcaagagcgtgcactggtatcagcagccacctggacaggctccagtggtggtggtgtacgacgacagcgatagacctagcggcatccccgagagattcagcggcagcaattccggcaataccgccacactgaccatcagcagagtggaagctggcgacgaggccgtgtactactgccaagtgtgggacagcagcagcgatcacgtggtgtttggcggcggaacaaagctgacagtgcttggcggaggcggaagtggaggcggaggatctggcggcggaggctctcaactccagctgcaagagtctggccctggcctggtcaagcctagcgaaacactgagcctgacctgtaccgtgtctggcggctctatcagctccagcagctatttctggggctggatcagacaacctcctggcaaaggactggaatggatcggctccatctactacagcggcatcacctactacaaccccagcctgaagtccagagtgaccatctccgtggacaccagcaagaaccagttctccctgaagctgagcagcgtgacagccgccgataccgccgtgtattattgtgccagacatgacggcgctgtggccggcctgtttgattattggggacagggcaccctggtcaccgtgtcatctgctacgcgtgcgaagcccaccacgacgccagcgccgcgaccaccaacaccggcgcccaccatcgcgtcgcagcccctgtccctgcgcccagaggcgtgccggccagcggcggggggcgcagtgcacacgagggggctggacttcgcctgtgacatctacatctgggcgcccttggccgggacttgtggggtccttctcctgtcactggttatcaccctttactgcaaacggggcagaaagaaactcctgtatatattcaaacaaccatttatgagaccagtacaaactactcaagaggaagatggctgtagctgccgatttccagaagaagaagaaggaggatgtgaactgagagtgaagttcagcaggagcgcagacgcccccgcgtaccagcagggccagaaccagctctataacgagctgaatctaggacgaagagaggagtacgatgttttggacaagagacgtggccgggaccctgagatggggggaaagccgagaaggaagaaccctcaggaaggcctgtacaatgaactgcagaaagataagatggcggaggcctacagtgagattgggatgaaaggcgagcgccggaggggcaaggggcacgatggcctttaccagggtctcagtacagccaccaaggacacctacgacgcccttcacatgcaggccctgccccctcgc

SEQ ID NO: 33548 - DNA, 1482 bp, synthetic construct
  source 1..1482: mol_type = other DNA
atggccttaccagtgaccgccttgctcctgccgctggccttgctgctccacgccgccaggccgcaactccagctgcaagagtctggccctggcctggtcaagcctagcgaaacactgagcctgacctgtaccgtgtctggcggctctatcagctccagcagctatttctggggctggatcagacaacctcctggcaaaggactggaatggatcggctccatctactacagcggcatcacctactacaaccccagcctgaagtccagagtgaccatctccgtggacaccagcaagaaccagttctccctgaagctgagcagcgtgacagccgccgataccgccgtgtattattgtgccagacatgacggcgctgtggccggcctgtttgattattggggacagggcaccctggtcaccgtgtcatctgctggcggaggcggaagtggaggcggaggatctggcggcggaggctctagctacgtgctgacacagcctccatccgtgtctgtggctccaggacagaccgccagaatcacatgcggcggcaacaacatcggcggcaagagcgtgcactggtatcagcagccacctggacaggctccagtggtggtggtgtacgacgacagcgatagacctagcggcatccccgagagattcagcggcagcaattccggcaataccgccacactgaccatcagcagagtggaagctggcgacgaggccgtgtactactgccaagtgtgggacagcagcagcgatcacgtggtgtttggcggcggaacaaagctgacagtgcttacgcgtgcgaagcccaccacgacgccagcgccgcgaccaccaacaccggcgcccaccatcgcgtcgcagcccctgtccctgcgcccagaggcgtgccggccagcggcggggggcgcagtgcacacgagggggctggacttcgcctgtgacatctacatctgggcgcccttggccgggacttgtggggtccttctcctgtcactggttatcaccctttactgcaaacggggcagaaagaaactcctgtatatattcaaacaaccatttatgagaccagtacaaactactcaagaggaagatggctgtagctgccgatttccagaagaagaagaaggaggatgtgaactgagagtgaagttcagcaggagcgcagacgcccccgcgtaccagcagggccagaaccagctctataacgagctgaatctaggacgaagagaggagtacgatgttttggacaagagacgtggccgggaccctgagatggggggaaagccgagaaggaagaaccctcaggaaggcctgtacaatgaactgcagaaagataagatggcggaggcctacagtgagattgggatgaaaggcgagcgccggaggggcaaggggcacgatggcctttaccagggtctcagtacagccaccaaggacacctacgacgcccttcacatgcaggccctgccccctcgc

SEQ ID NO: 33549 - DNA, 1881 bp, synthetic construct
  source 1..1881: mol_type = other DNA
atggccttaccagtgaccgccttgctcctgccgctggccttgctgctccacgccgccaggccgagctacgtgctgacacagcctccatccgtgtctgtggctccaggacagaccgccagaatcacatgcggcggcaacaacatcggcggcaagagcgtgcactggtatcagcagccacctggacaggctccagtggtggtggtgtacgacgacagcgatagacctagcggcatccccgagagattcagcggcagcaattccggcaataccgccacactgaccatcagcagagtggaagctggcgacgaggccgtgtactactgccaagtgtgggacagcagcagcgatcacgtggtgtttggcggcggaacaaagctgacagtgcttctcgagatccagaaccctgatcctgccgtgtaccagctgcgggatagcaagagcagcgacaagagcgtgtgtctgttcaccgacttcgacagccagaccaacgtgtcccagagcaaggactccgacgtgtacatcaccgataagtgcgtgctggacatgcggagcatggacttcaagagcaactccgccgtggcctggtccaacaagtccgatttcgcctgcgccaacgccttcaacaacagcattatccccgaggacacattcttcccaagcagcgacgtgccctgcgacgtgaagctggtggaaaagagcttcgagacagacaccaacctgaacttccagaacctgagcgtgatcggcttcagaatcctgctgctgaaagtggccggctttaacctgctgatgaccctgcggctgtggtccagccgcgccaagagaagcggatctggcgtgaagcagaccctgaatttcgacctgctgaagctggctggcgacgtggaatccaacccaggccctactagtatggactggatttggcgcatccttttccttgtcggcgctgctaccggcgcgcattccttcgaacaactccagctgcaagagtctggccctggcctggtcaagcctagcgaaacactgagcctgacctgtaccgtgtctggcggctctatcagctccagcagctatttctggggctggatcagacaacctcctggcaaaggactggaatggatcggctccatctactacagcggcatcacctactacaaccccagcctgaagtccagagtgaccatctccgtggacaccagcaagaaccagttctccctgaagctgagcagcgtgacagccgccgataccgccgtgtattattgtgccagacatgacggcgctgtggccggcctgtttgattattggggacagggcaccctggtcaccgtgtcatctgctacgcgtgaggacctgaagaacgtgttcccacctgaggtggccgtgttcgagcctagcaaggccgagatcgcccacacccagaaagccaccctcgtgtgcctggctaccggcttctaccccgaccatgtggaactgtcttggtgggtcaacggcaaagaggtgcacagcggcgtgtgtaccgacccccagccactgaaagaacagcccgccctgaacgacagccggtactgcctgagcagcagactgagagtgtccgccaccttctggcagaacccccggaaccacttcagatgccaggtgcagttctacggcctgagcgagaacgacgagtggacccaggacagagccaagcccgtgacccagatcgtgtctgccgaagcctggggcagagccgattgcggcatcaccagcgccagctaccaccagggcgtgctgagcgccaccatcctgtacgagatcctgctgggcaaggccaccctgtacgccgtgctggtgtctgccctggtgctgatggctatggtcaagcggaaggacagccgggga

SEQ ID NO: 33550 - DNA, 1869 bp, synthetic construct
  source 1..1869: mol_type = other DNA
atggccttaccagtgaccgccttgctcctgccgctggccttgctgctccacgccgccaggccgagctacgtgctgacacagcctccatccgtgtctgtggctccaggacagaccgccagaatcacatgcggcggcaacaacatcggcggcaagagcgtgcactggtatcagcagccacctggacaggctccagtggtggtggtgtacgacgacagcgatagacctagcggcatccccgagagattcagcggcagcaattccggcaataccgccacactgaccatcagcagagtggaagctggcgacgaggccgtgtactactgccaagtgtgggacagcagcagcgatcacgtggtgtttggcggcggaacaaagctgacagtgcttctcgaggacctgaagaacgtgttcccacctgaggtggccgtgttcgagcctagcaaggccgagatcgcccacacccagaaagccaccctcgtgtgcctggctaccggcttctaccccgaccatgtggaactgtcttggtgggtcaacggcaaagaggtgcacagcggcgtgtgtaccgacccccagccactgaaagaacagcccgccctgaacgacagccggtactgcctgagcagcagactgagagtgtccgccaccttctggcagaacccccggaaccacttcagatgccaggtgcagttctacggcctgagcgagaacgacgagtggacccaggacagagccaagcccgtgacccagatcgtgtctgccgaagcctggggcagagccgattgcggcatcaccagcgccagctaccaccagggcgtgctgagcgccaccatcctgtacgagatcctgctgggcaaggccaccctgtacgccgtgctggtgtctgccctggtgctgatggctatggtcaagcggaaggacagccggggaagggccaagcgatctggatctggagcaacaaacttctcactactcaaacaagcaggtgacgtggaggagaatcccgggcctactagtatggactggatttggcgcatccttttccttgtcggcgctgctaccggcgcgcattccttcgaacaactccagctgcaagagtctggccctggcctggtcaagcctagcgaaacactgagcctgacctgtaccgtgtctggcggctctatcagctccagcagctatttctggggctggatcagacaacctcctggcaaaggactggaatggatcggctccatctactacagcggcatcacctactacaaccccagcctgaagtccagagtgaccatctccgtggacaccagcaagaaccagttctccctgaagctgagcagcgtgacagccgccgataccgccgtgtattattgtgccagacatgacggcgctgtggccggcctgtttgattattggggacagggcaccctggtcaccgtgtcatctgctacgcgtatccagaaccctgatcctgccgtgtaccagctgcgggatagcaagagcagcgacaagagcgtgtgtctgttcaccgacttcgacagccagaccaacgtgtcccagagcaaggactccgacgtgtacatcaccgataagtgcgtgctggacatgcggagcatggacttcaagagcaactccgccgtggcctggtccaacaagtccgatttcgcctgcgccaacgccttcaacaacagcattatccccgaggacacattcttcccaagcagcgacgtgccctgcgacgtgaagctggtggaaaagagcttcgagacagacaccaacctgaacttccagaacctgagcgtgatcggcttcagaatcctgctgctgaaagtggccggctttaacctgctgatgaccctgcggctgtggtccagc

SEQ ID NO: 33551 - DNA, 1869 bp, synthetic construct
  source 1..1869: mol_type = other DNA
atggccttaccagtgaccgccttgctcctgccgctggccttgctgctccacgccgccaggccgagctacgtgctgacacagcctccatccgtgtctgtggctccaggacagaccgccagaatcacatgcggcggcaacaacatcggcggcaagagcgtgcactggtatcagcagccacctggacaggctccagtggtggtggtgtacgacgacagcgatagacctagcggcatccccgagagattcagcggcagcaattccggcaataccgccacactgaccatcagcagagtggaagctggcgacgaggccgtgtactactgccaagtgtgggacagcagcagcgatcacgtggtgtttggcggcggaacaaagctgacagtgcttctcgaggacctgaagaacgtgttcccacctgaggtggccgtgttcgagcctagcgaggccgagatcagccacacccagaaagccaccctcgtgtgcctggctaccggcttctaccccgaccatgtggaactgtcttggtgggtcaacggcaaagaggtgcacagcggcgtgtgtaccgacccccagccactgaaagaacagcccgccctgaacgacagccggtactgcctgagcagcagactgagagtgtccgccaccttctggcagaacccccggaaccacttcagatgccaggtgcagttctacggcctgagcgagaacgacgagtggacccaggacagagccaagcccgtgacccagatcgtgtctgccgaagcctggggcagagccgattgcggctttaccagcgagagctaccagcagggcgtgctgagcgccaccatcctgtacgagatcctgctgggcaaggccaccctgtacgccgtgctggtgtctgccctggtgctgatggctatggtcaagcggaaggacagccggggaagggccaagcgatctggatctggagcaacaaacttctcactactcaaacaagcaggtgacgtggaggagaatcccgggcctactagtatggactggatttggcgcatccttttccttgtcggcgctgctaccggcgcgcattccttcgaacaactccagctgcaagagtctggccctggcctggtcaagcctagcgaaacactgagcctgacctgtaccgtgtctggcggctctatcagctccagcagctatttctggggctggatcagacaacctcctggcaaaggactggaatggatcggctccatctactacagcggcatcacctactacaaccccagcctgaagtccagagtgaccatctccgtggacaccagcaagaaccagttctccctgaagctgagcagcgtgacagccgccgataccgccgtgtattattgtgccagacatgacggcgctgtggccggcctgtttgattattggggacagggcaccctggtcaccgtgtcatctgctacgcgtatccagaaccctgatcctgccgtgtaccagctgcgggatagcaagagcagcgacaagagcgtgtgtctgttcaccgacttcgacagccagaccaacgtgtcccagagcaaggactccgacgtgtacatcaccgataagtgcgtgctggacatgcggagcatggacttcaagagcaactccgccgtggcctggtccaacaagtccgatttcgcctgcgccaacgccttcaacaacagcattatccccgaggacacattcttcccaagccccgagagcagctgcgacgtgaagctggtggaaaagagcttcgagacagacaccaacctgaacttccagaacctgagcgtgatcggcttcagaatcctgctgctgaaagtggccggctttaacctgctgatgaccctgcggctgtggtccagc

SEQ ID NO: 33552 - DNA, 1881 bp, synthetic construct
  source 1..1881: mol_type = other DNA
atggccttaccagtgaccgccttgctcctgccgctggccttgctgctccacgccgccaggccgagctacgtgctgacacagcctccatccgtgtctgtggctccaggacagaccgccagaatcacatgcggcggcaacaacatcggcggcaagagcgtgcactggtatcagcagccacctggacaggctccagtggtggtggtgtacgacgacagcgatagacctagcggcatccccgagagattcagcggcagcaattccggcaataccgccacactgaccatcagcagagtggaagctggcgacgaggccgtgtactactgccaagtgtgggacagcagcagcgatcacgtggtgtttggcggcggaacaaagctgacagtgcttctcgagatccagaaccctgatcctgccgtgtaccagctgcgggatagcaagagcagcgacaagagcgtgtgtctgttcaccgacttcgacagccagaccaacgtgtcccagagcaaggactccgacgtgtacatcaccgataagtgcgtgctggacatgcggagcatggacttcaagagcaactccgccgtggcctggtccaacaagtccgatttcgcctgcgccaacgccttcaacaacagcattatccccgaggacacattcttcccaagccccgagagcagctgcgacgtgaagctggtggaaaagagcttcgagacagacaccaacctgaacttccagaacctgagcgtgatcggcttcagaatcctgctgctgaaagtggccggctttaacctgctgatgaccctgcggctgtggtccagccgcgccaagagaagcggatctggcgtgaagcagaccctgaatttcgacctgctgaagctggctggcgacgtggaatccaacccaggccctactagtatggactggatttggcgcatccttttccttgtcggcgctgctaccggcgcgcattccttcgaacaactccagctgcaagagtctggccctggcctggtcaagcctagcgaaacactgagcctgacctgtaccgtgtctggcggctctatcagctccagcagctatttctggggctggatcagacaacctcctggcaaaggactggaatggatcggctccatctactacagcggcatcacctactacaaccccagcctgaagtccagagtgaccatctccgtggacaccagcaagaaccagttctccctgaagctgagcagcgtgacagccgccgataccgccgtgtattattgtgccagacatgacggcgctgtggccggcctgtttgattattggggacagggcaccctggtcaccgtgtcatctgctacgcgtgaggacctgaagaacgtgttcccacctgaggtggccgtgttcgagcctagcgaggccgagatcagccacacccagaaagccaccctcgtgtgcctggctaccggcttctaccccgaccatgtggaactgtcttggtgggtcaacggcaaagaggtgcacagcggcgtgtgtaccgacccccagccactgaaagaacagcccgccctgaacgacagccggtactgcctgagcagcagactgagagtgtccgccaccttctggcagaacccccggaaccacttcagatgccaggtgcagttctacggcctgagcgagaacgacgagtggacccaggacagagccaagcccgtgacccagatcgtgtctgccgaagcctggggcagagccgattgcggctttaccagcgagagctaccagcagggcgtgctgagcgccaccatcctgtacgagatcctgctgggcaaggccaccctgtacgccgtgctggtgtctgccctggtgctgatggctatggtcaagcggaaggacagccgggga

SEQ ID NO: 33553 - DNA, 1917 bp, synthetic construct
  source 1..1917: mol_type = other DNA
atggccttaccagtgaccgccttgctcctgccgctggccttgctgctccacgccgccaggccgctcgaggaggacctgaagaacgtgttcccacctgaggtggccgtgttcgagcctagcaaggccgagatcgcccacacccagaaagccaccctcgtgtgcctggctaccggcttctaccccgaccatgtggaactgtcttggtgggtcaacggcaaagaggtgcacagcggcgtgtgtaccgacccccagccactgaaagaacagcccgccctgaacgacagccggtactgcctgagcagcagactgagagtgtccgccaccttctggcagaacccccggaaccacttcagatgccaggtgcagttctacggcctgagcgagaacgacgagtggacccaggacagagccaagcccgtgacccagatcgtgtctgccgaagcctggggcagagccgattgcggcatcaccagcgccagctaccaccagggcgtgctgagcgccaccatcctgtacgagatcctgctgggcaaggccaccctgtacgccgtgctggtgtctgccctggtgctgatggctatggtcaagcggaaggacagccggggaagggccaagcgatctggatctggagcaacaaacttctcactactcaaacaagcaggtgacgtggaggagaatcccgggcctactagcatggccttaccagtgaccgccttgctcctgccgctggccttgctgctccacgccgccaggccgagctacgtgctgacacagcctccatccgtgtctgtggctccaggacagaccgccagaatcacatgcggcggcaacaacatcggcggcaagagcgtgcactggtatcagcagccacctggacaggctccagtggtggtggtgtacgacgacagcgatagacctagcggcatccccgagagattcagcggcagcaattccggcaataccgccacactgaccatcagcagagtggaagctggcgacgaggccgtgtactactgccaagtgtgggacagcagcagcgatcacgtggtgtttggcggcggaacaaagctgacagtgcttggcggaggcggaagtggaggcggaggatctggcggcggaggctctcaactccagctgcaagagtctggccctggcctggtcaagcctagcgaaacactgagcctgacctgtaccgtgtctggcggctctatcagctccagcagctatttctggggctggatcagacaacctcctggcaaaggactggaatggatcggctccatctactacagcggcatcacctactacaaccccagcctgaagtccagagtgaccatctccgtggacaccagcaagaaccagttctccctgaagctgagcagcgtgacagccgccgataccgccgtgtattattgtgccagacatgacggcgctgtggccggcctgtttgattattggggacagggcaccctggtcaccgtgtcatctgctacgcgtatccagaaccctgatcctgccgtgtaccagctgcgggatagcaagagcagcgacaagagcgtgtgtctgttcaccgacttcgacagccagaccaacgtgtcccagagcaaggactccgacgtgtacatcaccgataagtgcgtgctggacatgcggagcatggacttcaagagcaactccgccgtggcctggtccaacaagtccgatttcgcctgcgccaacgccttcaacaacagcattatccccgaggacacattcttcccaagcagcgacgtgccctgcgacgtgaagctggtggaaaagagcttcgagacagacaccaacctgaacttccagaacctgagcgtgatcggcttcagaatcctgctgctgaaagtggccggctttaacctgctgatgaccctgcggctgtggtccagc

SEQ ID NO: 33554 - DNA, 1938 bp, synthetic construct
  source 1..1938: mol_type = other DNA
atggccttaccagtgaccgccttgctcctgccgctggccttgctgctccacgccgccaggccgctcgagggctccggcgatcgccctgatcctgccgtgtaccagctgcgggatagcaagagcagcgacaagagcgtgtgtctgttcaccgacttcgacagccagaccaacgtgtcccagagcaaggactccgacgtgtacatcaccgataagtgcgtgctggacatgcggagcatggacttcaagagcaactccgccgtggcctggtccaacaagtccgatttcgcctgcgccaacgccttcaacaacagcattatccccgaggacacattcttcccaagccccgagagcagctgcgacgtgaagctggtggaaaagagcttcgagacagacaccaacctgaacttccagaacctgagcgtgatcggcttcagaatcctgctgctgaaagtggccggctttaacctgctgatgaccctgcggctgtggtccagctctagtcgcgccaagagaagcggatctggcgtgaagcagaccctgaatttcgacctgctgaagctggctggcgacgtggaatccaacccaggccccactagcatggccttaccagtgaccgccttgctcctgccgctggccttgctgctccacgccgccaggccgagctacgtgctgacacagcctccatccgtgtctgtggctccaggacagaccgccagaatcacatgcggcggcaacaacatcggcggcaagagcgtgcactggtatcagcagccacctggacaggctccagtggtggtggtgtacgacgacagcgatagacctagcggcatccccgagagattcagcggcagcaattccggcaataccgccacactgaccatcagcagagtggaagctggcgacgaggccgtgtactactgccaagtgtgggacagcagcagcgatcacgtggtgtttggcggcggaacaaagctgacagtgcttggcggaggcggaagtggaggcggaggatctggcggcggaggctctcaactccagctgcaagagtctggccctggcctggtcaagcctagcgaaacactgagcctgacctgtaccgtgtctggcggctctatcagctccagcagctatttctggggctggatcagacaacctcctggcaaaggactggaatggatcggctccatctactacagcggcatcacctactacaaccccagcctgaagtccagagtgaccatctccgtggacaccagcaagaaccagttctccctgaagctgagcagcgtgacagccgccgataccgccgtgtattattgtgccagacatgacggcgctgtggccggcctgtttgattattggggacagggcaccctggtcaccgtgtcatctgctacgcgtgaggacctgaagaacgtgttcccacctgaggtggccgtgttcgagcctagcgaggccgagatcagccacacccagaaagccaccctcgtgtgcctggctaccggcttctaccccgaccatgtggaactgtcttggtgggtcaacggcaaagaggtgcacagcggcgtgtgtaccgacccccagccactgaaagaacagcccgccctgaacgacagccggtactgcctgagcagcagactgagagtgtccgccaccttctggcagaacccccggaaccacttcagatgccaggtgcagttctacggcctgagcgagaacgacgagtggacccaggacagagccaagcccgtgacccagatcgtgtctgccgaagcctggggcagagccgattgcggctttaccagcgagagctaccagcagggcgtgctgagcgccaccatcctgtacgagatcctgctgggcaaggccaccctgtacgccgtgctggtgtctgccctggtgctgatggctatggtcaagcggaaggacagccgggga

SEQ ID NO: 33555 - DNA, 1869 bp, synthetic construct
  source 1..1869: mol_type = other DNA
atggccttaccagtgaccgccttgctcctgccgctggccttgctgctccacgccgccaggccgagctacgtgctgacacagcctccatccgtgtctgtggctccaggacagaccgccagaatcacatgcggcggcaacaacatcggcggcaagagcgtgcactggtatcagcagccacctggacaggctccagtggtggtggtgtacgacgacagcgatagacctagcggcatccccgagagattcagcggcagcaattccggcaataccgccacactgaccatcagcagagtggaagctggcgacgaggccgtgtactactgccaagtgtgggacagcagcagcgatcacgtggtgtttggcggcggaacaaagctgacagtgcttctcgaggacctgaagaacgtgttcccacctgaggtggccgtgttcgagcctagcgaggccgagatcagccacacccagaaagccaccctcgtgtgcctggctaccggcttctaccccgaccatgtggaactgtcttggtgggtcaacggcaaagaggtgcacagcggcgtgtctaccgacccccagccactgaaagaacagcccgccctgaacgacagccggtactgcctgagcagcagactgagagtgtccgccaccttctggcagaacccccggaaccacttcagatgccaggtgcagttctacggcctgagcgagaacgacgagtggacccaggacagagccaagcccgtgacccagatcgtgtctgccgaagcctggggcagagccgattgcggctttaccagcgagagctaccagcagggcgtgctgagcgccaccatcctgtacgagatcctgctgggcaaggccaccctgtacgccgtgctggtgtctgccctggtgctgatggctatggtcaagcggaaggacagccggggaagggccaagcgatctggatctggagcaacaaacttctcactactcaaacaagcaggtgacgtggaggagaatcccgggcctactagtatggactggatttggcgcatccttttccttgtcggcgctgctaccggcgcgcattccttcgaacaactccagctgcaagagtctggccctggcctggtcaagcctagcgaaacactgagcctgacctgtaccgtgtctggcggctctatcagctccagcagctatttctggggctggatcagacaacctcctggcaaaggactggaatggatcggctccatctactacagcggcatcacctactacaaccccagcctgaagtccagagtgaccatctccgtggacaccagcaagaaccagttctccctgaagctgagcagcgtgacagccgccgataccgccgtgtattattgtgccagacatgacggcgctgtggccggcctgtttgattattggggacagggcaccctggtcaccgtgtcatctgctacgcgtatccagaaccctgatcctgccgtgtaccagctgcgggatagcaagagcagcgacaagagcgtgtgtctgttcaccgacttcgacagccagaccaacgtgtcccagagcaaggactccgacgtgtacatcaccgataagaccgtgctggacatgcggagcatggacttcaagagcaactccgccgtggcctggtccaacaagtccgatttcgcctgcgccaacgccttcaacaacagcattatccccgaggacacattcttcccaagccccgagagcagctgcgacgtgaagctggtggaaaagagcttcgagacagacaccaacctgaacttccagaacctgagcgtgatcggcttcagaatcctgctgctgaaagtggccggctttaacctgctgatgaccctgcggctgtggtccagc

SEQ ID NO: 33556 - DNA, 1893 bp, synthetic construct
  source 1..1893: mol_type = other DNA
atggccttaccagtgaccgccttgctcctgccgctggccttgctgctccacgccgccaggccgagctacgtgctgacacagcctccatccgtgtctgtggctccaggacagaccgccagaatcacatgcggcggcaacaacatcggcggcaagagcgtgcactggtatcagcagccacctggacaggctccagtggtggtggtgtacgacgacagcgatagacctagcggcatccccgagagattcagcggcagcaattccggcaataccgccacactgaccatcagcagagtggaagctggcgacgaggccgtgtactactgccaagtgtgggacagcagcagcgatcacgtggtgtttggcggcggaacaaagctgacagtgcttctcgaggacaagcagctggacgccgacgtgtcccccaagcctaccatcttcctgccctctatcgccgagacaaagctccagaaggccggcacctacctgtgcctgctggaaaagttcttcccagatgtgattaagatccactggcaggaaaagaagtccaacaccatcctgggcagccaggaaggcaacaccatgaagaccaacgacacctacatgaagttcagctggctgaccgtgcccgagaagtccctggacaaagaacacagatgcatcgtgcggcacgaaaacaacaagaacggcgtggaccaggaaatcatcttcccacccatcaagaccgatgtgattacaatggaccccaaggacaactgctccaaggacgccaacgataccctgctgctccagctgaccaacaccagcgcctactacatgtacttgttgctgctgctgaagtccgtggtgtacttcgccatcatcacatgctgcctgctgcggagaaccgccttctgctgcaacggcgagaagtctagggccaagcgatctggatctggagcaacaaacttctcactactcaaacaagcaggtgacgtggaggagaatcccgggcctactagtatggactggatttggcgcatccttttccttgtcggcgctgctaccggcgcgcattccttcgaacaactccagctgcaagagtctggccctggcctggtcaagcctagcgaaacactgagcctgacctgtaccgtgtctggcggctctatcagctccagcagctatttctggggctggatcagacaacctcctggcaaaggactggaatggatcggctccatctactacagcggcatcacctactacaaccccagcctgaagtccagagtgaccatctccgtggacaccagcaagaaccagttctccctgaagctgagcagcgtgacagccgccgataccgccgtgtattattgtgccagacatgacggcgctgtggccggcctgtttgattattggggacagggcaccctggtcaccgtgtcatctgctacgcgtagccagcctcacaccaagcccagcgtgttcgtgatgaagaacggcaccaacgtggcctgcctcgtgaaagagttctaccccaaggacatcaggatcaacctggtgtccagcaagaagatcaccgagttcgaccccgccatcgtgatctcccccagcggcaagtacaacgccgtgaagctggggaagtacgaggacagcaacagcgtgacctgctccgtgcagcacgacaacaagaccgtgcacagcaccgactttgaagtgaaaaccgactccaccgaccacgtgaagcccaaagagacagagaacaccaagcagcccagcaagagctgccacaagcccaaggccatcgtgcacaccgagaaagtgaacatgatgagcctgaccgtgctgggcctgcggatgctgttcgccaaaaccgtggccgtgaacttcctgctgaccgccaagctgttcttcctc

SEQ ID NO: 33557 - DNA, 1893 bp, synthetic construct
  source 1..1893: mol_type = other DNA
atggccttaccagtgaccgccttgctcctgccgctggccttgctgctccacgccgccaggccgagctacgtgctgacacagcctccatccgtgtctgtggctccaggacagaccgccagaatcacatgcggcggcaacaacatcggcggcaagagcgtgcactggtatcagcagccacctggacaggctccagtggtggtggtgtacgacgacagcgatagacctagcggcatccccgagagattcagcggcagcaattccggcaataccgccacactgaccatcagcagagtggaagctggcgacgaggccgtgtactactgccaagtgtgggacagcagcagcgatcacgtggtgtttggcggcggaacaaagctgacagtgcttctcgagagccagcctcacaccaagcccagcgtgttcgtgatgaagaacggcaccaacgtggcctgcctcgtgaaagagttctaccccaaggacatcaggatcaacctggtgtccagcaagaagatcaccgagttcgaccccgccatcgtgatctcccccagcggcaagtacaacgccgtgaagctggggaagtacgaggacagcaacagcgtgacctgctccgtgcagcacgacaacaagaccgtgcacagcaccgactttgaagtgaaaaccgactccaccgaccacgtgaagcccaaagagacagagaacaccaagcagcccagcaagagctgccacaagcccaaggccatcgtgcacaccgagaaagtgaacatgatgagcctgaccgtgctgggcctgcggatgctgttcgccaaaaccgtggccgtgaacttcctgctgaccgccaagctgttcttcctcagggccaagcgatctggatctggagcaacaaacttctcactactcaaacaagcaggtgacgtggaggagaatcccgggcctactagtatggactggatttggcgcatccttttccttgtcggcgctgctaccggcgcgcattccttcgaacaactccagctgcaagagtctggccctggcctggtcaagcctagcgaaacactgagcctgacctgtaccgtgtctggcggctctatcagctccagcagctatttctggggctggatcagacaacctcctggcaaaggactggaatggatcggctccatctactacagcggcatcacctactacaaccccagcctgaagtccagagtgaccatctccgtggacaccagcaagaaccagttctccctgaagctgagcagcgtgacagccgccgataccgccgtgtattattgtgccagacatgacggcgctgtggccggcctgtttgattattggggacagggcaccctggtcaccgtgtcatctgctacgcgtgacaagcagctggacgccgacgtgtcccccaagcctaccatcttcctgccctctatcgccgagacaaagctccagaaggccggcacctacctgtgcctgctggaaaagttcttcccagatgtgattaagatccactggcaggaaaagaagtccaacaccatcctgggcagccaggaaggcaacaccatgaagaccaacgacacctacatgaagttcagctggctgaccgtgcccgagaagtccctggacaaagaacacagatgcatcgtgcggcacgaaaacaacaagaacggcgtggaccaggaaatcatcttcccacccatcaagaccgatgtgattacaatggaccccaaggacaactgctccaaggacgccaacgataccctgctgctccagctgaccaacaccagcgcctactacatgtacttgttgctgctgctgaagtccgtggtgtacttcgccatcatcacatgctgcctgctgcggagaaccgccttctgctgcaacggcgagaagtct

SEQ ID NO: 33558 - DNA, 1938 bp, synthetic construct
  source 1..1938: mol_type = other DNA
atggccttaccagtgaccgccttgctcctgccgctggccttgctgctccacgccgccaggccgctcgaggacaagcagctggacgccgacgtgtcccccaagcctaccatcttcctgccctctatcgccgagacaaagctccagaaggccggcacctacctgtgcctgctggaaaagttcttcccagatgtgattaagatccactggcaggaaaagaagtccaacaccatcctgggcagccaggaaggcaacaccatgaagaccaacgacacctacatgaagttcagctggctgaccgtgcccgagaagtccctggacaaagaacacagatgcatcgtgcggcacgaaaacaacaagaacggcgtggaccaggaaatcatcttcccacccatcaagaccgatgtgattacaatggaccccaaggacaactgctccaaggacgccaacgataccctgctgctccagctgaccaacaccagcgcctactacatgtacttgttgctgctgctgaagtccgtggtgtacttcgccatcatcacatgctgcctgctgcggagaaccgccttctgctgcaacggcgagaagtctagggccaagcgatctggatctggagcaacaaacttctcactactcaaacaagcaggtgacgtggaggagaatcccgggcctactagcatggccttaccagtgaccgccttgctcctgccgctggccttgctgctccacgccgccaggccgagctacgtgctgacacagcctccatccgtgtctgtggctccaggacagaccgccagaatcacatgcggcggcaacaacatcggcggcaagagcgtgcactggtatcagcagccacctggacaggctccagtggtggtggtgtacgacgacagcgatagacctagcggcatccccgagagattcagcggcagcaattccggcaataccgccacactgaccatcagcagagtggaagctggcgacgaggccgtgtactactgccaagtgtgggacagcagcagcgatcacgtggtgtttggcggcggaacaaagctgacagtgcttggcggaggcggaagtggaggcggaggatctggcggcggaggctctcaactccagctgcaagagtctggccctggcctggtcaagcctagcgaaacactgagcctgacctgtaccgtgtctggcggctctatcagctccagcagctatttctggggctggatcagacaacctcctggcaaaggactggaatggatcggctccatctactacagcggcatcacctactacaaccccagcctgaagtccagagtgaccatctccgtggacaccagcaagaaccagttctccctgaagctgagcagcgtgacagccgccgataccgccgtgtattattgtgccagacatgacggcgctgtggccggcctgtttgattattggggacagggcaccctggtcaccgtgtcatctgctacgcgtagccagcctcacaccaagcccagcgtgttcgtgatgaagaacggcaccaacgtggcctgcctcgtgaaagagttctaccccaaggacatcaggatcaacctggtgtccagcaagaagatcaccgagttcgaccccgccatcgtgatctcccccagcggcaagtacaacgccgtgaagctggggaagtacgaggacagcaacagcgtgacctgctccgtgcagcacgacaacaagaccgtgcacagcaccgactttgaagtgaaaaccgactccaccgaccacgtgaagcccaaagagacagagaacaccaagcagcccagcaagagctgccacaagcccaaggccatcgtgcacaccgagaaagtgaacatgatgagcctgaccgtgctgggcctgcggatgctgttcgccaaaaccgtggccgtgaacttcctgctgaccgccaagctgttcttcctc

SEQ ID NO: 33559 - DNA, 2400 bp, synthetic construct
  source 1..2400: mol_type = other DNA
atggccttaccagtgaccgccttgctcctgccgctggccttgctgctccacgccgccaggccgagctacgtgctgacacagcctccatccgtgtctgtggctccaggacagaccgccagaatcacatgcggcggcaacaacatcggcggcaagagcgtgcactggtatcagcagccacctggacaggctccagtggtggtggtgtacgacgacagcgatagacctagcggcatccccgagagattcagcggcagcaattccggcaataccgccacactgaccatcagcagagtggaagctggcgacgaggccgtgtactactgccaagtgtgggacagcagcagcgatcacgtggtgtttggcggcggaacaaagctgacagtgcttggacagcctaaggccaatcctaccgtgacactgttccctccaagcagcgaagaactccaggccaacaaggccacacttgtgtgcctgatctccgacttctaccctggggctgtgacagtggcttggaaggccgatggatctcctgtgaaagccggcgtggaaaccaccaagccatccaagcagagcaacaacaaatacgccgccagctcctacctgagcctgacacctgagcagtggaagtcccacagatcctacagctgccaagtgacccacgaaggcagcaccgtggaaaagacagtggcccctacagagtgcagcggatcccagagcttcggcctgctggaccccaagctgtgctacctgctggatggcatcctgttcatctacggcgtgatcctgaccgccctgttcctgagagtgaagttcagcagaagcgccgacgcccctgcctaccagcagggacagaaccaactgtacaacgagctgaacctgggcagacgggaagagtacgacgtgctggacaagcggagaggcagggaccctgagatgggcggaaagccccagcggagaaagaacccccaggaaggactgtataacgaactccagaaagacaagatggccgaagcctacagcgagatcggcatgaagggcgagcggagaagaggcaagggccacgatggcctgtaccagggcctgagcaccgccaccaaggacacctatgacgccctgcacatgcaggccctgcctccaagaagggccaagcgatctggatctggagcaacaaacttctcactactcaaacaagcaggtgacgtggaggagaatcccgggcctactagtatggactggatttggcgcatccttttccttgtcggcgctgctaccggcgcgcattccttcgaacaactccagctgcaagagtctggccctggcctggtcaagcctagcgaaacactgagcctgacctgtaccgtgtctggcggctctatcagctccagcagctatttctggggctggatcagacaacctcctggcaaaggactggaatggatcggctccatctactacagcggcatcacctactacaaccccagcctgaagtccagagtgaccatctccgtggacaccagcaagaaccagttctccctgaagctgagcagcgtgacagccgccgataccgccgtgtattattgtgccagacatgacggcgctgtggccggcctgtttgattattggggacagggcaccctggtcaccgtgtcatctgctgcctctacaaagggaccctccgtgtttcctctggctcccagcagcaagtctacaagcggaggaacagccgctctgggctgcctggtcaaggattactttcccgagcctgtgaccgtgtcctggaatagcggagcactgacaagcggcgtgcacacctttccagccgtgctgcaaagcagcggcctgtactctctgagcagcgtggtcacagtgcctagctctagcctgggcacccagacctacatctgcaatgtgaaccacaagcctagcaacaccaaggtggacaagagagtggaacccaagagctgtggtacccagagttttgggttgttggaccctaaattgtgctatctgttggacggaatcctgttcatttacggagtgatcctgaccgcattgttcctgcgggttaagttttccagatccgcagacgcacccgcttaccaacaagggcagaaccaactctacaatgaacttaatttggggcggagggaagagtacgacgttctggacaaaaggaggggacgagatcccgagatgggcggaaagcctcagcgaaggaagaatccgcaagaggggctttataacgaactccagaaagataaaatggcagaagcctatagtgagattgggatgaagggagaaaggaggaggggtaaaggtcacgatgggttgtaccaaggattgagcacagccactaaagatacctatgatgcgctccacatgcaggccctgccgccaaga

SEQ ID NO: 33560 - DNA, 2457 bp, synthetic construct
  source 1..2457: mol_type = other DNA
atggccttaccagtgaccgccttgctcctgccgctggccttgctgctccacgccgccaggccgagctacgtgctgacacagcctccatccgtgtctgtggctccaggacagaccgccagaatcacatgcggcggcaacaacatcggcggcaagagcgtgcactggtatcagcagccacctggacaggctccagtggtggtggtgtacgacgacagcgatagacctagcggcatccccgagagattcagcggcagcaattccggcaataccgccacactgaccatcagcagagtggaagctggcgacgaggccgtgtactactgccaagtgtgggacagcagcagcgatcacgtggtgtttggcggcggaacaaagctgacagtgcttctcgaggacctgaagaacgtgttcccacctgaggtggccgtgttcgagcctagcgaggccgagatcagccacacccagaaagccaccctcgtgtgcctggctaccggcttctaccccgaccatgtggaactgtcttggtgggtcaacggcaaagaggtgcacagcggcgtgtctaccgacccccagccactgaaagaacagcccgccctgaacgacagccggtactgcctgagcagcagactgagagtgtccgccaccttctggcagaacccccggaaccacttcagatgccaggtgcagttctacggcctgagcgagaacgacgagtggacccaggacagagccaagcccgtgacccagatcgtgtctgccgaagcctggggcagagccgattgcggatcccagagcttcggcctgctggaccccaagctgtgctacctgctggatggcatcctgttcatctacggcgtgatcctgaccgccctgttcctgagagtgaagttcagcagaagcgccgacgcccctgcctaccagcagggacagaaccaactgtacaacgagctgaacctgggcagacgggaagagtacgacgtgctggacaagcggagaggcagggaccctgagatgggcggaaagccccagcggagaaagaacccccaggaaggactgtataacgaactccagaaagacaagatggccgaagcctacagcgagatcggcatgaagggcgagcggagaagaggcaagggccacgatggcctgtaccagggcctgagcaccgccaccaaggacacctatgacgccctgcacatgcaggccctgcctccaagaagggccaagcgatctggatctggagcaacaaacttctcactactcaaacaagcaggtgacgtggaggagaatcccgggcctactagtatggactggatttggcgcatccttttccttgtcggcgctgctaccggcgcgcattccttcgaacaactccagctgcaagagtctggccctggcctggtcaagcctagcgaaacactgagcctgacctgtaccgtgtctggcggctctatcagctccagcagctatttctggggctggatcagacaacctcctggcaaaggactggaatggatcggctccatctactacagcggcatcacctactacaaccccagcctgaagtccagagtgaccatctccgtggacaccagcaagaaccagttctccctgaagctgagcagcgtgacagccgccgataccgccgtgtattattgtgccagacatgacggcgctgtggccggcctgtttgattattggggacagggcaccctggtcaccgtgtcatctgctacgcgtatccagaaccctgatcctgccgtgtaccagctgcgggatagcaagagcagcgacaagagcgtgtgtctgttcaccgacttcgacagccagaccaacgtgtcccagagcaaggactccgacgtgtacatcaccgataagaccgtgctggacatgcggagcatggacttcaagagcaactccgccgtggcctggtccaacaagtccgatttcgcctgcgccaacgccttcaacaacagcattatccccgaggacacattcttcccaagccccgagagcagctgcggtacccagagttttgggttgttggaccctaaattgtgctatctgttggacggaatcctgttcatttacggagtgatcctgaccgcattgttcctgcgggttaagttttccagatccgcagacgcacccgcttaccaacaagggcagaaccaactctacaatgaacttaatttggggcggagggaagagtacgacgttctggacaaaaggaggggacgagatcccgagatgggcggaaagcctcagcgaaggaagaatccgcaagaggggctttataacgaactccagaaagataaaatggcagaagcctatagtgagattgggatgaagggagaaaggaggaggggtaaaggtcacgatgggttgtaccaaggattgagcacagccactaaagatacctatgatgcgctccacatgcaggccctgccgccaaga

SEQ ID NO: 33561 - DNA, 2583 bp, synthetic construct
  source 1..2583: mol_type = other DNA
atggccttaccagtgaccgccttgctcctgccgctggccttgctgctccacgccgccaggccgagctacgtgctgacacagcctccatccgtgtctgtggctccaggacagaccgccagaatcacatgcggcggcaacaacatcggcggcaagagcgtgcactggtatcagcagccacctggacaggctccagtggtggtggtgtacgacgacagcgatagacctagcggcatccccgagagattcagcggcagcaattccggcaataccgccacactgaccatcagcagagtggaagctggcgacgaggccgtgtactactgccaagtgtgggacagcagcagcgatcacgtggtgtttggcggcggaacaaagctgacagtgcttctcgaggaggacctgaagaacgtgttcccacctgaggtggccgtgttcgagcctagcgaggccgagatcagccacacccagaaagccaccctcgtgtgcctggctaccggcttctaccccgaccatgtggaactgtcttggtgggtcaacggcaaagaggtgcacagcggcgtgtctaccgacccccagccactgaaagaacagcccgccctgaacgacagccggtactgcctgagcagcagactgagagtgtccgccaccttctggcagaacccccggaaccacttcagatgccaggtgcagttctacggcctgagcgagaacgacgagtggacccaggacagagccaagcccgtgacccagatcgtgtctgccgaagcctggggcagagccgattgcggatcccagagcttcggcctgctggaccccaagctgtgctacctgctggatggcatcctgttcatctacggcgtgatcctgaccgccctgttcctgagagtgaagttcagcagaagcgccgacgcccctgcctaccagcagggacagaaccaactgtacaacgagctgaacctgggcagacgggaagagtacgacgtgctggacaagcggagaggcagggaccctgagatgggcggaaagccccagcggagaaagaacccccaggaaggactgtataacgaactccagaaagacaagatggccgaagcctacagcgagatcggcatgaagggcgagcggagaagaggcaagggccacgatggcctgtaccagggcctgagcaccgccaccaaggacacctatgacgccctgcacatgcaggccctgcctccaagaagggccaagcgatctggatctggagcaacaaacttctcactactcaaacaagcaggtgacgtggaggagaatcccgggcctactagtatggactggatttggcgcatccttttccttgtcggcgctgctaccggcgcgcattccttcgaacaactccagctgcaagagtctggccctggcctggtcaagcctagcgaaacactgagcctgacctgtaccgtgtctggcggctctatcagctccagcagctatttctggggctggatcagacaacctcctggcaaaggactggaatggatcggctccatctactacagcggcatcacctactacaaccccagcctgaagtccagagtgaccatctccgtggacaccagcaagaaccagttctccctgaagctgagcagcgtgacagccgccgataccgccgtgtattattgtgccagacatgacggcgctgtggccggcctgtttgattattggggacagggcaccctggtcaccgtgtcatctgctacgcgtatccagaaccctgatcctgccgtgtaccagctgcgggatagcaagagcagcgacaagagcgtgtgtctgttcaccgacttcgacagccagaccaacgtgtcccagagcaaggactccgacgtgtacatcaccgataagaccgtgctggacatgcggagcatggacttcaagagcaactccgccgtggcctggtccaacaagtccgatttcgcctgcgccaacgccttcaacaacagcattatccccgaggacacattcttcccaagccccgagagcagctgcggtacccagagttttgggttgttggaccctaaattgtgctatctgttggacggaatcctgttcatttacggagtgatcctgaccgcattgttcctgaggagcaagcggtcacggctgctccacagcgattacatgaatatgacaccacgaagaccgggtcctactcgcaaacactaccaaccctacgcacctccccgcgactttgcagcgtaccgatctcgggttaagttttccagatccgcagacgcacccgcttaccaacaagggcagaaccaactctacaatgaacttaatttggggcggagggaagagtacgacgttctggacaaaaggaggggacgagatcccgagatgggcggaaagcctcagcgaaggaagaatccgcaagaggggctttataacgaactccagaaagataaaatggcagaagcctatagtgagattgggatgaagggagaaaggaggaggggtaaaggtcacgatgggttgtaccaaggattgagcacagccactaaagatacctatgatgcgctccacatgcaggccctgccgccaaga

SEQ ID NO: 33562 - DNA, 2712 bp, synthetic construct
  source 1..2712: mol_type = other DNA
atggccttaccagtgaccgccttgctcctgccgctggccttgctgctccacgccgccaggccgagctacgtgctgacacagcctccatccgtgtctgtggctccaggacagaccgccagaatcacatgcggcggcaacaacatcggcggcaagagcgtgcactggtatcagcagccacctggacaggctccagtggtggtggtgtacgacgacagcgatagacctagcggcatccccgagagattcagcggcagcaattccggcaataccgccacactgaccatcagcagagtggaagctggcgacgaggccgtgtactactgccaagtgtgggacagcagcagcgatcacgtggtgtttggcggcggaacaaagctgacagtgcttctcgaggaggacctgaagaacgtgttcccacctgaggtggccgtgttcgagcctagcgaggccgagatcagccacacccagaaagccaccctcgtgtgcctggctaccggcttctaccccgaccatgtggaactgtcttggtgggtcaacggcaaagaggtgcacagcggcgtgtctaccgacccccagccactgaaagaacagcccgccctgaacgacagccggtactgcctgagcagcagactgagagtgtccgccaccttctggcagaacccccggaaccacttcagatgccaggtgcagttctacggcctgagcgagaacgacgagtggacccaggacagagccaagcccgtgacccagatcgtgtctgccgaagcctggggcagagccgattgcggatcccagagcttcggcctgctggaccccaagctgtgctacctgctggatggcatcctgttcatctacggcgtgatcctgaccgccctgttcctgaaacggggcagaaagaaactcctgtatatattcaaacaaccatttatgagaccagtacaaactactcaagaggaagatggctgtagctgccgatttccagaagaagaagaaggaggatgtgaactgagagtgaagttcagcagaagcgccgacgcccctgcctaccagcagggacagaaccaactgtacaacgagctgaacctgggcagacgggaagagtacgacgtgctggacaagcggagaggcagggaccctgagatgggcggaaagccccagcggagaaagaacccccaggaaggactgtataacgaactccagaaagacaagatggccgaagcctacagcgagatcggcatgaagggcgagcggagaagaggcaagggccacgatggcctgtaccagggcctgagcaccgccaccaaggacacctatgacgccctgcacatgcaggccctgcctccaagaagggccaagcgatctggatctggagcaacaaacttctcactactcaaacaagcaggtgacgtggaggagaatcccgggcctactagtatggactggatttggcgcatccttttccttgtcggcgctgctaccggcgcgcattccttcgaacaactccagctgcaagagtctggccctggcctggtcaagcctagcgaaacactgagcctgacctgtaccgtgtctggcggctctatcagctccagcagctatttctggggctggatcagacaacctcctggcaaaggactggaatggatcggctccatctactacagcggcatcacctactacaaccccagcctgaagtccagagtgaccatctccgtggacaccagcaagaaccagttctccctgaagctgagcagcgtgacagccgccgataccgccgtgtattattgtgccagacatgacggcgctgtggccggcctgtttgattattggggacagggcaccctggtcaccgtgtcatctgctacgcgtatccagaaccctgatcctgccgtgtaccagctgcgggatagcaagagcagcgacaagagcgtgtgtctgttcaccgacttcgacagccagaccaacgtgtcccagagcaaggactccgacgtgtacatcaccgataagaccgtgctggacatgcggagcatggacttcaagagcaactccgccgtggcctggtccaacaagtccgatttcgcctgcgccaacgccttcaacaacagcattatccccgaggacacattcttcccaagccccgagagcagctgcggtacccagagttttgggttgttggaccctaaattgtgctatctgttggacggaatcctgttcatttacggagtgatcctgaccgcattgttcctgaagagaggccggaagaagctgctgtacatcttcaagcagcctttcatgcggcccgtgcagaccacccaggaagaggacggctgctcctgccggttccccgaggaagaagaaggcggctgcgagctgcgggttaagttttccagatccgcagacgcacccgcttaccaacaagggcagaaccaactctacaatgaacttaatttggggcggagggaagagtacgacgttctggacaaaaggaggggacgagatcccgagatgggcggaaagcctcagcgaaggaagaatccgcaagaggggctttataacgaactccagaaagataaaatggcagaagcctatagtgagattgggatgaagggagaaaggaggaggggtaaaggtcacgatgggttgtaccaaggattgagcacagccactaaagatacctatgatgcgctccacatgcaggccctgccgccaaga

SEQ ID NO: 33563 - DNA, 1773 bp, synthetic construct
  source 1..1773: mol_type = other DNA
atggccttaccagtgaccgccttgctcctgccgctggccttgctgctccacgccgccaggccgagctacgtgctgacacagcctccatccgtgtctgtggctccaggacagaccgccagaatcacatgcggcggcaacaacatcggcggcaagagcgtgcactggtatcagcagccacctggacaggctccagtggtggtggtgtacgacgacagcgatagacctagcggcatccccgagagattcagcggcagcaattccggcaataccgccacactgaccatcagcagagtggaagctggcgacgaggccgtgtactactgccaagtgtgggacagcagcagcgatcacgtggtgtttggcggcggaacaaagctgacagtgcttctcgagcagagcttcggcctgctggaccccaagctgtgctacctgctggatggcatcctgttcatctacggcgtgatcctgaccgccctgttcctgagagtgaagttcagcagaagcgccgacgcccctgcctaccagcagggacagaaccaactgtacaacgagctgaacctgggcagacgggaagagtacgacgtgctggacaagcggagaggcagggaccctgagatgggcggaaagccccagcggagaaagaacccccaggaaggactgtataacgaactccagaaagacaagatggccgaagcctacagcgagatcggcatgaagggcgagcggagaagaggcaagggccacgatggcctgtaccagggcctgagcaccgccaccaaggacacctatgacgccctgcacatgcaggccctgcctccaagaagggccaagcgatctggatctggagcaacaaacttctcactactcaaacaagcaggtgacgtggaggagaatcccgggcctactagtatggactggatttggcgcatccttttccttgtcggcgctgctaccggcgcgcattccttcgaacaactccagctgcaagagtctggccctggcctggtcaagcctagcgaaacactgagcctgacctgtaccgtgtctggcggctctatcagctccagcagctatttctggggctggatcagacaacctcctggcaaaggactggaatggatcggctccatctactacagcggcatcacctactacaaccccagcctgaagtccagagtgaccatctccgtggacaccagcaagaaccagttctccctgaagctgagcagcgtgacagccgccgataccgccgtgtattattgtgccagacatgacggcgctgtggccggcctgtttgattattggggacagggcaccctggtcaccgtgtcatctgctacgcgtcagagttttgggttgttggaccctaaattgtgctatctgttggacggaatcctgttcatttacggagtgatcctgaccgcattgttcctgcgggttaagttttccagatccgcagacgcacccgcttaccaacaagggcagaaccaactctacaatgaacttaatttggggcggagggaagagtacgacgttctggacaaaaggaggggacgagatcccgagatgggcggaaagcctcagcgaaggaagaatccgcaagaggggctttataacgaactccagaaagataaaatggcagaagcctatagtgagattgggatgaagggagaaaggaggaggggtaaaggtcacgatgggttgtaccaaggattgagcacagccactaaagatacctatgatgcgctccacatgcaggccctgccgccaaga

SEQ ID NO: 33564 - DNA, 1947 bp, synthetic construct
  source 1..1947: mol_type = other DNA
atggccttaccagtgaccgccttgctcctgccgctggccttgctgctccacgccgccaggccgagctacgtgctgacacagcctccatccgtgtctgtggctccaggacagaccgccagaatcacatgcggcggcaacaacatcggcggcaagagcgtgcactggtatcagcagccacctggacaggctccagtggtggtggtgtacgacgacagcgatagacctagcggcatccccgagagattcagcggcagcaattccggcaataccgccacactgaccatcagcagagtggaagctggcgacgaggccgtgtactactgccaagtgtgggacagcagcagcgatcacgtggtgtttggcggcggaacaaagctgacagtgcttctcgagggacagcctaaggccaatcctaccgtgacactgttccctccaagcagcgaagaactccaggccaacaaggccacacttgtgtgcctgatctccgacttctaccctggggctgtgacagtggcttggaaggccgatggatctcctgtgaaagccggcgtggaaaccaccaagccatccaagcagagcaacaacaaatacgccgccagctcctacctgagcctgacacctgagcagtggaagtcccacagatcctacagctgccaagtgacccacgaaggcagcaccgtggaaaagacagtggcccctacagagtgcagccccatcaagaccgatgtgattacaatggaccccaaggacaactgctccaaggacgccaacgataccctgctgctccagctgaccaacaccagcgcctactacatgtacttgttgctgctgctgaagtccgtggtgtacttcgccatcatcacatgctgcctgctgcggagaaccgccttctgctgcaacggcgagaagtctagggccaagcgatctggatctggagcaacaaacttctcactactcaaacaagcaggtgacgtggaggagaatcccgggcctactagtatggactggatttggcgcatccttttccttgtcggcgctgctaccggcgcgcattccttcgaacaactccagctgcaagagtctggccctggcctggtcaagcctagcgaaacactgagcctgacctgtaccgtgtctggcggctctatcagctccagcagctatttctggggctggatcagacaacctcctggcaaaggactggaatggatcggctccatctactacagcggcatcacctactacaaccccagcctgaagtccagagtgaccatctccgtggacaccagcaagaaccagttctccctgaagctgagcagcgtgacagccgccgataccgccgtgtattattgtgccagacatgacggcgctgtggccggcctgtttgattattggggacagggcaccctggtcaccgtgtcatctgctacgcgtgcctctacaaagggaccctccgtgtttcctctggctcccagcagcaagtctacaagcggaggaacagccgctctgggctgcctggtcaaggattactttcccgagcctgtgaccgtgtcctggaatagcggagcactgacaagcggcgtgcacacctttccagccgtgctgcaaagcagcggcctgtactctctgagcagcgtggtcacagtgcctagctctagcctgggcacccagacctacatctgcaatgtgaaccacaagcctagcaacaccaaggtggacaagagagtggaacccaagagctgtgaagtgaaaaccgactccaccgaccacgtgaagcccaaagagacagagaacaccaagcagcccagcaagagctgccacaagcccaaggccatcgtgcacaccgagaaagtgaacatgatgagcctgaccgtgctgggcctgcggatgctgttcgccaaaaccgtggccgtgaacttcctgctgaccgccaagctgttcttcctc

SEQ ID NO: 33565 - DNA, 1881 bp, synthetic construct
  source 1..1881: mol_type = other DNA
atggccttaccagtgaccgccttgctcctgccgctggccttgctgctccacgccgccaggccgagctacgtgctgacacagcctccatccgtgtctgtggctccaggacagaccgccagaatcacatgcggcggcaacaacatcggcggcaagagcgtgcactggtatcagcagccacctggacaggctccagtggtggtggtgtacgacgacagcgatagacctagcggcatccccgagagattcagcggcagcaattccggcaataccgccacactgaccatcagcagagtggaagctggcgacgaggccgtgtactactgccaagtgtgggacagcagcagcgatcacgtggtgtttggcggcggaacaaagctgacagtgcttctcgagggacagcctaaggccaatcctaccgtgacactgttccctccaagcagcgaagaactccaggccaacaaggccacacttgtgtgcctgatctccgacttctaccctggggctgtgacagtggcttggaaggccgatggatctcctgtgaaagccggcgtggaaaccaccaagccatccaagcagagcaacaacaaatacgccgccagctcctacctgagcctgacacctgagcagtggaagtcccacagatcctacagctgccaagtgacccacgaaggcagcaccgtggaaaagacagtggcccctacagagtgcagcggcagagccgattgcggcatcaccagcgccagctaccaccagggcgtgctgagcgccaccatcctgtacgagatcctgctgggcaaggccaccctgtacgccgtgctggtgtctgccctggtgctgatggctatggtcaagcggaaggacagccggggaagggccaagcgatctggatctggagcaacaaacttctcactactcaaacaagcaggtgacgtggaggagaatcccgggcctactagtatggactggatttggcgcatccttttccttgtcggcgctgctaccggcgcgcattccttcgaacaactccagctgcaagagtctggccctggcctggtcaagcctagcgaaacactgagcctgacctgtaccgtgtctggcggctctatcagctccagcagctatttctggggctggatcagacaacctcctggcaaaggactggaatggatcggctccatctactacagcggcatcacctactacaaccccagcctgaagtccagagtgaccatctccgtggacaccagcaagaaccagttctccctgaagctgagcagcgtgacagccgccgataccgccgtgtattattgtgccagacatgacggcgctgtggccggcctgtttgattattggggacagggcaccctggtcaccgtgtcatctgctacgcgtgcctctacaaagggaccctccgtgtttcctctggctcccagcagcaagtctacaagcggaggaacagccgctctgggctgcctggtcaaggattactttcccgagcctgtgaccgtgtcctggaatagcggagcactgacaagcggcgtgcacacctttccagccgtgctgcaaagcagcggcctgtactctctgagcagcgtggtcacagtgcctagctctagcctgggcacccagacctacatctgcaatgtgaaccacaagcctagcaacaccaaggtggacaagagagtggaacccaagagctgtatccccgaggacacattcttcccaagcagcgacgtgccctgcgacgtgaagctggtggaaaagagcttcgagacagacaccaacctgaacttccagaacctgagcgtgatcggcttcagaatcctgctgctgaaagtggccggctttaacctgctgatgaccctgcggctgtggtccagc

SEQ ID NO: 33566 - DNA, 1881 bp, synthetic construct
  source 1..1881: mol_type = other DNA
atggccttaccagtgaccgccttgctcctgccgctggccttgctgctccacgccgccaggccgagctacgtgctgacacagcctccatccgtgtctgtggctccaggacagaccgccagaatcacatgcggcggcaacaacatcggcggcaagagcgtgcactggtatcagcagccacctggacaggctccagtggtggtggtgtacgacgacagcgatagacctagcggcatccccgagagattcagcggcagcaattccggcaataccgccacactgaccatcagcagagtggaagctggcgacgaggccgtgtactactgccaagtgtgggacagcagcagcgatcacgtggtgtttggcggcggaacaaagctgacagtgcttctcgagggacagcctaaggccaatcctaccgtgacactgttccctccaagcagcgaagaactccaggccaacaaggccacacttgtgtgcctgatctccgacttctaccctggggctgtgacagtggcttggaaggccgatggatctcctgtgaaagccggcgtggaaaccaccaagccatccaagcagagcaacaacaaatacgccgccagctcctacctgagcctgacacctgagcagtggaagtcccacagatcctacagctgccaagtgacccacgaaggcagcaccgtggaaaagacagtggcccctacagagtgcagcggcagagccgattgcggctttaccagcgagagctaccagcagggcgtgctgagcgccaccatcctgtacgagatcctgctgggcaaggccaccctgtacgccgtgctggtgtctgccctggtgctgatggctatggtcaagcggaaggacagccggggaagggccaagcgatctggatctggagcaacaaacttctcactactcaaacaagcaggtgacgtggaggagaatcccgggcctactagtatggactggatttggcgcatccttttccttgtcggcgctgctaccggcgcgcattccttcgaacaactccagctgcaagagtctggccctggcctggtcaagcctagcgaaacactgagcctgacctgtaccgtgtctggcggctctatcagctccagcagctatttctggggctggatcagacaacctcctggcaaaggactggaatggatcggctccatctactacagcggcatcacctactacaaccccagcctgaagtccagagtgaccatctccgtggacaccagcaagaaccagttctccctgaagctgagcagcgtgacagccgccgataccgccgtgtattattgtgccagacatgacggcgctgtggccggcctgtttgattattggggacagggcaccctggtcaccgtgtcatctgctacgcgtgcctctacaaagggaccctccgtgtttcctctggctcccagcagcaagtctacaagcggaggaacagccgctctgggctgcctggtcaaggattactttcccgagcctgtgaccgtgtcctggaatagcggagcactgacaagcggcgtgcacacctttccagccgtgctgcaaagcagcggcctgtactctctgagcagcgtggtcacagtgcctagctctagcctgggcacccagacctacatctgcaatgtgaaccacaagcctagcaacaccaaggtggacaagagagtggaacccaagagctgtatccccgaggacacattcttcccaagccccgagagcagctgcgacgtgaagctggtggaaaagagcttcgagacagacaccaacctgaacttccagaacctgagcgtgatcggcttcagaatcctgctgctgaaagtggccggctttaacctgctgatgaccctgcggctgtggtccagc

SEQ ID NO: 33567 - DNA, 1359 bp, synthetic construct
  source 1..1359: mol_type = other DNA
atggccttaccagtgaccgccttgctcctgccgctggccttgctgctccacgccgccaggccgagctacgtgctgacacagcctccatccgtgtctgtggctccaggacagaccgccagaatcacatgcggcggcaacaacatcggcggcaagagcgtgcactggtatcagcagccacctggacaggctccagtggtggtggtgtacgacgacagcgatagacctagcggcatccccgagagattcagcggcagcaattccggcaataccgccacactgaccatcagcagagtggaagctggcgacgaggccgtgtactactgccaagtgtgggacagcagcagcgatcacgtggtgtttggcggcggaacaaagctgacagtgcttggcggaggcggaagtggaggcggaggatctggcggcggaggctctcaactccagctgcaagagtctggccctggcctggtcaagcctagcgaaacactgagcctgacctgtaccgtgtctggcggctctatcagctccagcagctatttctggggctggatcagacaacctcctggcaaaggactggaatggatcggctccatctactacagcggcatcacctactacaaccccagcctgaagtccagagtgaccatctccgtggacaccagcaagaaccagttctccctgaagctgagcagcgtgacagccgccgataccgccgtgtattattgtgccagacatgacggcgctgtggccggcctgtttgattattggggacagggcaccctggtcaccgtgtcatctgctacgcgtgacggtaacgaggagatgggaggaatcactcaaaccccttacaaagtctcaatttcaggaacaactgttatccttacatgtccccagtatcctggcagcgagatcctttggcagcataacgacaagaatatagggggagatgaagacgataagaatatcggatctgacgaggatcacttgagcctgaaagagttctccgagcttgaacaaagcggatattatgtgtgctatccgcgcgggtcaaagccggaagacgctaacttttacctttatctccgagccagagtgtgcgaaaattgcatggaaatggacgttatgtccgttgctacaatagttatcgtagatatatgcatcacgggtggactgcttctgctggtttattattggtccaagaatagaaaggccaaagctaaacccgtgaccagaggcgctggcgcaggcggaaggcaaaggggacaaaacaaagaacggccaccaccagtgccaaatccagattatgagcctattcggaaaggacagagggacctgtactctggcctgaatcagagaagaatc

SEQ ID NO: 33568 - DNA, 1254 bp, synthetic construct
  source 1..1254: mol_type = other DNA
atggccttaccagtgaccgccttgctcctgccgctggccttgctgctccacgccgccaggccgagctacgtgctgacacagcctccatccgtgtctgtggctccaggacagaccgccagaatcacatgcggcggcaacaacatcggcggcaagagcgtgcactggtatcagcagccacctggacaggctccagtggtggtggtgtacgacgacagcgatagacctagcggcatccccgagagattcagcggcagcaattccggcaataccgccacactgaccatcagcagagtggaagctggcgacgaggccgtgtactactgccaagtgtgggacagcagcagcgatcacgtggtgtttggcggcggaacaaagctgacagtgcttggcggaggcggaagtggaggcggaggatctggcggcggaggctctcaactccagctgcaagagtctggccctggcctggtcaagcctagcgaaacactgagcctgacctgtaccgtgtctggcggctctatcagctccagcagctatttctggggctggatcagacaacctcctggcaaaggactggaatggatcggctccatctactacagcggcatcacctactacaaccccagcctgaagtccagagtgaccatctccgtggacaccagcaagaaccagttctccctgaagctgagcagcgtgacagccgccgataccgccgtgtattattgtgccagacatgacggcgctgtggccggcctgtttgattattggggacagggcaccctggtcaccgtgtcatctgctacgcgtttcaagatccccatcgaggaactggaagatcgggtgttcgtgaactgcaacacctctatcacctgggtggaaggcaccgtgggaacactgctgagcgacatcaccagactggacctcggcaagcggattctggaccctcggggcatctacagatgcaacggcaccgacatctacaaggacaaagaaagcaccgtgcaggtccactacagaatgtgccagtcctgcgtggaactggaccctgctacagtggccggcatcatcgtgaccgatgtgatcgctactctgctgctggctctgggagtgttctgcttcgccggacacgaaacaggcagactgtctggcgctgccgatacacaggccctgctgagaaacgaccaagtgtatcagcccctgcgcgacagagatgatgcccagtattctcacctcggcggcaactgggctagaaacaag

SEQ ID NO: 33569 - DNA, 1284 bp, synthetic construct
  source 1..1284: mol_type = other DNA
atggccttaccagtgaccgccttgctcctgccgctggccttgctgctccacgccgccaggccgagctacgtgctgacacagcctccatccgtgtctgtggctccaggacagaccgccagaatcacatgcggcggcaacaacatcggcggcaagagcgtgcactggtatcagcagccacctggacaggctccagtggtggtggtgtacgacgacagcgatagacctagcggcatccccgagagattcagcggcagcaattccggcaataccgccacactgaccatcagcagagtggaagctggcgacgaggccgtgtactactgccaagtgtgggacagcagcagcgatcacgtggtgtttggcggcggaacaaagctgacagtgcttggcggaggcggaagtggaggcggaggatctggcggcggaggctctcaactccagctgcaagagtctggccctggcctggtcaagcctagcgaaacactgagcctgacctgtaccgtgtctggcggctctatcagctccagcagctatttctggggctggatcagacaacctcctggcaaaggactggaatggatcggctccatctactacagcggcatcacctactacaaccccagcctgaagtccagagtgaccatctccgtggacaccagcaagaaccagttctccctgaagctgagcagcgtgacagccgccgataccgccgtgtattattgtgccagacatgacggcgctgtggccggcctgtttgattattggggacagggcaccctggtcaccgtgtcatctgctacgcgtcagagcatcaagggcaaccacctggtcaaggtgtacgactaccaagaggacggcagcgtgctgctgacatgtgatgccgaggccaagaacatcacctggtttaaggacggcaagatgatcggcttcctgaccgaggacaagaagaagtggaacctgggcagcaacgctaaggaccccagaggcatgtatcagtgcaagggcagccagaacaagagcaagcccctccaggtgtactaccggatgtgccagaactgcatcgagctgaacgccgctaccatcagcggctttctgttcgccgagatcgtgtccatcttcgtgctggccgtgggcgtgtactttatcgctggacaggatggcgtgcggcagagcagagcttccgataagcaaaccctgctgcctaacgaccagctgtaccagcctctgaaggacagagaggacgaccagtacagccacctccagggcaatcagctgagaagaaac

SEQ ID NO: 33570 - DNA, 1233 bp, synthetic construct
  source 1..1233: mol_type = other DNA
atggccttaccagtgaccgccttgctcctgccgctggccttgctgctccacgccgccaggccgagctacgtgctgacacagcctccatccgtgtctgtggctccaggacagaccgccagaatcacatgcggcggcaacaacatcggcggcaagagcgtgcactggtatcagcagccacctggacaggctccagtggtggtggtgtacgacgacagcgatagacctagcggcatccccgagagattcagcggcagcaattccggcaataccgccacactgaccatcagcagagtggaagctggcgacgaggccgtgtactactgccaagtgtgggacagcagcagcgatcacgtggtgtttggcggcggaacaaagctgacagtgcttggcggaggcggaagtggaggcggaggatctggcggcggaggctctcaactccagctgcaagagtctggccctggcctggtcaagcctagcgaaacactgagcctgacctgtaccgtgtctggcggctctatcagctccagcagctatttctggggctggatcagacaacctcctggcaaaggactggaatggatcggctccatctactacagcggcatcacctactacaaccccagcctgaagtccagagtgaccatctccgtggacaccagcaagaaccagttctccctgaagctgagcagcgtgacagccgccgataccgccgtgtattattgtgccagacatgacggcgctgtggccggcctgtttgattattggggacagggcaccctggtcaccgtgtcatctgctacgcgtcagagttttgggttgttggaccctaaattgtgctatctgttggacggaatcctgttcatttacggagtgatcctgaccgcattgttcctgcgggttaagttttccagatccgcagacgcacccgcttaccaacaagggcagaaccaactctacaatgaacttaatttggggcggagggaagagtacgacgttctggacaaaaggaggggacgagatcccgagatgggcggaaagcctcagcgaaggaagaatccgcaagaggggctttataacgaactccagaaagataaaatggcagaagcctatagtgagattgggatgaagggagaaaggaggaggggtaaaggtcacgatgggttgtaccaaggattgagcacagccactaaagatacctatgatgcgctccacatgcaggccctgccgccaaga

SEQ ID NO: 33571 - DNA, 1518 bp, synthetic construct
  source 1..1518: mol_type = other DNA
atggccttaccagtgaccgccttgctcctgccgctggccttgctgctccacgccgccaggccgagctacgtgctgacacagcctccatccgtgtctgtggctccaggacagaccgccagaatcacatgcggcggcaacaacatcggcggcaagagcgtgcactggtatcagcagccacctggacaggctccagtggtggtggtgtacgacgacagcgatagacctagcggcatccccgagagattcagcggcagcaattccggcaataccgccacactgaccatcagcagagtggaagctggcgacgaggccgtgtactactgccaagtgtgggacagcagcagcgatcacgtggtgtttggcggcggaacaaagctgacagtgcttggcggaggcggaagtggaggcggaggatctggcggcggaggctctcaactccagctgcaagagtctggccctggcctggtcaagcctagcgaaacactgagcctgacctgtaccgtgtctggcggctctatcagctccagcagctatttctggggctggatcagacaacctcctggcaaaggactggaatggatcggctccatctactacagcggcatcacctactacaaccccagcctgaagtccagagtgaccatctccgtggacaccagcaagaaccagttctccctgaagctgagcagcgtgacagccgccgataccgccgtgtattattgtgccagacatgacggcgctgtggccggcctgtttgattattggggacagggcaccctggtcaccgtgtcatctgctacgcgtggaatgaggactgaggatcttcccaaagctgtcgtctttctcgaaccccaatggtatcgggtgctcgaaaaagactctgtgacactgaaatgccaaggggcctactctcccgaggacaactccacacagtggtttcataatgagtccctcatcagctctcaggccagctcttatttcattgatgccgctacagtggacgactccggcgagtatcggtgtcagaccaatctgtctacactgtctgaccccgtgcagcttgaggtccacattggatggttgctcttgcaagccccacgctgggttttcaaagaggaagatccaatccatctgcggtgccacagctggaaaaacaccgctctccacaaagtcacatacctgcaaaatggcaaaggacgcaaatacttccatcacaattccgatttttacattccgaaggctaccctgaaagacagcggcagctatttctgccggggactcgtcggctccaagaatgtgtcctccgaaaccgtgaatatcacgattacccaaggactggctgtgcctacaatctctagcttctttccgcctggataccaagtctccttctgtcttgtgatggtcctcctgtttgctgtggacacaggactgtacttttccgtgaaaacgaacatccgcagctccacacgcgattggaaagatcacaagtttaaatggcgcaaagatccccaggacaag

SEQ ID NO: 33572 - DNA, 1443 bp, synthetic construct
  source 1..1443: mol_type = other DNA
atggccttaccagtgaccgccttgctcctgccgctggccttgctgctccacgccgccaggccgagctacgtgctgacacagcctccatccgtgtctgtggctccaggacagaccgccagaatcacatgcggcggcaacaacatcggcggcaagagcgtgcactggtatcagcagccacctggacaggctccagtggtggtggtgtacgacgacagcgatagacctagcggcatccccgagagattcagcggcagcaattccggcaataccgccacactgaccatcagcagagtggaagctggcgacgaggccgtgtactactgccaagtgtgggacagcagcagcgatcacgtggtgtttggcggcggaacaaagctgacagtgcttggcggaggcggaagtggaggcggaggatctggcggcggaggctctcaactccagctgcaagagtctggccctggcctggtcaagcctagcgaaacactgagcctgacctgtaccgtgtctggcggctctatcagctccagcagctatttctggggctggatcagacaacctcctggcaaaggactggaatggatcggctccatctactacagcggcatcacctactacaaccccagcctgaagtccagagtgaccatctccgtggacaccagcaagaaccagttctccctgaagctgagcagcgtgacagccgccgataccgccgtgtattattgtgccagacatgacggcgctgtggccggcctgtttgattattggggacagggcaccctggtcaccgtgtcatctgctacgcgtggaatgaggactgaggatcttcccaaagctgtcgtctttctcgaaccccaatggtatcgggtgctcgaaaaagactctgtgacactgaaatgccaaggggcctactctcccgaggacaactccacacagtggtttcataatgagtccctcatcagctctcaggccagctcttatttcattgatgccgctacagtggacgactccggcgagtatcggtgtcagaccaatctgtctacactgtctgaccccgtgcagcttgaggtccacattggatggttgctcttgcaagccccacgctgggttttcaaagaggaagatccaatccatctgcggtgccacagctggaaaaacaccgctctccacaaagtcacatacctgcaaaatggcaaaggacgcaaatacttccatcacaattccgatttttacattccgaaggctaccctgaaagacagcggcagctatttctgccggggactcgtcggctccaagaatgtgtcctccgaaaccgtgaatatcacgattacccaaggactggctgtgcctacaatctctagcttctttccgcctggataccaagtctccttctgtcttgtgatggtcctcctgtttgctgtggacacaggactgtacttttccgtg

SEQ ID NO: 33573 - DNA, 1446 bp, synthetic construct
  source 1..1446: mol_type = other DNA
atggccttaccagtgaccgccttgctcctgccgctggccttgctgctccacgccgccaggccgagctacgtgctgacacagcctccatccgtgtctgtggctccaggacagaccgccagaatcacatgcggcggcaacaacatcggcggcaagagcgtgcactggtatcagcagccacctggacaggctccagtggtggtggtgtacgacgacagcgatagacctagcggcatccccgagagattcagcggcagcaattccggcaataccgccacactgaccatcagcagagtggaagctggcgacgaggccgtgtactactgccaagtgtgggacagcagcagcgatcacgtggtgtttggcggcggaacaaagctgacagtgcttggcggaggcggaagtggaggcggaggatctggcggcggaggctctcaactccagctgcaagagtctggccctggcctggtcaagcctagcgaaacactgagcctgacctgtaccgtgtctggcggctctatcagctccagcagctatttctggggctggatcagacaacctcctggcaaaggactggaatggatcggctccatctactacagcggcatcacctactacaaccccagcctgaagtccagagtgaccatctccgtggacaccagcaagaaccagttctccctgaagctgagcagcgtgacagccgccgataccgccgtgtattattgtgccagacatgacggcgctgtggccggcctgtttgattattggggacagggcaccctggtcaccgtgtcatctgctacgcgtggaatgaggactgaggatcttcccaaagctgtcgtctttctcgaaccccaatggtatcgggtgctcgaaaaagactctgtgacactgaaatgccaaggggcctactctcccgaggacaactccacacagtggtttcataatgagtccctcatcagctctcaggccagctcttatttcattgatgccgctacagtggacgactccggcgagtatcggtgtcagaccaatctgtctacactgtctgaccccgtgcagcttgaggtccacattggatggttgctcttgcaagccccacgctgggttttcaaagaggaagatccaatccatctgcggtgccacagctggaaaaacaccgctctccacaaagtcacatacctgcaaaatggcaaaggacgcaaatacttccatcacaattccgatttttacattccgaaggctaccctgaaagacagcggcagctatttctgccggggactcgtcggctccaagaatgtgtcctccgaaaccgtgaatatcacgattacccaaggactggctgtgcctacaatctctagcttctttccgcctggataccaagtctccttctgtcttgtgatggtcctcctgtttgctgtggacacaggactgtacttttccgtgaaa

SEQ ID NO: 33574 - DNA, 2178 bp, synthetic construct
  source 1..2178: mol_type = other DNA
atggccttaccagtgaccgccttgctcctgccgctggccttgctgctccacgccgccaggccgagctacgtgctgacacagcctccatccgtgtctgtggctccaggacagaccgccagaatcacatgcggcggcaacaacatcggcggcaagagcgtgcactggtatcagcagccacctggacaggctccagtggtggtggtgtacgacgacagcgatagacctagcggcatccccgagagattcagcggcagcaattccggcaataccgccacactgaccatcagcagagtggaagctggcgacgaggccgtgtactactgccaagtgtgggacagcagcagcgatcacgtggtgtttggcggcggaacaaagctgacagtgcttctcgagggacagcctaaggccaatcctaccgtgacactgttccctccaagcagcgaagaactccaggccaacaaggccacacttgtgtgcctgatctccgacttctaccctggggctgtgacagtggcttggaaggccgatggatctcctgtgaaagccggcgtggaaaccaccaagccatccaagcagagcaacaacaaatacgccgccagctcctacctgagcctgacacctgagcagtggaagtcccacagatcctacagctgccaagtgacccacgaaggcagcaccgtggaaaagacagtggcccctacagagtgcagcggatcccagagcttcggcctgctggaccccaagctgtgctacctgctggatggcatcctgttcatctacggcgtgatcctgaccgccctgttcctgagagtgaagttcagcagaagcgccgacgcccctgcctaccagcagggacagaaccaactgtacaacgagctgaacctgggcagacgggaagagtacgacgtgctggacaagcggagaggcagggaccctgagatgggcggaaagccccagcggagaaagaacccccaggaaggactgtataacgaactccagaaagacaagatggccgaagcctacagcgagatcggcatgaagggcgagcggagaagaggcaagggccacgatggcctgtaccagggcctgagcaccgccaccaaggacacctatgacgccctgcacatgcaggccctgcctccaagaagggccaagcgatctggatctggagcaacaaacttctcactactcaaacaagcaggtgacgtggaggagaatcccgggcctactagtatggactggatttggcgcatccttttccttgtcggcgctgctaccggcgcgcattccttcgaacaactccagctgcaagagtctggccctggcctggtcaagcctagcgaaacactgagcctgacctgtaccgtgtctggcggctctatcagctccagcagctatttctggggctggatcagacaacctcctggcaaaggactggaatggatcggctccatctactacagcggcatcacctactacaaccccagcctgaagtccagagtgaccatctccgtggacaccagcaagaaccagttctccctgaagctgagcagcgtgacagccgccgataccgccgtgtattattgtgccagacatgacggcgctgtggccggcctgtttgattattggggacagggcaccctggtcaccgtgtcatctgctacgcgtgcctctacaaagggaccctccgtgtttcctctggctcccagcagcaagtctacaagcggaggaacagccgctctgggctgcctggtcaaggattactttcccgagcctgtgaccgtgtcctggaatagcggagcactgacaagcggcgtgcacacctttccagccgtgctgcaaagcagcggcctgtactctctgagcagcgtggtcacagtgcctagctctagcctgggcacccagacctacatctgcaatgtgaaccacaagcctagcaacaccaaggtggacaagagagtggaacccaagagctgtggtaccatcactcaaggtttggcagtgtcaaccatctcatcattctttccacctggctaccaagtgtccttctgcctggtcatggtgctgctgttcgccgtggataccggcctgtacttcagcgtcaagaccaacatccggtccagcaccagagactggaaggaccacaagttcaagtggcggaaggaccctcaggacaag

SEQ ID NO: 33575 - DNA, 2223 bp, synthetic construct
  source 1..2223: mol_type = other DNA
atggccttaccagtgaccgccttgctcctgccgctggccttgctgctccacgccgccaggccgagctacgtgctgacacagcctccatccgtgtctgtggctccaggacagaccgccagaatcacatgcggcggcaacaacatcggcggcaagagcgtgcactggtatcagcagccacctggacaggctccagtggtggtggtgtacgacgacagcgatagacctagcggcatccccgagagattcagcggcagcaattccggcaataccgccacactgaccatcagcagagtggaagctggcgacgaggccgtgtactactgccaagtgtgggacagcagcagcgatcacgtggtgtttggcggcggaacaaagctgacagtgcttctcgaggacctgaagaacgtgttcccacctgaggtggccgtgttcgagcctagcgaggccgagatcagccacacccagaaagccaccctcgtgtgcctggctaccggcttctaccccgaccatgtggaactgtcttggtgggtcaacggcaaagaggtgcacagcggcgtgtctaccgacccccagccactgaaagaacagcccgccctgaacgacagccggtactgcctgagcagcagactgagagtgtccgccaccttctggcagaacccccggaaccacttcagatgccaggtgcagttctacggcctgagcgagaacgacgagtggacccaggacagagccaagcccgtgacccagatcgtgtctgccgaagcctggggcagagccgattgcggatcccagagcttcggcctgctggaccccaagctgtgctacctgctggatggcatcctgttcatctacggcgtgatcctgaccgccctgttcctgagagtgaagttcagcagaagcgccgacgcccctgcctaccagcagggacagaaccaactgtacaacgagctgaacctgggcagacgggaagagtacgacgtgctggacaagcggagaggcagggaccctgagatgggcggaaagccccagcggagaaagaacccccaggaaggactgtataacgaactccagaaagacaagatggccgaagcctacagcgagatcggcatgaagggcgagcggagaagaggcaagggccacgatggcctgtaccagggcctgagcaccgccaccaaggacacctatgacgccctgcacatgcaggccctgcctccaagaagggccaagcgatctggatctggagcaacaaacttctcactactcaaacaagcaggtgacgtggaggagaatcccgggcctactagtatggactggatttggcgcatccttttccttgtcggcgctgctaccggcgcgcattccttcgaacaactccagctgcaagagtctggccctggcctggtcaagcctagcgaaacactgagcctgacctgtaccgtgtctggcggctctatcagctccagcagctatttctggggctggatcagacaacctcctggcaaaggactggaatggatcggctccatctactacagcggcatcacctactacaaccccagcctgaagtccagagtgaccatctccgtggacaccagcaagaaccagttctccctgaagctgagcagcgtgacagccgccgataccgccgtgtattattgtgccagacatgacggcgctgtggccggcctgtttgattattggggacagggcaccctggtcaccgtgtcatctgctacgcgtatccagaaccctgatcctgccgtgtaccagctgcgggatagcaagagcagcgacaagagcgtgtgtctgttcaccgacttcgacagccagaccaacgtgtcccagagcaaggactccgacgtgtacatcaccgataagaccgtgctggacatgcggagcatggacttcaagagcaactccgccgtggcctggtccaacaagtccgatttcgcctgcgccaacgccttcaacaacagcattatccccgaggacacattcttcccaagccccgagagcagctgcggtaccatcactcaaggtttggcagtgtcaaccatctcatcattctttccacctggctaccaagtgtccttctgcctggtcatggtgctgctgttcgccgtggataccggcctgtacttcagcgtcaagaccaacatccggtccagcaccagagactggaaggaccacaagttcaagtggcggaaggaccctcaggacaag

SEQ ID NO: 33576 - DNA, 2148 bp, synthetic construct
  source 1..2148: mol_type = other DNA
atggccttaccagtgaccgccttgctcctgccgctggccttgctgctccacgccgccaggccgagctacgtgctgacacagcctccatccgtgtctgtggctccaggacagaccgccagaatcacatgcggcggcaacaacatcggcggcaagagcgtgcactggtatcagcagccacctggacaggctccagtggtggtggtgtacgacgacagcgatagacctagcggcatccccgagagattcagcggcagcaattccggcaataccgccacactgaccatcagcagagtggaagctggcgacgaggccgtgtactactgccaagtgtgggacagcagcagcgatcacgtggtgtttggcggcggaacaaagctgacagtgcttctcgaggacctgaagaacgtgttcccacctgaggtggccgtgttcgagcctagcgaggccgagatcagccacacccagaaagccaccctcgtgtgcctggctaccggcttctaccccgaccatgtggaactgtcttggtgggtcaacggcaaagaggtgcacagcggcgtgtctaccgacccccagccactgaaagaacagcccgccctgaacgacagccggtactgcctgagcagcagactgagagtgtccgccaccttctggcagaacccccggaaccacttcagatgccaggtgcagttctacggcctgagcgagaacgacgagtggacccaggacagagccaagcccgtgacccagatcgtgtctgccgaagcctggggcagagccgattgcggatcccagagcttcggcctgctggaccccaagctgtgctacctgctggatggcatcctgttcatctacggcgtgatcctgaccgccctgttcctgagagtgaagttcagcagaagcgccgacgcccctgcctaccagcagggacagaaccaactgtacaacgagctgaacctgggcagacgggaagagtacgacgtgctggacaagcggagaggcagggaccctgagatgggcggaaagccccagcggagaaagaacccccaggaaggactgtataacgaactccagaaagacaagatggccgaagcctacagcgagatcggcatgaagggcgagcggagaagaggcaagggccacgatggcctgtaccagggcctgagcaccgccaccaaggacacctatgacgccctgcacatgcaggccctgcctccaagaagggccaagcgatctggatctggagcaacaaacttctcactactcaaacaagcaggtgacgtggaggagaatcccgggcctactagtatggactggatttggcgcatccttttccttgtcggcgctgctaccggcgcgcattccttcgaacaactccagctgcaagagtctggccctggcctggtcaagcctagcgaaacactgagcctgacctgtaccgtgtctggcggctctatcagctccagcagctatttctggggctggatcagacaacctcctggcaaaggactggaatggatcggctccatctactacagcggcatcacctactacaaccccagcctgaagtccagagtgaccatctccgtggacaccagcaagaaccagttctccctgaagctgagcagcgtgacagccgccgataccgccgtgtattattgtgccagacatgacggcgctgtggccggcctgtttgattattggggacagggcaccctggtcaccgtgtcatctgctacgcgtatccagaaccctgatcctgccgtgtaccagctgcgggatagcaagagcagcgacaagagcgtgtgtctgttcaccgacttcgacagccagaccaacgtgtcccagagcaaggactccgacgtgtacatcaccgataagaccgtgctggacatgcggagcatggacttcaagagcaactccgccgtggcctggtccaacaagtccgatttcgcctgcgccaacgccttcaacaacagcattatccccgaggacacattcttcccaagccccgagagcagctgcggtaccatcactcaaggtttggcagtgtcaaccatctcatcattctttccacctggctaccaagtgtccttctgcctggtcatggtgctgctgttcgccgtggataccggcctgtacttcagcgtc

SEQ ID NO: 33577 - DNA, 2151 bp, synthetic construct
  source 1..2151: mol_type = other DNA
atggccttaccagtgaccgccttgctcctgccgctggccttgctgctccacgccgccaggccgagctacgtgctgacacagcctccatccgtgtctgtggctccaggacagaccgccagaatcacatgcggcggcaacaacatcggcggcaagagcgtgcactggtatcagcagccacctggacaggctccagtggtggtggtgtacgacgacagcgatagacctagcggcatccccgagagattcagcggcagcaattccggcaataccgccacactgaccatcagcagagtggaagctggcgacgaggccgtgtactactgccaagtgtgggacagcagcagcgatcacgtggtgtttggcggcggaacaaagctgacagtgcttctcgaggacctgaagaacgtgttcccacctgaggtggccgtgttcgagcctagcgaggccgagatcagccacacccagaaagccaccctcgtgtgcctggctaccggcttctaccccgaccatgtggaactgtcttggtgggtcaacggcaaagaggtgcacagcggcgtgtctaccgacccccagccactgaaagaacagcccgccctgaacgacagccggtactgcctgagcagcagactgagagtgtccgccaccttctggcagaacccccggaaccacttcagatgccaggtgcagttctacggcctgagcgagaacgacgagtggacccaggacagagccaagcccgtgacccagatcgtgtctgccgaagcctggggcagagccgattgcggatcccagagcttcggcctgctggaccccaagctgtgctacctgctggatggcatcctgttcatctacggcgtgatcctgaccgccctgttcctgagagtgaagttcagcagaagcgccgacgcccctgcctaccagcagggacagaaccaactgtacaacgagctgaacctgggcagacgggaagagtacgacgtgctggacaagcggagaggcagggaccctgagatgggcggaaagccccagcggagaaagaacccccaggaaggactgtataacgaactccagaaagacaagatggccgaagcctacagcgagatcggcatgaagggcgagcggagaagaggcaagggccacgatggcctgtaccagggcctgagcaccgccaccaaggacacctatgacgccctgcacatgcaggccctgcctccaagaagggccaagcgatctggatctggagcaacaaacttctcactactcaaacaagcaggtgacgtggaggagaatcccgggcctactagtatggactggatttggcgcatccttttccttgtcggcgctgctaccggcgcgcattccttcgaacaactccagctgcaagagtctggccctggcctggtcaagcctagcgaaacactgagcctgacctgtaccgtgtctggcggctctatcagctccagcagctatttctggggctggatcagacaacctcctggcaaaggactggaatggatcggctccatctactacagcggcatcacctactacaaccccagcctgaagtccagagtgaccatctccgtggacaccagcaagaaccagttctccctgaagctgagcagcgtgacagccgccgataccgccgtgtattattgtgccagacatgacggcgctgtggccggcctgtttgattattggggacagggcaccctggtcaccgtgtcatctgctacgcgtatccagaaccctgatcctgccgtgtaccagctgcgggatagcaagagcagcgacaagagcgtgtgtctgttcaccgacttcgacagccagaccaacgtgtcccagagcaaggactccgacgtgtacatcaccgataagaccgtgctggacatgcggagcatggacttcaagagcaactccgccgtggcctggtccaacaagtccgatttcgcctgcgccaacgccttcaacaacagcattatccccgaggacacattcttcccaagccccgagagcagctgcggtaccatcactcaaggtttggcagtgtcaaccatctcatcattctttccacctggctaccaagtgtccttctgcctggtcatggtgctgctgttcgccgtggataccggcctgtacttcagcgtcaag

SEQ ID NO: 33578 - DNA, 2154 bp, synthetic construct
  source 1..2154: mol_type = other DNA
atggccttaccagtgaccgccttgctcctgccgctggccttgctgctccacgccgccaggccgagctacgtgctgacacagcctccatccgtgtctgtggctccaggacagaccgccagaatcacatgcggcggcaacaacatcggcggcaagagcgtgcactggtatcagcagccacctggacaggctccagtggtggtggtgtacgacgacagcgatagacctagcggcatccccgagagattcagcggcagcaattccggcaataccgccacactgaccatcagcagagtggaagctggcgacgaggccgtgtactactgccaagtgtgggacagcagcagcgatcacgtggtgtttggcggcggaacaaagctgacagtgcttctcgaggacctgaagaacgtgttcccacctgaggtggccgtgttcgagcctagcgaggccgagatcagccacacccagaaagccaccctcgtgtgcctggctaccggcttctaccccgaccatgtggaactgtcttggtgggtcaacggcaaagaggtgcacagcggcgtgtctaccgacccccagccactgaaagaacagcccgccctgaacgacagccggtactgcctgagcagcagactgagagtgtccgccaccttctggcagaacccccggaaccacttcagatgccaggtgcagttctacggcctgagcgagaacgacgagtggacccaggacagagccaagcccgtgacccagatcgtgtctgccgaagcctggggcagagccgattgcggatcccagagcttcggcctgctggaccccaagctgtgctacctgctggatggcatcctgttcatctacggcgtgatcctgaccgccctgttcctgagagtgaagttcagcagaagcgccgacgcccctgcctaccagcagggacagaaccaactgtacaacgagctgaacctgggcagacgggaagagtacgacgtgctggacaagcggagaggcagggaccctgagatgggcggaaagccccagcggagaaagaacccccaggaaggactgtataacgaactccagaaagacaagatggccgaagcctacagcgagatcggcatgaagggcgagcggagaagaggcaagggccacgatggcctgtaccagggcctgagcaccgccaccaaggacacctatgacgccctgcacatgcaggccctgcctccaagaagggccaagcgatctggatctggagcaacaaacttctcactactcaaacaagcaggtgacgtggaggagaatcccgggcctactagtatggactggatttggcgcatccttttccttgtcggcgctgctaccggcgcgcattccttcgaacaactccagctgcaagagtctggccctggcctggtcaagcctagcgaaacactgagcctgacctgtaccgtgtctggcggctctatcagctccagcagctatttctggggctggatcagacaacctcctggcaaaggactggaatggatcggctccatctactacagcggcatcacctactacaaccccagcctgaagtccagagtgaccatctccgtggacaccagcaagaaccagttctccctgaagctgagcagcgtgacagccgccgataccgccgtgtattattgtgccagacatgacggcgctgtggccggcctgtttgattattggggacagggcaccctggtcaccgtgtcatctgctacgcgtatccagaaccctgatcctgccgtgtaccagctgcgggatagcaagagcagcgacaagagcgtgtgtctgttcaccgacttcgacagccagaccaacgtgtcccagagcaaggactccgacgtgtacatcaccgataagaccgtgctggacatgcggagcatggacttcaagagcaactccgccgtggcctggtccaacaagtccgatttcgcctgcgccaacgccttcaacaacagcattatccccgaggacacattcttcccaagccccgagagcagctgcggtaccatcactcaaggtttggcagtgtcaaccatctcatcattctttccacctggctaccaagtgtccttctgcctggtcatggtgctgctgttcgccgtggataccggcctgtacttcagcgtcaagacc

SEQ ID NO: 33579 - DNA, 1965 bp, synthetic construct
  source 1..1965: mol_type = other DNA
atggccttaccagtgaccgccttgctcctgccgctggccttgctgctccacgccgccaggccgagctacgtgctgacacagcctccatccgtgtctgtggctccaggacagaccgccagaatcacatgcggcggcaacaacatcggcggcaagagcgtgcactggtatcagcagccacctggacaggctccagtggtggtggtgtacgacgacagcgatagacctagcggcatccccgagagattcagcggcagcaattccggcaataccgccacactgaccatcagcagagtggaagctggcgacgaggccgtgtactactgccaagtgtgggacagcagcagcgatcacgtggtgtttggcggcggaacaaagctgacagtgcttctcgagggacagcctaaggccaatcctaccgtgacactgttccctccaagcagcgaagaactccaggccaacaaggccacacttgtgtgcctgatctccgacttctaccctggggctgtgacagtggcttggaaggccgatggatctcctgtgaaagccggcgtggaaaccaccaagccatccaagcagagcaacaacaaatacgccgccagctcctacctgagcctgacacctgagcagtggaagtcccacagatcctacagctgccaagtgacccacgaaggcagcaccgtggaaaagacagtggcccctacagagtgcagcggatccctgggagagcctcagctgtgctatatcctggacgccatcctgtttctgtacggcatcgtgctgaccctgctgtactgccggctgaagatccaagtgcggaaggccgccatcaccagctacgagaaatccgacggcgtgtacaccggcctgagcaccagaaatcaagagacatacgagacactgaagcacgaaaagcctccacaaagggccaagcgatctggatctggagcaacaaacttctcactactcaaacaagcaggtgacgtggaggagaatcccgggcctactagtatggactggatttggcgcatccttttccttgtcggcgctgctaccggcgcgcattccttcgaacaactccagctgcaagagtctggccctggcctggtcaagcctagcgaaacactgagcctgacctgtaccgtgtctggcggctctatcagctccagcagctatttctggggctggatcagacaacctcctggcaaaggactggaatggatcggctccatctactacagcggcatcacctactacaaccccagcctgaagtccagagtgaccatctccgtggacaccagcaagaaccagttctccctgaagctgagcagcgtgacagccgccgataccgccgtgtattattgtgccagacatgacggcgctgtggccggcctgtttgattattggggacagggcaccctggtcaccgtgtcatctgctacgcgtgcctctacaaagggaccctccgtgtttcctctggctcccagcagcaagtctacaagcggaggaacagccgctctgggctgcctggtcaaggattactttcccgagcctgtgaccgtgtcctggaatagcggagcactgacaagcggcgtgcacacctttccagccgtgctgcaaagcagcggcctgtactctctgagcagcgtggtcacagtgcctagctctagcctgggcacccagacctacatctgcaatgtgaaccacaagcctagcaacaccaaggtggacaagagagtggaacccaagagctgtggtaccctcggagaaccacagctctgttacattctggatgctatcctgttcctctatgggatcgtcctgacactcctgtattgcagactcaaaattcaagttcgcaaagccgccattacctcttacgagaagagtgatggggtgtacacaggactgtctacccggaatcaagaaacctacgaaaccctcaaacatgagaagccacctcagtaa

SEQ ID NO: 33580 - DNA, 1872 bp, synthetic construct
  source 1..1872: mol_type = other DNA
atggccttaccagtgaccgccttgctcctgccgctggccttgctgctccacgccgccaggccgagctacgtgctgacacagcctccatccgtgtctgtggctccaggacagaccgccagaatcacatgcggcggcaacaacatcggcggcaagagcgtgcactggtatcagcagccacctggacaggctccagtggtggtggtgtacgacgacagcgatagacctagcggcatccccgagagattcagcggcagcaattccggcaataccgccacactgaccatcagcagagtggaagctggcgacgaggccgtgtactactgccaagtgtgggacagcagcagcgatcacgtggtgtttggcggcggaacaaagctgacagtgcttctcgaggacctgaagaacgtgttcccacctgaggtggccgtgttcgagcctagcgaggccgagatcagccacacccagaaagccaccctcgtgtgcctggctaccggcttctaccccgaccatgtggaactgtcttggtgggtcaacggcaaagaggtgcacagcggcgtgtgtaccgacccccagccactgaaagaacagcccgccctgaacgacagccggtactgcctgagcagcagactgagagtgtccgccaccttctggcagaacccccggaaccacttcagatgccaggtgcagttctacggcctgagcgagaacgacgagtggacccaggacagagccaagcccgtgacccagatcgtgtctgccgaagcctggggcagagccgattgcggctttaccagcgagagctaccagcagggcgtgctgagcgcctactacatgtacttgttgctgctgctgaagtccgtggtgtacttcgccatcatcacatgctgcctgctgcggagaaccgccttctgctgcaacggcgagaagtctagggccaagcgatctggatctggagcaacaaacttctcactactcaaacaagcaggtgacgtggaggagaatcccgggcctactagtatggactggatttggcgcatccttttccttgtcggcgctgctaccggcgcgcattccttcgaacaactccagctgcaagagtctggccctggcctggtcaagcctagcgaaacactgagcctgacctgtaccgtgtctggcggctctatcagctccagcagctatttctggggctggatcagacaacctcctggcaaaggactggaatggatcggctccatctactacagcggcatcacctactacaaccccagcctgaagtccagagtgaccatctccgtggacaccagcaagaaccagttctccctgaagctgagcagcgtgacagccgccgataccgccgtgtattattgtgccagacatgacggcgctgtggccggcctgtttgattattggggacagggcaccctggtcaccgtgtcatctgctacgcgtatccagaaccctgatcctgccgtgtaccagctgcgggatagcaagagcagcgacaagagcgtgtgtctgttcaccgacttcgacagccagaccaacgtgtcccagagcaaggactccgacgtgtacatcaccgataagtgcgtgctggacatgcggagcatggacttcaagagcaactccgccgtggcctggtccaacaagtccgatttcgcctgcgccaacgccttcaacaacagcattatccccgaggacacattcttcccaagccccgagagcagctgcgacgtgaagctggtggaaaagagcttcgagacagacaccaacctgaacttccagaacctgagcgtgatcggcttcagaatcctgctgctgaaagtggccggctttaacctgctgatgaccctgcggctgtggtccagc

SEQ ID NO: 33581 - DNA, 1893 bp, synthetic construct
  source 1..1893: mol_type = other DNA
atggccttaccagtgaccgccttgctcctgccgctggccttgctgctccacgccgccaggccgagctacgtgctgacacagcctccatccgtgtctgtggctccaggacagaccgccagaatcacatgcggcggcaacaacatcggcggcaagagcgtgcactggtatcagcagccacctggacaggctccagtggtggtggtgtacgacgacagcgatagacctagcggcatccccgagagattcagcggcagcaattccggcaataccgccacactgaccatcagcagagtggaagctggcgacgaggccgtgtactactgccaagtgtgggacagcagcagcgatcacgtggtgtttggcggcggaacaaagctgacagtgcttctcgaggacaagcagctggacgccgacgtgtcccccaagcctaccatcttcctgccctctatcgccgagacaaagctccagaaggccggcacctacctgtgcctgctggaaaagttcttcccagatgtgattaagatccactggcaggaaaagaagtccaacaccatcctgggcagccaggaaggcaacaccatgaagaccaacgacacctacatgaagttcagctggctgaccgtgcccgagaagtccctggacaaagaacacagatgcatcgtgcggcacgaaaacaacaagaacggcgtggaccaggaaatcatcttcccacccatcaagaccgatgtgattacaatggaccccaaggacaactgctccaaggacgccaacgataccctgctgctccagctgaccaacaccagcgcctactacatgtacgagatcctgctgggcaaggccaccctgtacgccgtgctggtgtctgccctggtgctgatggctatggtcaagcggaaggacagccggggaagggccaagcgatctggatctggagcaacaaacttctcactactcaaacaagcaggtgacgtggaggagaatcccgggcctactagtatggactggatttggcgcatccttttccttgtcggcgctgctaccggcgcgcattccttcgaacaactccagctgcaagagtctggccctggcctggtcaagcctagcgaaacactgagcctgacctgtaccgtgtctggcggctctatcagctccagcagctatttctggggctggatcagacaacctcctggcaaaggactggaatggatcggctccatctactacagcggcatcacctactacaaccccagcctgaagtccagagtgaccatctccgtggacaccagcaagaaccagttctccctgaagctgagcagcgtgacagccgccgataccgccgtgtattattgtgccagacatgacggcgctgtggccggcctgtttgattattggggacagggcaccctggtcaccgtgtcatctgctacgcgtagccagcctcacaccaagcccagcgtgttcgtgatgaagaacggcaccaacgtggcctgcctcgtgaaagagttctaccccaaggacatcaggatcaacctggtgtccagcaagaagatcaccgagttcgaccccgccatcgtgatctcccccagcggcaagtacaacgccgtgaagctggggaagtatgaggacagcaacagcgtgacctgctccgtgcagcacgacaacaagaccgtgcacagcaccgactttgaagtgaaaaccgactccaccgaccacgtgaagcccaaagagacagagaacaccaagcagcccagcaagagctgccacaagcccaaggccatcgtgcacaccgagaaagtgaacatgatgagcctgaccgtgatcggcttcagaatcctgctgctgaaagtggccggctttaacctgctgatgaccctgcggctgtggtccagctaa

SEQ ID NO: 33582 - DNA, 1893 bp, synthetic construct
  source 1..1893: mol_type = other DNA
atggccttaccagtgaccgccttgctcctgccgctggccttgctgctccacgccgccaggccgagctacgtgctgacacagcctccatccgtgtctgtggctccaggacagaccgccagaatcacatgcggcggcaacaacatcggcggcaagagcgtgcactggtatcagcagccacctggacaggctccagtggtggtggtgtacgacgacagcgatagacctagcggcatccccgagagattcagcggcagcaattccggcaataccgccacactgaccatcagcagagtggaagctggcgacgaggccgtgtactactgccaagtgtgggacagcagcagcgatcacgtggtgtttggcggcggaacaaagctgacagtgcttctcgaggacaagcagctggacgccgacgtgtcccccaagcctaccatcttcctgccctctatcgccgagacaaagctccagaaggccggcacctacctgtgcctgctggaaaagttcttcccagatgtgattaagatccactggcaggaaaagaagtccaacaccatcctgggcagccaggaaggcaacaccatgaagaccaacgacacctacatgaagttcagctggctgaccgtgcccgagaagtccctggacaaagaacacagatgcatcgtgcggcacgaaaacaacaagaacggcgtggaccaggaaatcatcttcccacccatcaagaccgatgtgattacaatggaccccaaggacaactgctccaaggacgccaacgataccctgctgctccagctgaccaacaccagcgccaccatcctgtacgagatcctgctgggcaaggccaccctgtacgccgtgctggtgtctgccctggtgctgatggctatggtcaagcggaaggacagccggggaagggccaagcgatctggatctggagcaacaaacttctcactactcaaacaagcaggtgacgtggaggagaatcccgggcctactagtatggactggatttggcgcatccttttccttgtcggcgctgctaccggcgcgcattccttcgaacaactccagctgcaagagtctggccctggcctggtcaagcctagcgaaacactgagcctgacctgtaccgtgtctggcggctctatcagctccagcagctatttctggggctggatcagacaacctcctggcaaaggactggaatggatcggctccatctactacagcggcatcacctactacaaccccagcctgaagtccagagtgaccatctccgtggacaccagcaagaaccagttctccctgaagctgagcagcgtgacagccgccgataccgccgtgtattattgtgccagacatgacggcgctgtggccggcctgtttgattattggggacagggcaccctggtcaccgtgtcatctgctacgcgtagccagcctcacaccaagcccagcgtgttcgtgatgaagaacggcaccaacgtggcctgcctcgtgaaagagttctaccccaaggacatcaggatcaacctggtgtccagcaagaagatcaccgagttcgaccccgccatcgtgatctcccccagcggcaagtacaacgccgtgaagctggggaagtatgaggacagcaacagcgtgacctgctccgtgcagcacgacaacaagaccgtgcacagcaccgactttgaagtgaaaaccgactccaccgaccacgtgaagcccaaagagacagagaacaccaagcagcccagcaagagctgccacaagcccaaggccatcgtgcacaccgagaaagtgaacatgatgagcctgaccgtgatcggcttcagaatcctgctgctgaaagtggccggctttaacctgctgatgaccctgcggctgtggtccagctaa

SEQ ID NO: 33583 - DNA, 1893 bp, synthetic construct
  source 1..1893: mol_type = other DNA
atggccttaccagtgaccgccttgctcctgccgctggccttgctgctccacgccgccaggccgagctacgtgctgacacagcctccatccgtgtctgtggctccaggacagaccgccagaatcacatgcggcggcaacaacatcggcggcaagagcgtgcactggtatcagcagccacctggacaggctccagtggtggtggtgtacgacgacagcgatagacctagcggcatccccgagagattcagcggcagcaattccggcaataccgccacactgaccatcagcagagtggaagctggcgacgaggccgtgtactactgccaagtgtgggacagcagcagcgatcacgtggtgtttggcggcggaacaaagctgacagtgcttctcgaggacaagcagctggacgccgacgtgtcccccaagcctaccatcttcctgccctctatcgccgagacaaagctccagaaggccggcacctacctgtgcctgctggaaaagttcttcccagatgtgattaagatccactggcaggaaaagaagtccaacaccatcctgggcagccaggaaggcaacaccatgaagaccaacgacacctacatgaagttcagctggctgaccgtgcccgagaagtccctggacaaagaacacagatgcatcgtgcggcacgaaaacaacaagaacggcgtggaccaggaaatcatcttcccacccatcaagaccgatgtgattacaatggaccccaaggacaactgctccaaggacgccaacgataccctgctgctccagctgaccaacaccagcgcctactacatgtacgagatcctgctgggcaaggccaccctgtacgccgtgctggtgtctgccctggtgctgatggctatggtcaagcggaaggacagccggggaagggccaagcgatctggatctggagcaacaaacttctcactactcaaacaagcaggtgacgtggaggagaatcccgggcctactagtatggactggatttggcgcatccttttccttgtcggcgctgctaccggcgcgcattccttcgaacaactccagctgcaagagtctggccctggcctggtcaagcctagcgaaacactgagcctgacctgtaccgtgtctggcggctctatcagctccagcagctatttctggggctggatcagacaacctcctggcaaaggactggaatggatcggctccatctactacagcggcatcacctactacaaccccagcctgaagtccagagtgaccatctccgtggacaccagcaagaaccagttctccctgaagctgagcagcgtgacagccgccgataccgccgtgtattattgtgccagacatgacggcgctgtggccggcctgtttgattattggggacagggcaccctggtcaccgtgtcatctgctacgcgtagccagcctcacaccaagcccagcgtgttcgtgatgaagaacggcaccaacgtggcctgcctcgtgaaagagttctaccccaaggacatcaggatcaacctggtgtccagcaagaagatcaccgagttcgaccccgccatcgtgatctcccccagcggcaagtacaacgccgtgaagctggggaagtacgaggacagcaacagcgtgacctgctccgtgcagcacgacaacaagaccgtgcacagcaccgactttgaagtgaaaaccgactccaccgaccacgtgaagcccaaagagacagagaacaccaagcagcccagcaagagctgccacaagcccaaggccatcgtgcacaccgagaaagtgaacatgatgagcctgaccgtgctgggcttcagaatcctgctgctgaaagtggccggctttaacctgctgatgaccctgcggctgtggtccagctaa

SEQ ID NO: 33584 - DNA, 1893 bp, synthetic construct
  source 1..1893: mol_type = other DNA
atggccttaccagtgaccgccttgctcctgccgctggccttgctgctccacgccgccaggccgagctacgtgctgacacagcctccatccgtgtctgtggctccaggacagaccgccagaatcacatgcggcggcaacaacatcggcggcaagagcgtgcactggtatcagcagccacctggacaggctccagtggtggtggtgtacgacgacagcgatagacctagcggcatccccgagagattcagcggcagcaattccggcaataccgccacactgaccatcagcagagtggaagctggcgacgaggccgtgtactactgccaagtgtgggacagcagcagcgatcacgtggtgtttggcggcggaacaaagctgacagtgcttctcgaggacaagcagctggacgccgacgtgtcccccaagcctaccatcttcctgccctctatcgccgagacaaagctccagaaggccggcacctacctgtgcctgctggaaaagttcttcccagatgtgattaagatccactggcaggaaaagaagtccaacaccatcctgggcagccaggaaggcaacaccatgaagaccaacgacacctacatgaagttcagctggctgaccgtgcccgagaagtccctggacaaagaacacagatgcatcgtgcggcacgaaaacaacaagaacggcgtggaccaggaaatcatcttcccacccatcaagaccgatgtgattacaatggaccccaaggacaactgctccaaggacgccaacgataccctgctgctccagctgaccaacaccagcgccaccatcctgtacgagatcctgctgggcaaggccaccctgtacgccgtgctggtgtctgccctggtgctgatggctatggtcaagcggaaggacagccggggaagggccaagcgatctggatctggagcaacaaacttctcactactcaaacaagcaggtgacgtggaggagaatcccgggcctactagtatggactggatttggcgcatccttttccttgtcggcgctgctaccggcgcgcattccttcgaacaactccagctgcaagagtctggccctggcctggtcaagcctagcgaaacactgagcctgacctgtaccgtgtctggcggctctatcagctccagcagctatttctggggctggatcagacaacctcctggcaaaggactggaatggatcggctccatctactacagcggcatcacctactacaaccccagcctgaagtccagagtgaccatctccgtggacaccagcaagaaccagttctccctgaagctgagcagcgtgacagccgccgataccgccgtgtattattgtgccagacatgacggcgctgtggccggcctgtttgattattggggacagggcaccctggtcaccgtgtcatctgctacgcgtagccagcctcacaccaagcccagcgtgttcgtgatgaagaacggcaccaacgtggcctgcctcgtgaaagagttctaccccaaggacatcaggatcaacctggtgtccagcaagaagatcaccgagttcgaccccgccatcgtgatctcccccagcggcaagtacaacgccgtgaagctggggaagtacgaggacagcaacagcgtgacctgctccgtgcagcacgacaacaagaccgtgcacagcaccgactttgaagtgaaaaccgactccaccgaccacgtgaagcccaaagagacagagaacaccaagcagcccagcaagagctgccacaagcccaaggccatcgtgcacaccgagaaagtgaacatgatgagcctgaccgtgctgggcttcagaatcctgctgctgaaagtggccggctttaacctgctgatgaccctgcggctgtggtccagctaa

SEQ ID NO: 33585 - DNA, 1875 bp, synthetic construct
  source 1..1875: mol_type = other DNA
atggccttaccagtgaccgccttgctcctgccgctggccttgctgctccacgccgccaggccgagctacgtgctgacacagcctccatccgtgtctgtggctccaggacagaccgccagaatcacatgcggcggcaacaacatcggcggcaagagcgtgcactggtatcagcagccacctggacaggctccagtggtggtggtgtacgacgacagcgatagacctagcggcatccccgagagattcagcggcagcaattccggcaataccgccacactgaccatcagcagagtggaagctggcgacgaggccgtgtactactgccaagtgtgggacagcagcagcgatcacgtggtgtttggcggcggaacaaagctgacagtgcttctcgaggacctgaagaacgtgttcccacctgaggtggccgtgttcgagcctagcgaggccgagatcagccacacccagaaagccaccctcgtgtgcctggctaccggcttctaccccgaccatgtggaactgtcttggtgggtcaacggcaaagaggtgcacagcggcgtgtgtaccgacccccagccactgaaagaacagcccgccctgaacgacagccggtactgcctgagcagcagactgagagtgtccgccaccttctggcagaacccccggaaccacttcagatgccaggtgcagttctacggcctgagcgagaacgacgagtggacccaggacagagccaagcccgtgacccagatcgtgtctgccgaagcctggggcagagccgattgcggctttaccagcgagagctaccagcagggcgtgctgagcgccaccatcctgtacttgttgctgctgctgaagtccgtggtgtacttcgccatcatcacatgctgcctgctgcggagaaccgccttctgctgcaacggcgagaagtctagggccaagcgatctggatctggagcaacaaacttctcactactcaaacaagcaggtgacgtggaggagaatcccgggcctactagtatggactggatttggcgcatccttttccttgtcggcgctgctaccggcgcgcattccttcgaacaactccagctgcaagagtctggccctggcctggtcaagcctagcgaaacactgagcctgacctgtaccgtgtctggcggctctatcagctccagcagctatttctggggctggatcagacaacctcctggcaaaggactggaatggatcggctccatctactacagcggcatcacctactacaaccccagcctgaagtccagagtgaccatctccgtggacaccagcaagaaccagttctccctgaagctgagcagcgtgacagccgccgataccgccgtgtattattgtgccagacatgacggcgctgtggccggcctgtttgattattggggacagggcaccctggtcaccgtgtcatctgctacgcgtatccagaaccctgatcctgccgtgtaccagctgcgggatagcaagagcagcgacaagagcgtgtgtctgttcaccgacttcgacagccagaccaacgtgtcccagagcaaggactccgacgtgtacatcaccgataagtgcgtgctggacatgcggagcatggacttcaagagcaactccgccgtggcctggtccaacaagtccgatttcgcctgcgccaacgccttcaacaacagcattatccccgaggacacattcttcccaagccccgagagcagctgcgacgtgaagctggtggaaaagagcttcgagacagacaccaacctgaacttccagaacctgagcgtgatcggcctgcggatgctgttcgccaaaaccgtggccgtgaacttcctgctgaccgccaagctgttcttcctctaa

SEQ ID NO: 33586 - DNA, 1962 bp, synthetic construct
  source 1..1962: mol_type = other DNA
atggccttaccagtgaccgccttgctcctgccgctggccttgctgctccacgccgccaggccgagctacgtgctgacacagcctccatccgtgtctgtggctccaggacagaccgccagaatcacatgcggcggcaacaacatcggcggcaagagcgtgcactggtatcagcagccacctggacaggctccagtggtggtggtgtacgacgacagcgatagacctagcggcatccccgagagattcagcggcagcaattccggcaataccgccacactgaccatcagcagagtggaagctggcgacgaggccgtgtactactgccaagtgtgggacagcagcagcgatcacgtggtgtttggcggcggaacaaagctgacagtgcttctcgaggacctgaagaacgtgttcccacctgaggtggccgtgttcgagcctagcgaggccgagatcagccacacccagaaagccaccctcgtgtgcctggctaccggcttctaccccgaccatgtggaactgtcttggtgggtcaacggcaaagaggtgcacagcggcgtgtctaccgacccccagccactgaaagaacagcccgccctgaacgacagccggtactgcctgagcagcagactgagagtgtccgccaccttctggcagaacccccggaaccacttcagatgccaggtgcagttctacggcctgagcgagaacgacgagtggacccaggacagagccaagcccgtgacccagatcgtgtctgccgaagcctggggcagagccgattgcggatcctccaaggacgccaacgataccctgctgctccagctgaccaacaccagcgcctactacatgtacttgttgctgctgctgaagtccgtggtgtacttcgccatcatcacatgctgcctgctgcggagaaccgccttctgctgcaacggcgagaagtctagggccaagcgatctggatctggagcaacaaacttctcactactcaaacaagcaggtgacgtggaggagaatcccgggcctactagtatggactggatttggcgcatccttttccttgtcggcgctgctaccggcgcgcattccttcgaacaactccagctgcaagagtctggccctggcctggtcaagcctagcgaaacactgagcctgacctgtaccgtgtctggcggctctatcagctccagcagctatttctggggctggatcagacaacctcctggcaaaggactggaatggatcggctccatctactacagcggcatcacctactacaaccccagcctgaagtccagagtgaccatctccgtggacaccagcaagaaccagttctccctgaagctgagcagcgtgacagccgccgataccgccgtgtattattgtgccagacatgacggcgctgtggccggcctgtttgattattggggacagggcaccctggtcaccgtgtcatctgctacgcgtatccagaaccctgatcctgccgtgtaccagctgcgggatagcaagagcagcgacaagagcgtgtgtctgttcaccgacttcgacagccagaccaacgtgtcccagagcaaggactccgacgtgtacatcaccgataagaccgtgctggacatgcggagcatggacttcaagagcaactccgccgtggcctggtccaacaagtccgatttcgcctgcgccaacgccttcaacaacagcattatccccgaggacacattcttcccaagccccgagagcagctgcggtaccgaagtgaaaaccgactccaccgaccacgtgaagcccaaagagacagagaacaccaagcagcccagcaagagctgccacaagcccaaggccatcgtgcacaccgagaaagtgaacatgatgagcctgaccgtgctgggcctgcggatgctgttcgccaaaaccgtggccgtgaacttcctgctgaccgccaagctgttcttcctctaa

SEQ ID NO: 33587 - DNA, 1872 bp, synthetic construct
  source 1..1872: mol_type = other DNA
atggccttaccagtgaccgccttgctcctgccgctggccttgctgctccacgccgccaggccgagctacgtgctgacacagcctccatccgtgtctgtggctccaggacagaccgccagaatcacatgcggcggcaacaacatcggcggcaagagcgtgcactggtatcagcagccacctggacaggctccagtggtggtggtgtacgacgacagcgatagacctagcggcatccccgagagattcagcggcagcaattccggcaataccgccacactgaccatcagcagagtggaagctggcgacgaggccgtgtactactgccaagtgtgggacagcagcagcgatcacgtggtgtttggcggcggaacaaagctgacagtgcttctcgaggacctgaagaacgtgttcccacctgaggtggccgtgttcgagcctagcgaggccgagatcagccacacccagaaagccaccctcgtgtgcctggctaccggcttctaccccgaccatgtggaactgtcttggtgggtcaacggcaaagaggtgcacagcggcgtgtgtaccgacccccagccactgaaagaacagcccgccctgaacgacagccggtactgcctgagcagcagactgagagtgtccgccaccttctggcagaacccccggaaccacttcagatgccaggtgcagttctacggcctgagcgagaacgacgagtggacccaggacagagccaagcccgtgacccagatcgtgtctgccgaagcctggggcagagccgattgcgacgtgaagctggtggaaaagagcttcgagacagacaccaacctgaacttccagaacctgagcgtgatcggcttcagaatcctgctgctgaaagtggccggctttaacctgctgatgaccctgcggctgtggtccagcagggccaagcgatctggatctggagcaacaaacttctcactactcaaacaagcaggtgacgtggaggagaatcccgggcctactagtatggactggatttggcgcatccttttccttgtcggcgctgctaccggcgcgcattccttcgaacaactccagctgcaagagtctggccctggcctggtcaagcctagcgaaacactgagcctgacctgtaccgtgtctggcggctctatcagctccagcagctatttctggggctggatcagacaacctcctggcaaaggactggaatggatcggctccatctactacagcggcatcacctactacaaccccagcctgaagtccagagtgaccatctccgtggacaccagcaagaaccagttctccctgaagctgagcagcgtgacagccgccgataccgccgtgtattattgtgccagacatgacggcgctgtggccggcctgtttgattattggggacagggcaccctggtcaccgtgtcatctgctacgcgtatccagaaccctgatcctgccgtgtaccagctgcgggatagcaagagcagcgacaagagcgtgtgtctgttcaccgacttcgacagccagaccaacgtgtcccagagcaaggactccgacgtgtacatcaccgataagtgcgtgctggacatgcggagcatggacttcaagagcaactccgccgtggcctggtccaacaagtccgatttcgcctgcgccaacgccttcaacaacagcattatccccgaggacacattcttcccaagccccgagagcagctgcggctttaccagcgagagctaccagcagggcgtgctgagcgccaccatcctgtacgagatcctgctgggcaaggccaccctgtacgccgtgctggtgtctgccctggtgctgatggctatggtcaagcggaaggacagccggggataa

SEQ ID NO: 33588 - DNA, 1872 bp, synthetic construct
  source 1..1872: mol_type = other DNA
atggccttaccagtgaccgccttgctcctgccgctggccttgctgctccacgccgccaggccgagctacgtgctgacacagcctccatccgtgtctgtggctccaggacagaccgccagaatcacatgcggcggcaacaacatcggcggcaagagcgtgcactggtatcagcagccacctggacaggctccagtggtggtggtgtacgacgacagcgatagacctagcggcatccccgagagattcagcggcagcaattccggcaataccgccacactgaccatcagcagagtggaagctggcgacgaggccgtgtactactgccaagtgtgggacagcagcagcgatcacgtggtgtttggcggcggaacaaagctgacagtgcttctcgaggacctgaagaacgtgttcccacctgaggtggccgtgttcgagcctagcgaggccgagatcagccacacccagaaagccaccctcgtgtgcctggctaccggcttctaccccgaccatgtggaactgtcttggtgggtcaacggcaaagaggtgcacagcggcgtgtgtaccgacccccagccactgaaagaacagcccgccctgaacgacagccggtactgcctgagcagcagactgagagtgtccgccaccttctggcagaacccccggaaccacttcagatgccaggtgcagttctacggcctgagcgagaacgacgagtggacccaggacagagccaagcccgtgacccagatcgtgtctgccgaagcctggggcagagccgattgcggctttaccagcgagagctaccagcagggcgtgctgagcgccaccaacctgagcgtgatcggcttcagaatcctgctgctgaaagtggccggctttaacctgctgatgaccctgcggctgtggtccagcagggccaagcgatctggatctggagcaacaaacttctcactactcaaacaagcaggtgacgtggaggagaatcccgggcctactagtatggactggatttggcgcatccttttccttgtcggcgctgctaccggcgcgcattccttcgaacaactccagctgcaagagtctggccctggcctggtcaagcctagcgaaacactgagcctgacctgtaccgtgtctggcggctctatcagctccagcagctatttctggggctggatcagacaacctcctggcaaaggactggaatggatcggctccatctactacagcggcatcacctactacaaccccagcctgaagtccagagtgaccatctccgtggacaccagcaagaaccagttctccctgaagctgagcagcgtgacagccgccgataccgccgtgtattattgtgccagacatgacggcgctgtggccggcctgtttgattattggggacagggcaccctggtcaccgtgtcatctgctacgcgtatccagaaccctgatcctgccgtgtaccagctgcgggatagcaagagcagcgacaagagcgtgtgtctgttcaccgacttcgacagccagaccaacgtgtcccagagcaaggactccgacgtgtacatcaccgataagtgcgtgctggacatgcggagcatggacttcaagagcaactccgccgtggcctggtccaacaagtccgatttcgcctgcgccaacgccttcaacaacagcattatccccgaggacacattcttcccaagccccgagagcagctgcgacgtgaagctggtggaaaagagcttcgagacagacaccaacctgaacttccagatcctgtacgagatcctgctgggcaaggccaccctgtacgccgtgctggtgtctgccctggtgctgatggctatggtcaagcggaaggacagccggggataa

SEQ ID NO: 33589 - DNA, 1872 bp, synthetic construct; identical to SEQ ID NO: 33587
  source 1..1872: mol_type = other DNA

SEQ ID NO: 33590 - DNA, 1872 bp, synthetic construct; identical to SEQ ID NO: 33588
  source 1..1872: mol_type = other DNA

SEQ ID NO: 33591 - DNA, 1869 bp, synthetic construct
  source 1..1869: mol_type = other DNA
atggccttaccagtgaccgccttgctcctgccgctggccttgctgctccacgccgccaggccgagctacgtgctgacacagcctccatccgtgtctgtggctccaggacagaccgccagaatcacatgcggcggcaacaacatcggcggcaagagcgtgcactggtatcagcagccacctggacaggctccagtggtggtggtgtacgacgacagcgatagacctagcggcatccccgagagattcagcggcagcaattccggcaataccgccacactgaccatcagcagagtggaagctggcgacgaggccgtgtactactgccaagtgtgggacagcagcagcgatcacgtggtgtttggcggcggaacaaagctgacagtgcttctcgaggacctgaagaacgtgttcccacctgaggtggccgtgttcgagcctagcgaggccgagatcagccacacccagaaagccaccctcgtgtgcctggctaccggcttctaccccgaccatgtggaactgtcttggtgggtcaacggcaaagaggtgcacagcggcgtgtgtaccgacccccagccactgaaagaacagcccgccctgaacgacagccggtactgcctgagcagcagactgagagtgtccgccaccttctggcagaacccccggaaccacttcagatgccaggtgcagttctacggcctgagcgagaacgacgagtggacccaggacagagccaagcccgtgacccagatcgtgtctgccgaagcctggggcagagccgattgcgacgtgaagctggtggaaaagagcttcgagacagacaccaacctgaacttccagaacctgagcgtgatcggcttcagaatcctgctgctgaaagtggccggctttaacctgctgatgaccctgcggctgtggtccagcagggccaagcgatctggatctggagcaacaaacttctcactactcaaacaagcaggtgacgtggaggagaatcccgggcctactagtatggactggatttggcgcatccttttccttgtcggcgctgctaccggcgcgcattccttcgaacaactccagctgcaagagtctggccctggcctggtcaagcctagcgaaacactgagcctgacctgtaccgtgtctggcggctctatcagctccagcagctatttctggggctggatcagacaacctcctggcaaaggactggaatggatcggctccatctactacagcggcatcacctactacaaccccagcctgaagtccagagtgaccatctccgtggacaccagcaagaaccagttctccctgaagctgagcagcgtgacagccgccgataccgccgtgtattattgtgccagacatgacggcgctgtggccggcctgtttgattattggggacagggcaccctggtcaccgtgtcatctgctacgcgtatccagaaccctgatcctgccgtgtaccagctgcgggatagcaagagcagcgacaagagcgtgtgtctgttcaccgacttcgacagccagaccaacgtgtcccagagcaaggactccgacgtgtacatcaccgataagtgcgtgctggacatgcggagcatggacttcaagagcaactccgccgtggcctggtccaacaagtccgatttcgcctgcgccaacgccttcaacaacagcattatccccgaggacacattcttcccaagccccgagagcagctgcggctttaccagcgagagctaccagcagggcgtgctgagcgccaccatcctgtacgagatcctgctgggcaaggccaccctgtacgccgtgctggtgtctgccctggtgctgatggctatggtcaagcggaaggacagccgggga

SEQ ID NO: 33592 - DNA, 1881 bp, synthetic construct
  source 1..1881: mol_type = other DNA
atggccttaccagtgaccgccttgctcctgccgctggccttgctgctccacgccgccaggccgagctacgtgctgacacagcctccatccgtgtctgtggctccaggacagaccgccagaatcacatgcggcggcaacaacatcggcggcaagagcgtgcactggtatcagcagccacctggacaggctccagtggtggtggtgtacgacgacagcgatagacctagcggcatccccgagagattcagcggcagcaattccggcaataccgccacactgaccatcagcagagtggaagctggcgacgaggccgtgtactactgccaagtgtgggacagcagcagcgatcacgtggtgtttggcggcggaacaaagctgacagtgcttctcgaggccgacgtgtcccccaagcctaccatcttcctgccctctatcgccgagacaaagctccagaaggccggcacctacctgtgcctgctggaaaagttcttcccagatgtgattaagatccactggcaggaaaagaagtccaacaccatcctgggcagccaggaaggcaacaccatgaagaccaacgacacctacatgaagttcagctggctgaccgtgcccgagaagtccctggacaaagaacacagatgcatcgtgcggcacgaaaacaacaagaacggcgtggaccaggaaatcatcttcccacccatcaagaccgatgtgattacaatggaccccaaggacaactgctccaaggacgccaacgataccctgctgctccagctgaccaacaccagcgcctactacatgtacttgttgctgctgctgaagtccgtggtgtacttcgccatcatcacatgctgcctgctgcggagaaccgccttctgctgcaacggcgagaagtctagggccaagcgatctggatctggagcaacaaacttctcactactcaaacaagcaggtgacgtggaggagaatcccgggcctactagtatggactggatttggcgcatccttttccttgtcggcgctgctaccggcgcgcattccttcgaacaactccagctgcaagagtctggccctggcctggtcaagcctagcgaaacactgagcctgacctgtaccgtgtctggcggctctatcagctccagcagctatttctggggctggatcagacaacctcctggcaaaggactggaatggatcggctccatctactacagcggcatcacctactacaaccccagcctgaagtccagagtgaccatctccgtggacaccagcaagaaccagttctccctgaagctgagcagcgtgacagccgccgataccgccgtgtattattgtgccagacatgacggcgctgtggccggcctgtttgattattggggacagggcaccctggtcaccgtgtcatctgctacgcgtagccagcctcacaccaagcccagcgtgttcgtgatgaagaacggcaccaacgtggcctgcctcgtgaaagagttctaccccaaggacatcaggatcaacctggtgtccagcaagaagatcaccgagttcgaccccgccatcgtgatctcccccagcggcaagtacaacgccgtgaagctggggaagtatgaggacagcaacagcgtgacctgctccgtgcagcacgacaacaagaccgtgcacagcaccgactttgaagtgaaaaccgactccaccgaccacgtgaagcccaaagagacagagaacaccaagcagcccagcaagagctgccacaagcccaaggccatcgtgcacaccgagaaagtgaacatgatgagcctgaccgtgatcggcttcagaatcctgctgctgaaagtggccggctttaacctgctgatgaccctgcggctgtggtccagctaa

SEQ ID NO: 33593 - DNA, 1881 bp, synthetic construct
  source 1..1881: mol_type = other DNA
atggccttaccagtgaccgccttgctcctgccgctggccttgctgctccacgccgccaggccgagctacgtgctgacacagcctccatccgtgtctgtggctccaggacagaccgccagaatcacatgcggcggcaacaacatcggcggcaagagcgtgcactggtatcagcagccacctggacaggctccagtggtggtggtgtacgacgacagcgatagacctagcggcatccccgagagattcagcggcagcaattccggcaataccgccacactgaccatcagcagagtggaagctggcgacgaggccgtgtactactgccaagtgtgggacagcagcagcgatcacgtggtgtttggcggcggaacaaagctgacagtgcttctcgaggccgacgtgtcccccaagcctaccatcttcctgccctctatcgccgagacaaagctccagaaggccggcacctacctgtgcctgctggaaaagttcttcccagatgtgattaagatccactggcaggaaaagaagtccaacaccatcctgggcagccaggaaggcaacaccatgaagaccaacgacacctacatgaagttcagctggctgaccgtgcccgagaagtccctggacaaagaacacagatgcatcgtgcggcacgaaaacaacaagaacggcgtggaccaggaaatcatcttcccacccatcaagaccgatgtgattacaatggaccccaaggacaactgctccaaggacgccaacgataccctgctgctccagctgaccaacaccagcgcctactacatgtacttgttgctgctgctgaagtccgtggtgtacttcgccatcatcacatgctgcctgctgcggagaaccgccttctgctgcaacggcgagaagtctagggccaagcgatctggatctggagcaacaaacttctcactactcaaacaagcaggtgacgtggaggagaatcccgggcctactagtatggactggatttggcgcatccttttccttgtcggcgctgctaccggcgcgcattccttcgaacaactccagctgcaagagtctggccctggcctggtcaagcctagcgaaacactgagcctgacctgtaccgtgtctggcggctctatcagctccagcagctatttctggggctggatcagacaacctcctggcaaaggactggaatggatcggctccatctactacagcggcatcacctactacaaccccagcctgaagtccagagtgaccatctccgtggacaccagcaagaaccagttctccctgaagctgagcagcgtgacagccgccgataccgccgtgtattattgtgccagacatgacggcgctgtggccggcctgtttgattattggggacagggcaccctggtcaccgtgtcatctgctacgcgtagccagcctcacaccaagcccagcgtgttcgtgatgaagaacggcaccaacgtggcctgcctcgtgaaagagttctaccccaaggacatcaggatcaacctggtgtccagcaagaagatcaccgagttcgaccccgccatcgtgatctcccccagcggcaagtacaacgccgtgaagctggggaagtacgaggacagcaacagcgtgacctgctccgtgcagcacgacaacaagaccgtgcacagcaccgactttgaagtgaaaaccgactccaccgaccacgtgaagcccaaagagacagagaacaccaagcagcccagcaagagctgccacaagcccaaggccatcgtgcacaccgagaaagtgaacatgatgagcctgaccgtgctgggcttcagaatcctgctgctgaaagtggccggctttaacctgctgatgaccctgcggctgtggtccagctaa

SEQ ID NO: 33594 - DNA, 1869 bp, synthetic construct; identical to SEQ ID NO: 33591
  source 1..1869: mol_type = other DNA

SEQ ID NO: 33595 - DNA, 1881 bp, synthetic construct
  source 1..1881: mol_type = other DNA
atggccttaccagtgaccgccttgctcctgccgctggccttgctgctccacgccgccaggccgagctacgtgctgacacagcctccatccgtgtctgtggctccaggacagaccgccagaatcacatgcggcggcaacaacatcggcggcaagagcgtgcactggtatcagcagccacctggacaggctccagtggtggtggtgtacgacgacagcgatagacctagcggcatccccgagagattcagcggcagcaattccggcaataccgccacactgaccatcagcagagtggaagctggcgacgaggccgtgtactactgccaagtgtgggacagcagcagcgatcacgtggtgtttggcggcggaacaaagctgacagtgcttctcgagatccagaaccctgatcctgccgtgtaccagctgcgggatagcaagagcagcgacaagagcgtgtgtctgttcaccgacttcgacagccagaccaacgtgtcccagagcaaggactccgacgtgtacatcaccgataagtgcgtgctggacatgcggagcatggacttcaagagcaactccgccgtggcctggtccaacaagtccgatttcgcctgcgccaacgccttcaacaacagcattatccccgaggacacattcttcccaagccccgagagcagctgcggctttaccagcgagagctaccagcagggcgtgctgagcgccaccatcctgtacgagatcctgctgggcaaggccaccctgtacgccgtgctggtgtctgccctggtgctgatggctatggtcaagcggaaggacagccggggacgcgccaagagaagcggatctggcgtgaagcagaccctgaatttcgacctgctgaagctggctggcgacgtggaatccaacccaggccctactagtatggactggatttggcgcatccttttccttgtcggcgctgctaccggcgcgcattccttcgaacaactccagctgcaagagtctggccctggcctggtcaagcctagcgaaacactgagcctgacctgtaccgtgtctggcggctctatcagctccagcagctatttctggggctggatcagacaacctcctggcaaaggactggaatggatcggctccatctactacagcggcatcacctactacaaccccagcctgaagtccagagtgaccatctccgtggacaccagcaagaaccagttctccctgaagctgagcagcgtgacagccgccgataccgccgtgtattattgtgccagacatgacggcgctgtggccggcctgtttgattattggggacagggcaccctggtcaccgtgtcatctgctacgcgtgaggacctgaagaacgtgttcccacctgaggtggccgtgttcgagcctagcgaggccgagatcagccacacccagaaagccaccctcgtgtgcctggctaccggcttctaccccgaccatgtggaactgtcttggtgggtcaacggcaaagaggtgcacagcggcgtgtgtaccgacccccagccactgaaagaacagcccgccctgaacgacagccggtactgcctgagcagcagactgagagtgtccgccaccttctggcagaacccccggaaccacttcagatgccaggtgcagttctacggcctgagcgagaacgacgagtggacccaggacagagccaagcccgtgacccagatcgtgtctgccgaagcctggggcagagccgattgcgacgtgaagctggtggaaaagagcttcgagacagacaccaacctgaacttccagaacctgagcgtgatcggcttcagaatcctgctgctgaaagtggccggctttaacctgctgatgaccctgcggctgtggtccagc

SEQ ID NO: 33596 - DNA, 2274 bp, synthetic construct
  source 1..2274: mol_type = other DNA
atggccttaccagtgaccgccttgctcctgccgctggccttgctgctccacgccgccaggccggaagtgcagctggttgaatctggcggaggactggttcagcctggcggatctctgagactgtcttgtgccgccagcggcttcagcttcagcgacttttggatgagctgggtccgacaggcccctggcaaaggacttgaatgggtcgccacaatcagccaggccggcagcgagaaggactacgtggactctgtgaagggcagattcaccatcagccgggacaacgccaagaagtccctgtacctccagatgaacagcctgagagccgaggacaccgccgtgtactattgtgcctctggcgtgtacagcttcgactacagaggccagggcaccctggtcacagtctcttctggtaccggcggaggcggatctggcggcggaggtagcggtggcggaggatctgaattcagctacgtgctgacacagcctccatccgtgtctgtggctccaggacagaccgccagaatcacatgcggcggcaacaacatcggcggcaagagcgtgcactggtatcagcagccacctggacaggctccagtggtggtggtgtacgacgacagcgatagacctagcggcatccccgagagattcagcggcagcaattccggcaataccgccacactgaccatcagcagagtggaagctggcgacgaggccgtgtactactgccaagtgtgggacagcagcagcgatcacgtggtgtttggcggcggaacaaagctgacagtgcttctcgaggacctgaagaacgtgttcccacctgaggtggccgtgttcgagcctagcgaggccgagatcagccacacccagaaagccaccctcgtgtgcctggctaccggcttctaccccgaccatgtggaactgtcttggtgggtcaacggcaaagaggtgcacagcggcgtgtgtaccgacccccagccactgaaagaacagcccgccctgaacgacagccggtactgcctgagcagcagactgagagtgtccgccaccttctggcagaacccccggaaccacttcagatgccaggtgcagttctacggcctgagcgagaacgacgagtggacccaggacagagccaagcccgtgacccagatcgtgtctgccgaagcctggggcagagccgattgcgacgtgaagctggtggaaaagagcttcgagacagacaccaacctgaacttccagaacctgagcgtgatcggcttcagaatcctgctgctgaaagtggccggctttaacctgctgatgaccctgcggctgtggtccagcagggccaagcgatctggatctggagcaacaaacttctcactactcaaacaagcaggtgacgtggaggagaatcccgggcctactagtatggactggatttggcgcatccttttccttgtcggcgctgctaccggcgcgcattccttcgaacaactccagctgcaagagtctggccctggcctggtcaagcctagcgaaacactgagcctgacctgtaccgtgtctggcggctctatcagctccagcagctatttctggggctggatcagacaacctcctggcaaaggactggaatggatcggctccatctactacagcggcatcacctactacaaccccagcctgaagtccagagtgaccatctccgtggacaccagcaagaaccagttctccctgaagctgagcagcgtgacagccgccgataccgccgtgtattattgtgccagacatgacggcgctgtggccggcctgtttgattattggggacagggcaccctggtcaccgtgtcatctgctacgcgtatccagaaccctgatcctgccgtgtaccagctgcgggatagcaagagcagcgacaagagcgtgtgtctgttcaccgacttcgacagccagaccaacgtgtcccagagcaaggactccgacgtgtacatcaccgataagtgcgtgctggacatgcggagcatggacttcaagagcaactccgccgtggcctggtccaacaagtccgatttcgcctgcgccaacgccttcaacaacagcattatccccgaggacacattcttcccaagccccgagagcagctgcggctttaccagcgagagctaccagcagggcgtgctgagcgccaccatcctgtacgagatcctgctgggcaaggccaccctgtacgccgtgctggtgtctgccctggtgctgatggctatggtcaagcggaaggacagccgggga

SEQ ID NO: 33597 - DNA, 2286 bp, synthetic construct
  source 1..2286: mol_type = other DNA
atggccttaccagtgaccgccttgctcctgccgctggccttgctgctccacgccgccaggccggaagtgcagctggttgaatctggcggaggactggttcagcctggcggatctctgagactgtcttgtgccgccagcggcttcagcttcagcgacttttggatgagctgggtccgacaggcccctggcaaaggacttgaatgggtcgccacaatcagccaggccggcagcgagaaggactacgtggactctgtgaagggcagattcaccatcagccgggacaacgccaagaagtccctgtacctccagatgaacagcctgagagccgaggacaccgccgtgtactattgtgcctctggcgtgtacagcttcgactacagaggccagggcaccctggtcacagtctcttctggtaccggcggaggcggatctggcggcggaggtagcggtggcggaggatctgaattcagctacgtgctgacacagcctccatccgtgtctgtggctccaggacagaccgccagaatcacatgcggcggcaacaacatcggcggcaagagcgtgcactggtatcagcagccacctggacaggctccagtggtggtggtgtacgacgacagcgatagacctagcggcatccccgagagattcagcggcagcaattccggcaataccgccacactgaccatcagcagagtggaagctggcgacgaggccgtgtactactgccaagtgtgggacagcagcagcgatcacgtggtgtttggcggcggaacaaagctgacagtgcttctcgagatccagaaccctgatcctgccgtgtaccagctgcgggatagcaagagcagcgacaagagcgtgtgtctgttcaccgacttcgacagccagaccaacgtgtcccagagcaaggactccgacgtgtacatcaccgataagtgcgtgctggacatgcggagcatggacttcaagagcaactccgccgtggcctggtccaacaagtccgatttcgcctgcgccaacgccttcaacaacagcattatccccgaggacacattcttcccaagccccgagagcagctgcggctttaccagcgagagctaccagcagggcgtgctgagcgccaccatcctgtacgagatcctgctgggcaaggccaccctgtacgccgtgctggtgtctgccctggtgctgatggctatggtcaagcggaaggacagccggggacgcgccaagagaagcggatctggcgtgaagcagaccctgaatttcgacctgctgaagctggctggcgacgtggaatccaacccaggccctactagtatggactggatttggcgcatccttttccttgtcggcgctgctaccggcgcgcattccttcgaacaactccagctgcaagagtctggccctggcctggtcaagcctagcgaaacactgagcctgacctgtaccgtgtctggcggctctatcagctccagcagctatttctggggctggatcagacaacctcctggcaaaggactggaatggatcggctccatctactacagcggcatcacctactacaaccccagcctgaagtccagagtgaccatctccgtggacaccagcaagaaccagttctccctgaagctgagcagcgtgacagccgccgataccgccgtgtattattgtgccagacatgacggcgctgtggccggcctgtttgattattggggacagggcaccctggtcaccgtgtcatctgctacgcgtgaggacctgaagaacgtgttcccacctgaggtggccgtgttcgagcctagcgaggccgagatcagccacacccagaaagccaccctcgtgtgcctggctaccggcttctaccccgaccatgtggaactgtcttggtgggtcaacggcaaagaggtgcacagcggcgtgtgtaccgacccccagccactgaaagaacagcccgccctgaacgacagccggtactgcctgagcagcagactgagagtgtccgccaccttctggcagaacccccggaaccacttcagatgccaggtgcagttctacggcctgagcgagaacgacgagtggacccaggacagagccaagcccgtgacccagatcgtgtctgccgaagcctggggcagagccgattgcgacgtgaagctggtggaaaagagcttcgagacagacaccaacctgaacttccagaacctgagcgtgatcggcttcagaatcctgctgctgaaagtggccggctttaacctgctgatgaccctgcggctgtggtccagc

SEQ ID NO: 33598 - DNA, 2685 bp, synthetic construct
  source 1..2685: mol_type = other DNA
atggccttaccagtgaccgccttgctcctgccgctggccttgctgctccacgccgccaggccggaagtgcagctggttgaatctggcggaggactggttcagcctggcggatctctgagactgtcttgtgccgccagcggcttcagcttcagcgacttttggatgagctgggtccgacaggcccctggcaaaggacttgaatgggtcgccacaatcagccaggccggcagcgagaaggactacgtggactctgtgaagggcagattcaccatcagccgggacaacgccaagaagtccctgtacctccagatgaacagcctgagagccgaggacaccgccgtgtactattgtgcctctggcgtgtacagcttcgactacagaggccagggcaccctggtcacagtctcttctggtaccggcggaggcggatctggcggcggaggtagcggtggcggaggatctgaattcagctacgtgctgacacagcctccatccgtgtctgtggctccaggacagaccgccagaatcacatgcggcggcaacaacatcggcggcaagagcgtgcactggtatcagcagccacctggacaggctccagtggtggtggtgtacgacgacagcgatagacctagcggcatccccgagagattcagcggcagcaattccggcaataccgccacactgaccatcagcagagtggaagctggcgacgaggccgtgtactactgccaagtgtgggacagcagcagcgatcacgtggtgtttggcggcggaacaaagctgacagtgcttctcgaggacctgaagaacgtgttcccacctgaggtggccgtgttcgagcctagcgaggccgagatcagccacacccagaaagccaccctcgtgtgcctggctaccggcttctaccccgaccatgtggaactgtcttggtgggtcaacggcaaagaggtgcacagcggcgtgtgtaccgacccccagccactgaaagaacagcccgccctgaacgacagccggtactgcctgagcagcagactgagagtgtccgccaccttctggcagaacccccggaaccacttcagatgccaggtgcagttctacggcctgagcgagaacgacgagtggacccaggacagagccaagcccgtgacccagatcgtgtctgccgaagcctggggcagagccgattgcgacgtgaagctggtggaaaagagcttcgagacagacaccaacctgaacttccagaacctgagcgtgatcggcttcagaatcctgctgctgaaagtggccggctttaacctgctgatgaccctgcggctgtggtccagcagggccaagcgatctggatctggagcaacaaacttctcactactcaaacaagcaggtgacgtggaggagaatcccgggcctactagtatggactggatttggcgcatccttttccttgtcggcgctgctaccggcgcgcattccgggccccagctccagctgcaagagtctggacctggcctggtcaagcctagcgagacactgagcctgacctgtaccgtgtccggcgatagcatcagcagcggcgattactactggggctggatcagacagcctcctggcaaaggactggaatggatcggccacatctactacagcggcgtgacctactacaaccccagcctgaagtccagagtgaccatcagcgtggacaccagccggaaccagttctccctgaagctgtctagcgtgacagccgccgataccgccgtgtactactgcaccagagaggacagcagcaactggcggagtagaggccagggaacactggtcacagttagctctggatccggcggaggcggaagtggaggcggaggatctggcggcggaggctctttcgaacaactccagctgcaagagtctggccctggcctggtcaagcctagcgaaacactgagcctgacctgtaccgtgtctggcggctctatcagctccagcagctatttctggggctggatcagacaacctcctggcaaaggactggaatggatcggctccatctactacagcggcatcacctactacaaccccagcctgaagtccagagtgaccatctccgtggacaccagcaagaaccagttctccctgaagctgagcagcgtgacagccgccgataccgccgtgtattattgtgccagacatgacggcgctgtggccggcctgtttgattattggggacagggcaccctggtcaccgtgtcatctgctacgcgtatccagaaccctgatcctgccgtgtaccagctgcgggatagcaagagcagcgacaagagcgtgtgtctgttcaccgacttcgacagccagaccaacgtgtcccagagcaaggactccgacgtgtacatcaccgataagtgcgtgctggacatgcggagcatggacttcaagagcaactccgccgtggcctggtccaacaagtccgatttcgcctgcgccaacgccttcaacaacagcattatccccgaggacacattcttcccaagccccgagagcagctgcggctttaccagcgagagctaccagcagggcgtgctgagcgccaccatcctgtacgagatcctgctgggcaaggccaccctgtacgccgtgctggtgtctgccctggtgctgatggctatggtcaagcggaaggacagccgggga

SEQ ID NO: 33599 - DNA, 2697 bp, synthetic construct
  source 1..2697: mol_type = other DNA
atggccttaccagtgaccgccttgctcctgccgctggccttgctgctccacgccgccaggccggaagtgcagctggttgaatctggcggaggactggttcagcctggcggatctctgagactgtcttgtgccgccagcggcttcagcttcagcgacttttggatgagctgggtccgacaggcccctggcaaaggacttgaatgggtcgccacaatcagccaggccggcagcgagaaggactacgtggactctgtgaagggcagattcaccatcagccgggacaacgccaagaagtccctgtacctccagatgaacagcctgagagccgaggacaccgccgtgtactattgtgcctctggcgtgtacagcttcgactacagaggccagggcaccctggtcacagtctcttctggtaccggcggaggcggatctggcggcggaggtagcggtggcggaggatctgaattcagctacgtgctgacacagcctccatccgtgtctgtggctccaggacagaccgccagaatcacatgcggcggcaacaacatcggcggcaagagcgtgcactggtatcagcagccacctggacaggctccagtggtggtggtgtacgacgacagcgatagacctagcggcatccccgagagattcagcggcagcaattccggcaataccgccacactgaccatcagcagagtggaagctggcgacgaggccgtgtactactgccaagtgtgggacagcagcagcgatcacgtggtgtttggcggcggaacaaagctgacagtgcttctcgagatccagaaccctgatcctgccgtgtaccagctgcgggatagcaagagcagcgacaagagcgtgtgtctgttcaccgacttcgacagccagaccaacgtgtcccagagcaaggactccgacgtgtacatcaccgataagtgcgtgctggacatgcggagcatggacttcaagagcaactccgccgtggcctggtccaacaagtccgatttcgcctgcgccaacgccttcaacaacagcattatccccgaggacacattcttcccaagccccgagagcagctgcggctttaccagcgagagctaccagcagggcgtgctgagcgccaccatcctgtacgagatcctgctgggcaaggccaccctgtacgccgtgctggtgtctgccctggtgctgatggctatggtcaagcggaaggacagccggggacgcgccaagagaagcggatctggcgtgaagcagaccctgaatttcgacctgctgaagctggctggcgacgtggaatccaacccaggccctactagtatggactggatttggcgcatccttttccttgtcggcgctgctaccggcgcgcattccgggccccagctccagctgcaagagtctggacctggcctggtcaagcctagcgagacactgagcctgacctgtaccgtgtccggcgatagcatcagcagcggcgattactactggggctggatcagacagcctcctggcaaaggactggaatggatcggccacatctactacagcggcgtgacctactacaaccccagcctgaagtccagagtgaccatcagcgtggacaccagccggaaccagttctccctgaagctgtctagcgtgacagccgccgataccgccgtgtactactgcaccagagaggacagcagcaactggcggagtagaggccagggaacactggtcacagttagctctggatccggcggaggcggaagtggaggcggaggatctggcggcggaggctctttcgaacaactccagctgcaagagtctggccctggcctggtcaagcctagcgaaacactgagcctgacctgtaccgtgtctggcggctctatcagctccagcagctatttctggggctggatcagacaacctcctggcaaaggactggaatggatcggctccatctactacagcggcatcacctactacaaccccagcctgaagtccagagtgaccatctccgtggacaccagcaagaaccagttctccctgaagctgagcagcgtgacagccgccgataccgccgtgtattattgtgccagacatgacggcgctgtggccggcctgtttgattattggggacagggcaccctggtcaccgtgtcatctgctacgcgtgaggacctgaagaacgtgttcccacctgaggtggccgtgttcgagcctagcgaggccgagatcagccacacccagaaagccaccctcgtgtgcctggctaccggcttctaccccgaccatgtggaactgtcttggtgggtcaacggcaaagaggtgcacagcggcgtgtgtaccgacccccagccactgaaagaacagcccgccctgaacgacagccggtactgcctgagcagcagactgagagtgtccgccaccttctggcagaacccccggaaccacttcagatgccaggtgcagttctacggcctgagcgagaacgacgagtggacccaggacagagccaagcccgtgacccagatcgtgtctgccgaagcctggggcagagccgattgcgacgtgaagctggtggaaaagagcttcgagacagacaccaacctgaacttccagaacctgagcgtgatcggcttcagaatcctgctgctgaaagtggccggctttaacctgctgatgaccctgcggctgtggtccagc

SEQ ID NO: 33600 - DNA, 2079 bp, synthetic construct
  source 1..2079: mol_type = other DNA
atggccttaccagtgaccgccttgctcctgccgctggccttgctgctccacgccgccaggccgagctacgtgctgacacagcctccatccgtgtctgtggctccaggacagaccgccagaatcacatgcggcggcaacaacatcggcggcaagagcgtgcactggtatcagcagccacctggacaggctccagtggtggtggtgtacgacgacagcgatagacctagcggcatccccgagagattcagcggcagcaattccggcaataccgccacactgaccatcagcagagtggaagctggcgacgaggccgtgtactactgccaagtgtgggacagcagcagcgatcacgtggtgtttggcggcggaacaaagctgacagtgcttctcgaggacctgaagaacgtgttcccacctgaggtggccgtgttcgagcctagcgaggccgagatcagccacacccagaaagccaccctcgtgtgcctggctaccggcttctaccccgaccatgtggaactgtcttggtgggtcaacggcaaagaggtgcacagcggcgtgtgtaccgacccccagccactgaaagaacagcccgccctgaacgacagccggtactgcctgagcagcagactgagagtgtccgccaccttctggcagaacccccggaaccacttcagatgccaggtgcagttctacggcctgagcgagaacgacgagtggacccaggacagagccaagcccgtgacccagatcgtgtctgccgaagcctggggcagagccgattgcgacgtgaagctggtggaaaagagcttcgagacagacaccaacctgaacttccagaacctgagcgtgatcggcttcagaatcctgctgctgaaagtggccggctttaacctgctgatgaccctgcggctgtggtccagcagggccaagcgatctggatctggagcaacaaacttctcactactcaaacaagcaggtgacgtggaggagaatcccgggcctactagtatggactggatttggcgcatccttttccttgtcggcgctgctaccggcgcccattccgggcccatggaccccgacctggaaatcagagccgccttcctgcggcagagaaacacagccctgagaacagaggtggccgagctggaacaagaggtgcagcggctggaaaacgaggtgtcccagtacgagacaagatacggccctctcggaggcggaaaaggatccggcggcggaggatctggcggaggcggatctgggggcggaggctctttcgaacaactccagctgcaagagtctggccctggcctggtcaagcctagcgaaacactgagcctgacctgtaccgtgtctggcggctctatcagctccagcagctatttctggggctggatcagacaacctcctggcaaaggactggaatggatcggctccatctactacagcggcatcacctactacaaccccagcctgaagtccagagtgaccatctccgtggacaccagcaagaaccagttctccctgaagctgagcagcgtgacagccgccgataccgccgtgtattattgtgccagacatgacggcgctgtggccggcctgtttgattattggggacagggcaccctggtcaccgtgtcatctgctacgcgtatccagaaccctgatcctgccgtgtaccagctgcgggatagcaagagcagcgacaagagcgtgtgtctgttcaccgacttcgacagccagaccaacgtgtcccagagcaaggactccgacgtgtacatcaccgataagtgcgtgctggacatgcggagcatggacttcaagagcaactccgccgtggcctggtccaacaagtccgatttcgcctgcgccaacgccttcaacaacagcattatccccgaggacacattcttcccaagccccgagagcagctgcggctttaccagcgagagctaccagcagggcgtgctgagcgccaccatcctgtacgagatcctgctgggcaaggccaccctgtacgccgtgctggtgtctgccctggtgctgatggctatggtcaagcggaaggacagccgggga

SEQ ID NO: 33601 - DNA, 2091 bp, synthetic construct
  source 1..2091: mol_type = other DNA
atggccttaccagtgaccgccttgctcctgccgctggccttgctgctccacgccgccaggccgagctacgtgctgacacagcctccatccgtgtctgtggctccaggacagaccgccagaatcacatgcggcggcaacaacatcggcggcaagagcgtgcactggtatcagcagccacctggacaggctccagtggtggtggtgtacgacgacagcgatagacctagcggcatccccgagagattcagcggcagcaattccggcaataccgccacactgaccatcagcagagtggaagctggcgacgaggccgtgtactactgccaagtgtgggacagcagcagcgatcacgtggtgtttggcggcggaacaaagctgacagtgcttctcgagatccagaaccctgatcctgccgtgtaccagctgcgggatagcaagagcagcgacaagagcgtgtgtctgttcaccgacttcgacagccagaccaacgtgtcccagagcaaggactccgacgtgtacatcaccgataagtgcgtgctggacatgcggagcatggacttcaagagcaactccgccgtggcctggtccaacaagtccgatttcgcctgcgccaacgccttcaacaacagcattatccccgaggacacattcttcccaagccccgagagcagctgcggctttaccagcgagagctaccagcagggcgtgctgagcgccaccatcctgtacgagatcctgctgggcaaggccaccctgtacgccgtgctggtgtctgccctggtgctgatggctatggtcaagcggaaggacagccggggacgcgccaagagaagcggatctggcgtgaagcagaccctgaatttcgacctgctgaagctggctggcgacgtggaatccaacccaggccctactagtatggactggatttggcgcatccttttccttgtcggcgctgctaccggcgcccattccgggcccatggaccccgacctggaaatcagagccgccttcctgcggcagagaaacacagccctgagaacagaggtggccgagctggaacaagaggtgcagcggctggaaaacgaggtgtcccagtacgagacaagatacggccctctcggaggcggaaaaggatccggcggcggaggatctggcggaggcggatctgggggcggaggctctttcgaacaactccagctgcaagagtctggccctggcctggtcaagcctagcgaaacactgagcctgacctgtaccgtgtctggcggctctatcagctccagcagctatttctggggctggatcagacaacctcctggcaaaggactggaatggatcggctccatctactacagcggcatcacctactacaaccccagcctgaagtccagagtgaccatctccgtggacaccagcaagaaccagttctccctgaagctgagcagcgtgacagccgccgataccgccgtgtattattgtgccagacatgacggcgctgtggccggcctgtttgattattggggacagggcaccctggtcaccgtgtcatctgctacgcgtgaggacctgaagaacgtgttcccacctgaggtggccgtgttcgagcctagcgaggccgagatcagccacacccagaaagccaccctcgtgtgcctggctaccggcttctaccccgaccatgtggaactgtcttggtgggtcaacggcaaagaggtgcacagcggcgtgtgtaccgacccccagccactgaaagaacagcccgccctgaacgacagccggtactgcctgagcagcagactgagagtgtccgccaccttctggcagaacccccggaaccacttcagatgccaggtgcagttctacggcctgagcgagaacgacgagtggacccaggacagagccaagcccgtgacccagatcgtgtctgccgaagcctggggcagagccgattgcgacgtgaagctggtggaaaagagcttcgagacagacaccaacctgaacttccagaacctgagcgtgatcggcttcagaatcctgctgctgaaagtggccggctttaacctgctgatgaccctgcggctgtggtccagc

SEQ ID NO: 33602 - DNA, 2010 bp, synthetic construct
  source 1..2010: mol_type = other DNA
atggccttaccagtgaccgccttgctcctgccgctggccttgctgctccacgccgccaggccgagctacgtgctgacacagcctccatccgtgtctgtggctccaggacagaccgccagaatcacatgcggcggcaacaacatcggcggcaagagcgtgcactggtatcagcagccacctggacaggctccagtggtggtggtgtacgacgacagcgatagacctagcggcatccccgagagattcagcggcagcaattccggcaataccgccacactgaccatcagcagagtggaagctggcgacgaggccgtgtactactgccaagtgtgggacagcagcagcgatcacgtggtgtttggcggcggaacaaagctgacagtgcttctcgaggacctgaagaacgtgttcccacctgaggtggccgtgttcgagcctagcgaggccgagatcagccacacccagaaagccaccctcgtgtgcctggctaccggcttctaccccgaccatgtggaactgtcttggtgggtcaacggcaaagaggtgcacagcggcgtgtgtaccgacccccagccactgaaagaacagcccgccctgaacgacagccggtactgcctgagcagcagactgagagtgtccgccaccttctggcagaacccccggaaccacttcagatgccaggtgcagttctacggcctgagcgagaacgacgagtggacccaggacagagccaagcccgtgacccagatcgtgtctgccgaagcctggggcagagccgattgcgacgtgaagctggtggaaaagagcttcgagacagacaccaacctgaacttccagaacctgagcgtgatcggcttcagaatcctgctgctgaaagtggccggctttaacctgctgatgaccctgcggctgtggtccagcagggccaagcgatctggatctggagcaacaaacttctcactactcaaacaagcaggtgacgtggaggagaatcccgggcctactagtatggactggatttggcgcatccttttccttgtcggcgctgctaccggcgcccattccgggcccgaagttgctgccctcgagaaggaggtagcagctttggaaaaagaagtcgcagcccttgagaaagaagttgcggctctggagaagggatccggcggcggaggatctggcggaggcggatctgggggcggaggctctttcgaacaactccagctgcaagagtctggccctggcctggtcaagcctagcgaaacactgagcctgacctgtaccgtgtctggcggctctatcagctccagcagctatttctggggctggatcagacaacctcctggcaaaggactggaatggatcggctccatctactacagcggcatcacctactacaaccccagcctgaagtccagagtgaccatctccgtggacaccagcaagaaccagttctccctgaagctgagcagcgtgacagccgccgataccgccgtgtattattgtgccagacatgacggcgctgtggccggcctgtttgattattggggacagggcaccctggtcaccgtgtcatctgctacgcgtatccagaaccctgatcctgccgtgtaccagctgcgggatagcaagagcagcgacaagagcgtgtgtctgttcaccgacttcgacagccagaccaacgtgtcccagagcaaggactccgacgtgtacatcaccgataagtgcgtgctggacatgcggagcatggacttcaagagcaactccgccgtggcctggtccaacaagtccgatttcgcctgcgccaacgccttcaacaacagcattatccccgaggacacattcttcccaagccccgagagcagctgcggctttaccagcgagagctaccagcagggcgtgctgagcgccaccatcctgtacgagatcctgctgggcaaggccaccctgtacgccgtgctggtgtctgccctggtgctgatggctatggtcaagcggaaggacagccgggga

SEQ ID NO: 33603 - DNA, 2022 bp, synthetic construct
  source 1..2022: mol_type = other DNA
atggccttaccagtgaccgccttgctcctgccgctggccttgctgctccacgccgccaggccgagctacgtgctgacacagcctccatccgtgtctgtggctccaggacagaccgccagaatcacatgcggcggcaacaacatcggcggcaagagcgtgcactggtatcagcagccacctggacaggctccagtggtggtggtgtacgacgacagcgatagacctagcggcatccccgagagattcagcggcagcaattccggcaataccgccacactgaccatcagcagagtggaagctggcgacgaggccgtgtactactgccaagtgtgggacagcagcagcgatcacgtggtgtttggcggcggaacaaagctgacagtgcttctcgagatccagaaccctgatcctgccgtgtaccagctgcgggatagcaagagcagcgacaagagcgtgtgtctgttcaccgacttcgacagccagaccaacgtgtcccagagcaaggactccgacgtgtacatcaccgataagtgcgtgctggacatgcggagcatggacttcaagagcaactccgccgtggcctggtccaacaagtccgatttcgcctgcgccaacgccttcaacaacagcattatccccgaggacacattcttcccaagccccgagagcagctgcggctttaccagcgagagctaccagcagggcgtgctgagcgccaccatcctgtacgagatcctgctgggcaaggccaccctgtacgccgtgctggtgtctgccctggtgctgatggctatggtcaagcggaaggacagccggggacgcgccaagagaagcggatctggcgtgaagcagaccctgaatttcgacctgctgaagctggctggcgacgtggaatccaacccaggccctactagtatggactggatttggcgcatccttttccttgtcggcgctgctaccggcgcccattccgggcccgaagttgctgccctcgagaaggaggtagcagctttggaaaaagaagtcgcagcccttgagaaagaagttgcggctctggagaagggatccggcggcggaggatctggcggaggcggatctgggggcggaggctctttcgaacaactccagctgcaagagtctggccctggcctggtcaagcctagcgaaacactgagcctgacctgtaccgtgtctggcggctctatcagctccagcagctatttctggggctggatcagacaacctcctggcaaaggactggaatggatcggctccatctactacagcggcatcacctactacaaccccagcctgaagtccagagtgaccatctccgtggacaccagcaagaaccagttctccctgaagctgagcagcgtgacagccgccgataccgccgtgtattattgtgccagacatgacggcgctgtggccggcctgtttgattattggggacagggcaccctggtcaccgtgtcatctgctacgcgtgaggacctgaagaacgtgttcccacctgaggtggccgtgttcgagcctagcgaggccgagatcagccacacccagaaagccaccctcgtgtgcctggctaccggcttctaccccgaccatgtggaactgtcttggtgggtcaacggcaaagaggtgcacagcggcgtgtgtaccgacccccagccactgaaagaacagcccgccctgaacgacagccggtactgcctgagcagcagactgagagtgtccgccaccttctggcagaacccccggaaccacttcagatgccaggtgcagttctacggcctgagcgagaacgacgagtggacccaggacagagccaagcccgtgacccagatcgtgtctgccgaagcctggggcagagccgattgcgacgtgaagctggtggaaaagagcttcgagacagacaccaacctgaacttccagaacctgagcgtgatcggcttcagaatcctgctgctgaaagtggccggctttaacctgctgatgaccctgcggctgtggtccagc

SEQ ID NO: 33604 - DNA, 2280 bp, synthetic construct
  source 1..2280: mol_type = other DNA
atggccttaccagtgaccgccttgctcctgccgctggccttgctgctccacgccgccaggccgagctacgtgctgacacagcctccatccgtgtctgtggctccaggacagaccgccagaatcacatgcggcggcaacaacatcggcggcaagagcgtgcactggtatcagcagccacctggacaggctccagtggtggtggtgtacgacgacagcgatagacctagcggcatccccgagagattcagcggcagcaattccggcaataccgccacactgaccatcagcagagtggaagctggcgacgaggccgtgtactactgccaagtgtgggacagcagcagcgatcacgtggtgtttggcggcggaacaaagctgacagtgcttctcgaggacctgaagaacgtgttcccacctgaggtggccgtgttcgagcctagcgaggccgagatcagccacacccagaaagccaccctcgtgtgcctggctaccggcttctaccccgaccatgtggaactgtcttggtgggtcaacggcaaagaggtgcacagcggcgtgtgtaccgacccccagccactgaaagaacagcccgccctgaacgacagccggtactgcctgagcagcagactgagagtgtccgccaccttctggcagaacccccggaaccacttcagatgccaggtgcagttctacggcctgagcgagaacgacgagtggacccaggacagagccaagcccgtgacccagatcgtgtctgccgaagcctggggcagagccgattgcgacgtgaagctggtggaaaagagcttcgagacagacaccaacctgaacttccagaacctgagcgtgatcggcttcagaatcctgctgctgaaagtggccggctttaacctgctgatgaccctgcggctgtggtccagcagggccaagcgatctggatctggagcaacaaacttctcactactcaaacaagcaggtgacgtggaggagaatcccgggcctactagtatggactggatttggcgcatccttttccttgtcggcgctgctaccggcgcccattccgggccccaggttcagctgcaagagtctggcggaggacttgctcaagctggcggaagcctgagactgtcttgtgccgcctctggcagaaccttcagcatgggctggtttagacaggcccctggcaaagagagagagttcgtcgccgccatcacatacagcggcggcagcccttactacgcctcttctgtcagaggccggttcaccatcagccgggacaacgccaagaacaccgtgtacctccagatgaacagcctgaagccagaggacaccgccgtgtactactgtgccgccaatccaacctacggcagcgactggaatgccgagaattggggccagggcacccaagtgacagtgtctagtggatccggcggcggaggatctggcggaggcggatctgggggcggaggctctttcgaacaactccagctgcaagagtctggccctggcctggtcaagcctagcgaaacactgagcctgacctgtaccgtgtctggcggctctatcagctccagcagctatttctggggctggatcagacaacctcctggcaaaggactggaatggatcggctccatctactacagcggcatcacctactacaaccccagcctgaagtccagagtgaccatctccgtggacaccagcaagaaccagttctccctgaagctgagcagcgtgacagccgccgataccgccgtgtattattgtgccagacatgacggcgctgtggccggcctgtttgattattggggacagggcaccctggtcaccgtgtcatctgctacgcgtatccagaaccctgatcctgccgtgtaccagctgcgggatagcaagagcagcgacaagagcgtgtgtctgttcaccgacttcgacagccagaccaacgtgtcccagagcaaggactccgacgtgtacatcaccgataagtgcgtgctggacatgcggagcatggacttcaagagcaactccgccgtggcctggtccaacaagtccgatttcgcctgcgccaacgccttcaacaacagcattatccccgaggacacattcttcccaagccccgagagcagctgcggctttaccagcgagagctaccagcagggcgtgctgagcgccaccatcctgtacgagatcctgctgggcaaggccaccctgtacgccgtgctggtgtctgccctggtgctgatggctatggtcaagcggaaggacagccgggga

SEQ ID NO: 33605 - DNA, 2292 bp, synthetic construct
  source 1..2292: mol_type = other DNA
atggccttaccagtgaccgccttgctcctgccgctggccttgctgctccacgccgccaggccgagctacgtgctgacacagcctccatccgtgtctgtggctccaggacagaccgccagaatcacatgcggcggcaacaacatcggcggcaagagcgtgcactggtatcagcagccacctggacaggctccagtggtggtggtgtacgacgacagcgatagacctagcggcatccccgagagattcagcggcagcaattccggcaataccgccacactgaccatcagcagagtggaagctggcgacgaggccgtgtactactgccaagtgtgggacagcagcagcgatcacgtggtgtttggcggcggaacaaagctgacagtgcttctcgagatccagaaccctgatcctgccgtgtaccagctgcgggatagcaagagcagcgacaagagcgtgtgtctgttcaccgacttcgacagccagaccaacgtgtcccagagcaaggactccgacgtgtacatcaccgataagtgcgtgctggacatgcggagcatggacttcaagagcaactccgccgtggcctggtccaacaagtccgatttcgcctgcgccaacgccttcaacaacagcattatccccgaggacacattcttcccaagccccgagagcagctgcggctttaccagcgagagctaccagcagggcgtgctgagcgccaccatcctgtacgagatcctgctgggcaaggccaccctgtacgccgtgctggtgtctgccctggtgctgatggctatggtcaagcggaaggacagccggggacgcgccaagagaagcggatctggcgtgaagcagaccctgaatttcgacctgctgaagctggctggcgacgtggaatccaacccaggccctactagtatggactggatttggcgcatccttttccttgtcggcgctgctaccggcgcccattccgggccccaggttcagctgcaagagtctggcggaggacttgctcaagctggcggaagcctgagactgtcttgtgccgcctctggcagaaccttcagcatgggctggtttagacaggcccctggcaaagagagagagttcgtcgccgccatcacatacagcggcggcagcccttactacgcctcttctgtcagaggccggttcaccatcagccgggacaacgccaagaacaccgtgtacctccagatgaacagcctgaagccagaggacaccgccgtgtactactgtgccgccaatccaacctacggcagcgactggaatgccgagaattggggccagggcacccaagtgacagtgtctagtggatccggcggcggaggatctggcggaggcggatctgggggcggaggctctttcgaacaactccagctgcaagagtctggccctggcctggtcaagcctagcgaaacactgagcctgacctgtaccgtgtctggcggctctatcagctccagcagctatttctggggctggatcagacaacctcctggcaaaggactggaatggatcggctccatctactacagcggcatcacctactacaaccccagcctgaagtccagagtgaccatctccgtggacaccagcaagaaccagttctccctgaagctgagcagcgtgacagccgccgataccgccgtgtattattgtgccagacatgacggcgctgtggccggcctgtttgattattggggacagggcaccctggtcaccgtgtcatctgctacgcgtgaggacctgaagaacgtgttcccacctgaggtggccgtgttcgagcctagcgaggccgagatcagccacacccagaaagccaccctcgtgtgcctggctaccggcttctaccccgaccatgtggaactgtcttggtgggtcaacggcaaagaggtgcacagcggcgtgtgtaccgacccccagccactgaaagaacagcccgccctgaacgacagccggtactgcctgagcagcagactgagagtgtccgccaccttctggcagaacccccggaaccacttcagatgccaggtgcagttctacggcctgagcgagaacgacgagtggacccaggacagagccaagcccgtgacccagatcgtgtctgccgaagcctggggcagagccgattgcgacgtgaagctggtggaaaagagcttcgagacagacaccaacctgaacttccagaacctgagcgtgatcggcttcagaatcctgctgctgaaagtggccggctttaacctgctgatgaccctgcggctgtggtccagc

SEQ ID NO: 33606 - DNA, 2298 bp, synthetic construct
  source 1..2298: mol_type = other DNA
atggccttaccagtgaccgccttgctcctgccgctggccttgctgctccacgccgccaggccggaagtgcaactggtggaatctggaggctctctggtgcagccagggggaagcctgagactgtcttgtgccgcttccggcttcaccttcgacgactacgccatgagctgggtgcgccaggtgccaggcaaaggcctggaatgggtgtccagcatcaactggagcggcacccacaccgattacgccgactccgtgaaaggcagattcacaatcagcagaaacaacgccaacaataccctgtacctgcagatgaactccctgaagtctgaggatacagcagtgtattattgcgccaagaactggcgggacgccggcaccacttggtttgagaaaagcggctctgccggacagggaacccaagtgacagtgtcctccggtaccggcggaggcggatctggcggcggaggtagcggtggcggaggatctgaattcagctacgtgctgacacagcctccatccgtgtctgtggctccaggacagaccgccagaatcacatgcggcggcaacaacatcggcggcaagagcgtgcactggtatcagcagccacctggacaggctccagtggtggtggtgtacgacgacagcgatagacctagcggcatccccgagagattcagcggcagcaattccggcaataccgccacactgaccatcagcagagtggaagctggcgacgaggccgtgtactactgccaagtgtgggacagcagcagcgatcacgtggtgtttggcggcggaacaaagctgacagtgcttctcgaggacctgaagaacgtgttcccacctgaggtggccgtgttcgagcctagcgaggccgagatcagccacacccagaaagccaccctcgtgtgcctggctaccggcttctaccccgaccatgtggaactgtcttggtgggtcaacggcaaagaggtgcacagcggcgtgtgtaccgacccccagccactgaaagaacagcccgccctgaacgacagccggtactgcctgagcagcagactgagagtgtccgccaccttctggcagaacccccggaaccacttcagatgccaggtgcagttctacggcctgagcgagaacgacgagtggacccaggacagagccaagcccgtgacccagatcgtgtctgccgaagcctggggcagagccgattgcgacgtgaagctggtggaaaagagcttcgagacagacaccaacctgaacttccagaacctgagcgtgatcggcttcagaatcctgctgctgaaagtggccggctttaacctgctgatgaccctgcggctgtggtccagcagggccaagcgatctggatctggagcaacaaacttctcactactcaaacaagcaggtgacgtggaggagaatcccgggcctactagtatggactggatttggcgcatccttttccttgtcggcgctgctaccggcgcgcattccttcgaacaactccagctgcaagagtctggccctggcctggtcaagcctagcgaaacactgagcctgacctgtaccgtgtctggcggctctatcagctccagcagctatttctggggctggatcagacaacctcctggcaaaggactggaatggatcggctccatctactacagcggcatcacctactacaaccccagcctgaagtccagagtgaccatctccgtggacaccagcaagaaccagttctccctgaagctgagcagcgtgacagccgccgataccgccgtgtattattgtgccagacatgacggcgctgtggccggcctgtttgattattggggacagggcaccctggtcaccgtgtcatctgctacgcgtatccagaaccctgatcctgccgtgtaccagctgcgggatagcaagagcagcgacaagagcgtgtgtctgttcaccgacttcgacagccagaccaacgtgtcccagagcaaggactccgacgtgtacatcaccgataagtgcgtgctggacatgcggagcatggacttcaagagcaactccgccgtggcctggtccaacaagtccgatttcgcctgcgccaacgccttcaacaacagcattatccccgaggacacattcttcccaagccccgagagcagctgcggctttaccagcgagagctaccagcagggcgtgctgagcgccaccatcctgtacgagatcctgctgggcaaggccaccctgtacgccgtgctggtgtctgccctggtgctgatggctatggtcaagcggaaggacagccgggga

SEQ ID NO: 33607 - DNA, 2310 bp, synthetic construct
  source 1..2310: mol_type = other DNA
atggccttaccagtgaccgccttgctcctgccgctggccttgctgctccacgccgccaggccggaagtgcaactggtggaatctggaggctctctggtgcagccagggggaagcctgagactgtcttgtgccgcttccggcttcaccttcgacgactacgccatgagctgggtgcgccaggtgccaggcaaaggcctggaatgggtgtccagcatcaactggagcggcacccacaccgattacgccgactccgtgaaaggcagattcacaatcagcagaaacaacgccaacaataccctgtacctgcagatgaactccctgaagtctgaggatacagcagtgtattattgcgccaagaactggcgggacgccggcaccacttggtttgagaaaagcggctctgccggacagggaacccaagtgacagtgtcctccggtaccggcggaggcggatctggcggcggaggtagcggtggcggaggatctgaattcagctacgtgctgacacagcctccatccgtgtctgtggctccaggacagaccgccagaatcacatgcggcggcaacaacatcggcggcaagagcgtgcactggtatcagcagccacctggacaggctccagtggtggtggtgtacgacgacagcgatagacctagcggcatccccgagagattcagcggcagcaattccggcaataccgccacactgaccatcagcagagtggaagctggcgacgaggccgtgtactactgccaagtgtgggacagcagcagcgatcacgtggtgtttggcggcggaacaaagctgacagtgcttctcgagatccagaaccctgatcctgccgtgtaccagctgcgggatagcaagagcagcgacaagagcgtgtgtctgttcaccgacttcgacagccagaccaacgtgtcccagagcaaggactccgacgtgtacatcaccgataagtgcgtgctggacatgcggagcatggacttcaagagcaactccgccgtggcctggtccaacaagtccgatttcgcctgcgccaacgccttcaacaacagcattatccccgaggacacattcttcccaagccccgagagcagctgcggctttaccagcgagagctaccagcagggcgtgctgagcgccaccatcctgtacgagatcctgctgggcaaggccaccctgtacgccgtgctggtgtctgccctggtgctgatggctatggtcaagcggaaggacagccggggacgcgccaagagaagcggatctggcgtgaagcagaccctgaatttcgacctgctgaagctggctggcgacgtggaatccaacccaggccctactagtatggactggatttggcgcatccttttccttgtcggcgctgctaccggcgcgcattccttcgaacaactccagctgcaagagtctggccctggcctggtcaagcctagcgaaacactgagcctgacctgtaccgtgtctggcggctctatcagctccagcagctatttctggggctggatcagacaacctcctggcaaaggactggaatggatcggctccatctactacagcggcatcacctactacaaccccagcctgaagtccagagtgaccatctccgtggacaccagcaagaaccagttctccctgaagctgagcagcgtgacagccgccgataccgccgtgtattattgtgccagacatgacggcgctgtggccggcctgtttgattattggggacagggcaccctggtcaccgtgtcatctgctacgcgtgaggacctgaagaacgtgttcccacctgaggtggccgtgttcgagcctagcgaggccgagatcagccacacccagaaagccaccctcgtgtgcctggctaccggcttctaccccgaccatgtggaactgtcttggtgggtcaacggcaaagaggtgcacagcggcgtgtgtaccgacccccagccactgaaagaacagcccgccctgaacgacagccggtactgcctgagcagcagactgagagtgtccgccaccttctggcagaacccccggaaccacttcagatgccaggtgcagttctacggcctgagcgagaacgacgagtggacccaggacagagccaagcccgtgacccagatcgtgtctgccgaagcctggggcagagccgattgcgacgtgaagctggtggaaaagagcttcgagacagacaccaacctgaacttccagaacctgagcgtgatcggcttcagaatcctgctgctgaaagtggccggctttaacctgctgatgaccctgcggctgtggtccagc

SEQ ID NO: 33608 - DNA, 2292 bp, synthetic construct
  source 1..2292: mol_type = other DNA
atggccttaccagtgaccgccttgctcctgccgctggccttgctgctccacgccgccaggccggaagttcagctgcttgagtctggcggaggactggttcaacctggcggaagcctgagactgtcttgtgccgccagcggcttcatcttcagcagctacgccatgagctgggtccgacaggctcctggaaagggccaagaatgggtttccggcgttagcggcacaggcgtgaacacctactacgccgatagcgtgaagggcagattcaccatcagccgggacaacagcaagaacaccctgtacctccagatgaacagcctgagagccgaggacaccgccgtgtactattgtgcctctggcaaaggctgggacagcggctcttggtacgaggactatagaggccagggcaccctggtcacagtttcttcaggtaccggcggaggcggatctggcggcggaggtagcggtggcggaggatctgaattcagctacgtgctgacacagcctccatccgtgtctgtggctccaggacagaccgccagaatcacatgcggcggcaacaacatcggcggcaagagcgtgcactggtatcagcagccacctggacaggctccagtggtggtggtgtacgacgacagcgatagacctagcggcatccccgagagattcagcggcagcaattccggcaataccgccacactgaccatcagcagagtggaagctggcgacgaggccgtgtactactgccaagtgtgggacagcagcagcgatcacgtggtgtttggcggcggaacaaagctgacagtgcttctcgaggacctgaagaacgtgttcccacctgaggtggccgtgttcgagcctagcgaggccgagatcagccacacccagaaagccaccctcgtgtgcctggctaccggcttctaccccgaccatgtggaactgtcttggtgggtcaacggcaaagaggtgcacagcggcgtgtgtaccgacccccagccactgaaagaacagcccgccctgaacgacagccggtactgcctgagcagcagactgagagtgtccgccaccttctggcagaacccccggaaccacttcagatgccaggtgcagttctacggcctgagcgagaacgacgagtggacccaggacagagccaagcccgtgacccagatcgtgtctgccgaagcctggggcagagccgattgcgacgtgaagctggtggaaaagagcttcgagacagacaccaacctgaacttccagaacctgagcgtgatcggcttcagaatcctgctgctgaaagtggccggctttaacctgctgatgaccctgcggctgtggtccagcagggccaagcgatctggatctggagcaacaaacttctcactactcaaacaagcaggtgacgtggaggagaatcccgggcctactagtatggactggatttggcgcatccttttccttgtcggcgctgctaccggcgcgcattccttcgaacaactccagctgcaagagtctggccctggcctggtcaagcctagcgaaacactgagcctgacctgtaccgtgtctggcggctctatcagctccagcagctatttctggggctggatcagacaacctcctggcaaaggactggaatggatcggctccatctactacagcggcatcacctactacaaccccagcctgaagtccagagtgaccatctccgtggacaccagcaagaaccagttctccctgaagctgagcagcgtgacagccgccgataccgccgtgtattattgtgccagacatgacggcgctgtggccggcctgtttgattattggggacagggcaccctggtcaccgtgtcatctgctacgcgtatccagaaccctgatcctgccgtgtaccagctgcgggatagcaagagcagcgacaagagcgtgtgtctgttcaccgacttcgacagccagaccaacgtgtcccagagcaaggactccgacgtgtacatcaccgataagtgcgtgctggacatgcggagcatggacttcaagagcaactccgccgtggcctggtccaacaagtccgatttcgcctgcgccaacgccttcaacaacagcattatccccgaggacacattcttcccaagccccgagagcagctgcggctttaccagcgagagctaccagcagggcgtgctgagcgccaccatcctgtacgagatcctgctgggcaaggccaccctgtacgccgtgctggtgtctgccctggtgctgatggctatggtcaagcggaaggacagccgggga

SEQ ID NO: 33609 - DNA, 2304 bp, synthetic construct
  source 1..2304: mol_type = other DNA
atggccttaccagtgaccgccttgctcctgccgctggccttgctgctccacgccgccaggccggaagttcagctgcttgagtctggcggaggactggttcaacctggcggaagcctgagactgtcttgtgccgccagcggcttcatcttcagcagctacgccatgagctgggtccgacaggctcctggaaagggccaagaatgggtttccggcgttagcggcacaggcgtgaacacctactacgccgatagcgtgaagggcagattcaccatcagccgggacaacagcaagaacaccctgtacctccagatgaacagcctgagagccgaggacaccgccgtgtactattgtgcctctggcaaaggctgggacagcggctcttggtacgaggactatagaggccagggcaccctggtcacagtttcttcaggtaccggcggaggcggatctggcggcggaggtagcggtggcggaggatctgaattcagctacgtgctgacacagcctccatccgtgtctgtggctccaggacagaccgccagaatcacatgcggcggcaacaacatcggcggcaagagcgtgcactggtatcagcagccacctggacaggctccagtggtggtggtgtacgacgacagcgatagacctagcggcatccccgagagattcagcggcagcaattccggcaataccgccacactgaccatcagcagagtggaagctggcgacgaggccgtgtactactgccaagtgtgggacagcagcagcgatcacgtggtgtttggcggcggaacaaagctgacagtgcttctcgagatccagaaccctgatcctgccgtgtaccagctgcgggatagcaagagcagcgacaagagcgtgtgtctgttcaccgacttcgacagccagaccaacgtgtcccagagcaaggactccgacgtgtacatcaccgataagtgcgtgctggacatgcggagcatggacttcaagagcaactccgccgtggcctggtccaacaagtccgatttcgcctgcgccaacgccttcaacaacagcattatccccgaggacacattcttcccaagccccgagagcagctgcggctttaccagcgagagctaccagcagggcgtgctgagcgccaccatcctgtacgagatcctgctgggcaaggccaccctgtacgccgtgctggtgtctgccctggtgctgatggctatggtcaagcggaaggacagccggggacgcgccaagagaagcggatctggcgtgaagcagaccctgaatttcgacctgctgaagctggctggcgacgtggaatccaacccaggccctactagtatggactggatttggcgcatccttttccttgtcggcgctgctaccggcgcgcattccttcgaacaactccagctgcaagagtctggccctggcctggtcaagcctagcgaaacactgagcctgacctgtaccgtgtctggcggctctatcagctccagcagctatttctggggctggatcagacaacctcctggcaaaggactggaatggatcggctccatctactacagcggcatcacctactacaaccccagcctgaagtccagagtgaccatctccgtggacaccagcaagaaccagttctccctgaagctgagcagcgtgacagccgccgataccgccgtgtattattgtgccagacatgacggcgctgtggccggcctgtttgattattggggacagggcaccctggtcaccgtgtcatctgctacgcgtgaggacctgaagaacgtgttcccacctgaggtggccgtgttcgagcctagcgaggccgagatcagccacacccagaaagccaccctcgtgtgcctggctaccggcttctaccccgaccatgtggaactgtcttggtgggtcaacggcaaagaggtgcacagcggcgtgtgtaccgacccccagccactgaaagaacagcccgccctgaacgacagccggtactgcctgagcagcagactgagagtgtccgccaccttctggcagaacccccggaaccacttcagatgccaggtgcagttctacggcctgagcgagaacgacgagtggacccaggacagagccaagcccgtgacccagatcgtgtctgccgaagcctggggcagagccgattgcgacgtgaagctggtggaaaagagcttcgagacagacaccaacctgaacttccagaacctgagcgtgatcggcttcagaatcctgctgctgaaagtggccggctttaacctgctgatgaccctgcggctgtggtccagc

SEQ ID NO: 33610 - DNA, 2196 bp, synthetic construct
  source 1..2196: mol_type = other DNA
atggccttaccagtgaccgccttgctcctgccgctggccttgctgctccacgccgccaggccgatgctgcccgctcctaagaatctggtggtgtccagaatcaccgaggacagcgccagactgtcttggacagctcctgatgccgccttcgacagcttccccatccggtacatcgagacactgatctggggcgaagccatctggctggatgtgcctggaagcgagagaagctacgacctgaccggactgaagcctggcacagagtatgccgtggtcatcaccggcgtgaaaggcggcagattctctagccctctggtggcctctttcaccaccggtaccggcggaggcggatctggcggcggaggtagcggtggcggaggatctgaattcagctacgtgctgacacagcctccatccgtgtctgtggctccaggacagaccgccagaatcacatgcggcggcaacaacatcggcggcaagagcgtgcactggtatcagcagccacctggacaggctccagtggtggtggtgtacgacgacagcgatagacctagcggcatccccgagagattcagcggcagcaattccggcaataccgccacactgaccatcagcagagtggaagctggcgacgaggccgtgtactactgccaagtgtgggacagcagcagcgatcacgtggtgtttggcggcggaacaaagctgacagtgcttctcgaggacctgaagaacgtgttcccacctgaggtggccgtgttcgagcctagcgaggccgagatcagccacacccagaaagccaccctcgtgtgcctggctaccggcttctaccccgaccatgtggaactgtcttggtgggtcaacggcaaagaggtgcacagcggcgtgtgtaccgacccccagccactgaaagaacagcccgccctgaacgacagccggtactgcctgagcagcagactgagagtgtccgccaccttctggcagaacccccggaaccacttcagatgccaggtgcagttctacggcctgagcgagaacgacgagtggacccaggacagagccaagcccgtgacccagatcgtgtctgccgaagcctggggcagagccgattgcgacgtgaagctggtggaaaagagcttcgagacagacaccaacctgaacttccagaacctgagcgtgatcggcttcagaatcctgctgctgaaagtggccggctttaacctgctgatgaccctgcggctgtggtccagcagggccaagcgatctggatctggagcaacaaacttctcactactcaaacaagcaggtgacgtggaggagaatcccgggcctactagtatggactggatttggcgcatccttttccttgtcggcgctgctaccggcgcgcattccttcgaacaactccagctgcaagagtctggccctggcctggtcaagcctagcgaaacactgagcctgacctgtaccgtgtctggcggctctatcagctccagcagctatttctggggctggatcagacaacctcctggcaaaggactggaatggatcggctccatctactacagcggcatcacctactacaaccccagcctgaagtccagagtgaccatctccgtggacaccagcaagaaccagttctccctgaagctgagcagcgtgacagccgccgataccgccgtgtattattgtgccagacatgacggcgctgtggccggcctgtttgattattggggacagggcaccctggtcaccgtgtcatctgctacgcgtatccagaaccctgatcctgccgtgtaccagctgcgggatagcaagagcagcgacaagagcgtgtgtctgttcaccgacttcgacagccagaccaacgtgtcccagagcaaggactccgacgtgtacatcaccgataagtgcgtgctggacatgcggagcatggacttcaagagcaactccgccgtggcctggtccaacaagtccgatttcgcctgcgccaacgccttcaacaacagcattatccccgaggacacattcttcccaagccccgagagcagctgcggctttaccagcgagagctaccagcagggcgtgctgagcgccaccatcctgtacgagatcctgctgggcaaggccaccctgtacgccgtgctggtgtctgccctggtgctgatggctatggtcaagcggaaggacagccgggga

SEQ ID NO: 33611 - DNA, 2208 bp, synthetic construct
  source 1..2208: mol_type = other DNA
atggccttaccagtgaccgccttgctcctgccgctggccttgctgctccacgccgccaggccgatgctgcccgctcctaagaatctggtggtgtccagaatcaccgaggacagcgccagactgtcttggacagctcctgatgccgccttcgacagcttccccatccggtacatcgagacactgatctggggcgaagccatctggctggatgtgcctggaagcgagagaagctacgacctgaccggactgaagcctggcacagagtatgccgtggtcatcaccggcgtgaaaggcggcagattctctagccctctggtggcctctttcaccaccggtaccggcggaggcggatctggcggcggaggtagcggtggcggaggatctgaattcagctacgtgctgacacagcctccatccgtgtctgtggctccaggacagaccgccagaatcacatgcggcggcaacaacatcggcggcaagagcgtgcactggtatcagcagccacctggacaggctccagtggtggtggtgtacgacgacagcgatagacctagcggcatccccgagagattcagcggcagcaattccggcaataccgccacactgaccatcagcagagtggaagctggcgacgaggccgtgtactactgccaagtgtgggacagcagcagcgatcacgtggtgtttggcggcggaacaaagctgacagtgcttctcgagatccagaaccctgatcctgccgtgtaccagctgcgggatagcaagagcagcgacaagagcgtgtgtctgttcaccgacttcgacagccagaccaacgtgtcccagagcaaggactccgacgtgtacatcaccgataagtgcgtgctggacatgcggagcatggacttcaagagcaactccgccgtggcctggtccaacaagtccgatttcgcctgcgccaacgccttcaacaacagcattatccccgaggacacattcttcccaagccccgagagcagctgcggctttaccagcgagagctaccagcagggcgtgctgagcgccaccatcctgtacgagatcctgctgggcaaggccaccctgtacgccgtgctggtgtctgccctggtgctgatggctatggtcaagcggaaggacagccggggacgcgccaagagaagcggatctggcgtgaagcagaccctgaatttcgacctgctgaagctggctggcgacgtggaatccaacccaggccctactagtatggactggatttggcgcatccttttccttgtcggcgctgctaccggcgcgcattccttcgaacaactccagctgcaagagtctggccctggcctggtcaagcctagcgaaacactgagcctgacctgtaccgtgtctggcggctctatcagctccagcagctatttctggggctggatcagacaacctcctggcaaaggactggaatggatcggctccatctactacagcggcatcacctactacaaccccagcctgaagtccagagtgaccatctccgtggacaccagcaagaaccagttctccctgaagctgagcagcgtgacagccgccgataccgccgtgtattattgtgccagacatgacggcgctgtggccggcctgtttgattattggggacagggcaccctggtcaccgtgtcatctgctacgcgtgaggacctgaagaacgtgttcccacctgaggtggccgtgttcgagcctagcgaggccgagatcagccacacccagaaagccaccctcgtgtgcctggctaccggcttctaccccgaccatgtggaactgtcttggtgggtcaacggcaaagaggtgcacagcggcgtgtgtaccgacccccagccactgaaagaacagcccgccctgaacgacagccggtactgcctgagcagcagactgagagtgtccgccaccttctggcagaacccccggaaccacttcagatgccaggtgcagttctacggcctgagcgagaacgacgagtggacccaggacagagccaagcccgtgacccagatcgtgtctgccgaagcctggggcagagccgattgcgacgtgaagctggtggaaaagagcttcgagacagacaccaacctgaacttccagaacctgagcgtgatcggcttcagaatcctgctgctgaaagtggccggctttaacctgctgatgaccctgcggctgtggtccagc

SEQ ID NO: 33612 - DNA, 2283 bp, synthetic construct
  source 1..2283: mol_type = other DNA
atggccttaccagtgaccgccttgctcctgccgctggccttgctgctccacgccgccaggccggaggtgcagctggttgaatctggcggaggactggttcagcctggcggatctctgagactgtcttgtgccgccagcggcttcaacatcaaggatacctgtatcggctgggttcgcagagcccctggcaaagaggaagaactggtcgccaaaatctgcaagtacagcggccacaccagatacgccgacagcgtgaagggcagattcaccatcagcgccgacaccagcaagaacaccgcctacctccagatgaacagcctgagagccgaggacaccgccgtgtactattgtgccgctgtgtccgtcagagatgggcactacaattactggggccagggcaccaccgtgaccgtttcttcaggtaccggcggaggcggatctggcggcggaggtagcggtggcggaggatctgaattcagctacgtgctgacacagcctccatccgtgtctgtggctccaggacagaccgccagaatcacatgcggcggcaacaacatcggcggcaagagcgtgcactggtatcagcagccacctggacaggctccagtggtggtggtgtacgacgacagcgatagacctagcggcatccccgagagattcagcggcagcaattccggcaataccgccacactgaccatcagcagagtggaagctggcgacgaggccgtgtactactgccaagtgtgggacagcagcagcgatcacgtggtgtttggcggcggaacaaagctgacagtgcttctcgaggacctgaagaacgtgttcccacctgaggtggccgtgttcgagcctagcgaggccgagatcagccacacccagaaagccaccctcgtgtgcctggctaccggcttctaccccgaccatgtggaactgtcttggtgggtcaacggcaaagaggtgcacagcggcgtgtgtaccgacccccagccactgaaagaacagcccgccctgaacgacagccggtactgcctgagcagcagactgagagtgtccgccaccttctggcagaacccccggaaccacttcagatgccaggtgcagttctacggcctgagcgagaacgacgagtggacccaggacagagccaagcccgtgacccagatcgtgtctgccgaagcctggggcagagccgattgcgacgtgaagctggtggaaaagagcttcgagacagacaccaacctgaacttccagaacctgagcgtgatcggcttcagaatcctgctgctgaaagtggccggctttaacctgctgatgaccctgcggctgtggtccagcagggccaagcgatctggatctggagcaacaaacttctcactactcaaacaagcaggtgacgtggaggagaatcccgggcctactagtatggactggatttggcgcatccttttccttgtcggcgctgctaccggcgcgcattccttcgaacaactccagctgcaagagtctggccctggcctggtcaagcctagcgaaacactgagcctgacctgtaccgtgtctggcggctctatcagctccagcagctatttctggggctggatcagacaacctcctggcaaaggactggaatggatcggctccatctactacagcggcatcacctactacaaccccagcctgaagtccagagtgaccatctccgtggacaccagcaagaaccagttctccctgaagctgagcagcgtgacagccgccgataccgccgtgtattattgtgccagacatgacggcgctgtggccggcctgtttgattattggggacagggcaccctggtcaccgtgtcatctgctacgcgtatccagaaccctgatcctgccgtgtaccagctgcgggatagcaagagcagcgacaagagcgtgtgtctgttcaccgacttcgacagccagaccaacgtgtcccagagcaaggactccgacgtgtacatcaccgataagtgcgtgctggacatgcggagcatggacttcaagagcaactccgccgtggcctggtccaacaagtccgatttcgcctgcgccaacgccttcaacaacagcattatccccgaggacacattcttcccaagccccgagagcagctgcggctttaccagcgagagctaccagcagggcgtgctgagcgccaccatcctgtacgagatcctgctgggcaaggccaccctgtacgccgtgctggtgtctgccctggtgctgatggctatggtcaagcggaaggacagccgggga

SEQ ID NO: 33613 - DNA, 2295 bp, synthetic construct
  source 1..2295: mol_type = other DNA
atggccttaccagtgaccgccttgctcctgccgctggccttgctgctccacgccgccaggccggaggtgcagctggttgaatctggcggaggactggttcagcctggcggatctctgagactgtcttgtgccgccagcggcttcaacatcaaggatacctgtatcggctgggttcgcagagcccctggcaaagaggaagaactggtcgccaaaatctgcaagtacagcggccacaccagatacgccgacagcgtgaagggcagattcaccatcagcgccgacaccagcaagaacaccgcctacctccagatgaacagcctgagagccgaggacaccgccgtgtactattgtgccgctgtgtccgtcagagatgggcactacaattactggggccagggcaccaccgtgaccgtttcttcaggtaccggcggaggcggatctggcggcggaggtagcggtggcggaggatctgaattcagctacgtgctgacacagcctccatccgtgtctgtggctccaggacagaccgccagaatcacatgcggcggcaacaacatcggcggcaagagcgtgcactggtatcagcagccacctggacaggctccagtggtggtggtgtacgacgacagcgatagacctagcggcatccccgagagattcagcggcagcaattccggcaataccgccacactgaccatcagcagagtggaagctggcgacgaggccgtgtactactgccaagtgtgggacagcagcagcgatcacgtggtgtttggcggcggaacaaagctgacagtgcttctcgagatccagaaccctgatcctgccgtgtaccagctgcgggatagcaagagcagcgacaagagcgtgtgtctgttcaccgacttcgacagccagaccaacgtgtcccagagcaaggactccgacgtgtacatcaccgataagtgcgtgctggacatgcggagcatggacttcaagagcaactccgccgtggcctggtccaacaagtccgatttcgcctgcgccaacgccttcaacaacagcattatccccgaggacacattcttcccaagccccgagagcagctgcggctttaccagcgagagctaccagcagggcgtgctgagcgccaccatcctgtacgagatcctgctgggcaaggccaccctgtacgccgtgctggtgtctgccctggtgctgatggctatggtcaagcggaaggacagccggggacgcgccaagagaagcggatctggcgtgaagcagaccctgaatttcgacctgctgaagctggctggcgacgtggaatccaacccaggccctactagtatggactggatttggcgcatccttttccttgtcggcgctgctaccggcgcgcattccttcgaacaactccagctgcaagagtctggccctggcctggtcaagcctagcgaaacactgagcctgacctgtaccgtgtctggcggctctatcagctccagcagctatttctggggctggatcagacaacctcctggcaaaggactggaatggatcggctccatctactacagcggcatcacctactacaaccccagcctgaagtccagagtgaccatctccgtggacaccagcaagaaccagttctccctgaagctgagcagcgtgacagccgccgataccgccgtgtattattgtgccagacatgacggcgctgtggccggcctgtttgattattggggacagggcaccctggtcaccgtgtcatctgctacgcgtgaggacctgaagaacgtgttcccacctgaggtggccgtgttcgagcctagcgaggccgagatcagccacacccagaaagccaccctcgtgtgcctggctaccggcttctaccccgaccatgtggaactgtcttggtgggtcaacggcaaagaggtgcacagcggcgtgtgtaccgacccccagccactgaaagaacagcccgccctgaacgacagccggtactgcctgagcagcagactgagagtgtccgccaccttctggcagaacccccggaaccacttcagatgccaggtgcagttctacggcctgagcgagaacgacgagtggacccaggacagagccaagcccgtgacccagatcgtgtctgccgaagcctggggcagagccgattgcgacgtgaagctggtggaaaagagcttcgagacagacaccaacctgaacttccagaacctgagcgtgatcggcttcagaatcctgctgctgaaagtggccggctttaacctgctgatgaccctgcggctgtggtccagc

SEQ ID NO: 33614 - DNA, 3399 bp, synthetic construct
  source 1..3399: mol_type = other DNA
atggccttaccagtgaccgccttgctcctgccgctggccttgctgctccacgccgccaggccggaagtgcagctggttgaatctggcggaggactggttcaggctggcggatctctgagactgtcttgtgccgccagcggcagaacctttagcatgggctggtttagacaggcccctggcaaagagagagagttcgtcgccgccatcacatactctggcggcagcccttactacgccgactctgtgaagggcagattcaccatcagccgggacaacgccaagaacaccgtgtacctccagatgaacagcctgaagcctgaggacaccgccgtgtactactgcgccgccaatccaacatacggcagcgactggaacgccgagaattggggccagggaacccaagtgacagtgtctagcggtaccggcggaggcggatctggcggcggaggtagcggtggcggaggatctgaattcagctacgtgctgacacagcctccatccgtgtctgtggctccaggacagaccgccagaatcacatgcggcggcaacaacatcggcggcaagagcgtgcactggtatcagcagccacctggacaggctccagtggtggtggtgtacgacgacagcgatagacctagcggcatccccgagagattcagcggcagcaattccggcaataccgccacactgaccatcagcagagtggaagctggcgacgaggccgtgtactactgccaagtgtgggacagcagcagcgatcacgtggtgtttggcggcggaacaaagctgacagtgcttctcgaggacctgaagaacgtgttcccacctgaggtggccgtgttcgagcctagcgaggccgagatcagccacacccagaaagccaccctcgtgtgcctggctaccggcttctaccccgaccatgtggaactgtcttggtgggtcaacggcaaagaggtgcacagcggcgtgtgtaccgacccccagccactgaaagaacagcccgccctgaacgacagccggtactgcctgagcagcagactgagagtgtccgccaccttctggcagaacccccggaaccacttcagatgccaggtgcagttctacggcctgagcgagaacgacgagtggacccaggacagagccaagcccgtgacccagatcgtgtctgccgaagcctggggcagagccgattgcgacgtgaagctggtggaaaagagcttcgagacagacaccaacctgaacttccagaacctgagcgtgatcggcttcagaatcctgctgctgaaagtggccggctttaacctgctgatgaccctgcggctgtggtccagcagggccaagcgatctggatctggagcaacaaacttctcactactcaaacaagcaggtgacgtggaggagaatcccgggcctactagtgccaccatggactggatttggcgcatccttttccttgtcggcgctgctaccggcgcccattccgggcccgaagtgcaactggttgaatccggtggcggcctggtgcaagcaggcggatctctcagacttagctgtgccgcctccggcagaaccttcacaatgggatggtttaggcaggctccagggaaagagagagagttcgtcgccgccatctctctgtctcccacactggcctactacgccgactctgtgaaaggccggttcaccatctccagagataatgccaagaacaccgtggtgctgcaaatgaactctctgaaacccgaggatacagccctgtactattgtgccgctgaccggaagtccgtgatgagcatcagacccgattactggggacagggcacacaagtcacagtgtcctctggatccggcggcggaggatctggcggaggcggatctgggggcggaggctctttcgaacaactccagctgcaagagtctggccctggcctggtcaagcctagcgaaacactgagcctgacctgtaccgtgtctggcggctctatcagctccagcagctatttctggggctggatcagacaacctcctggcaaaggactggaatggatcggctccatctactacagcggcatcacctactacaaccccagcctgaagtccagagtgaccatctccgtggacaccagcaagaaccagttctccctgaagctgagcagcgtgacagccgccgataccgccgtgtattattgtgccagacatgacggcgctgtggccggcctgtttgattattggggacagggcaccctggtcaccgtgtcatctgctacgcgtatccagaaccctgatcctgccgtgtaccagctgcgggatagcaagagcagcgacaagagcgtgtgtctgttcaccgacttcgacagccagaccaacgtgtcccagagcaaggactccgacgtgtacatcaccgataagtgcgtgctggacatgcggagcatggacttcaagagcaactccgccgtggcctggtccaacaagtccgatttcgcctgcgccaacgccttcaacaacagcattatccccgaggacacattcttcccaagccccgagagcagctgcggctttaccagcgagagctaccagcagggcgtgctgagcgccaccatcctgtacgagatcctgctgggcaaggccaccctgtacgccgtgctggtgtctgccctggtgctgatggctatggtcaagcggaaggacagccggggacgcgccaagagaagcggatctggcgtgaagcagaccctgaatttcgacctgctgaagctggctggcgacgtggaatccaacccaggcccttctagaggccatatgaccgagtacaagcccacggtgcgcctcgccacccgcgacgacgtccccagggccgtacgcaccctcgccgccgcgttcgccgactaccccgccacgcgccacaccgtcgatccggaccgccacatcgagcgggtcaccgagctgcaagaactcttcctcacgcgcgtcgggctcgacatcggcaaggtgtgggtcgcggacgacggcgccgcggtggcggtctggaccacgccggagagcgtcgaagcgggggcggtgttcgccgagatcggcccgcgcatggccgagttgagcggttcccggctggccgcgcagcaacagatggaaggcctcctggcgccgcaccggcccaaggagcccgcgtggttcctggccaccgtcggcgtctcgcccgaccaccagggcaagggtctgggcagcgccgtcgtgctccccggagtggaggcggccgagcgcgccggggtgcccgccttcctggagacctccgcgccccgcaacctccccttctacgagcggctcggcttcaccgtcaccgccgacgtcgaggtgcccgaaggaccgcgcacctggtgcatgacccgcaagcccggtgcctga

SEQ ID NO: 33615 - DNA, 2313 bp, synthetic construct
  source 1..2313: mol_type = other DNA
atggccttaccagtgaccgccttgctcctgccgctggccttgctgctccacgccgccaggccggaagtgcagctggttgaatctggcggaggactggttcagcctggcggatctctgagactgtcttgtgccgcctctggcttcgccagcgactactatatcatcggctggttcagacaggcccctggcaaagagagagagggcgtcagctgtatcagcagcagatacgccaacaccaactacgccgacagcgtgaagggcagattcaccatcagccgggacaacgccaagaacaccgtgtacctccagatgaacagcctgaagcctgaggacaccgccgtgtactactgtgccgccgacaccagaagatacacctgtcctgacattgccaccatgcaccggaacttcgattcttggggccagggcacactggtcaccgtttcttctggtaccggcggaggcggatctggcggcggaggtagcggtggcggaggatctgaattcagctacgtgctgacacagcctccatccgtgtctgtggctccaggacagaccgccagaatcacatgcggcggcaacaacatcggcggcaagagcgtgcactggtatcagcagccacctggacaggctccagtggtggtggtgtacgacgacagcgatagacctagcggcatccccgagagattcagcggcagcaattccggcaataccgccacactgaccatcagcagagtggaagctggcgacgaggccgtgtactactgccaagtgtgggacagcagcagcgatcacgtggtgtttggcggcggaacaaagctgacagtgcttctcgaggacctgaagaacgtgttcccacctgaggtggccgtgttcgagcctagcgaggccgagatcagccacacccagaaagccaccctcgtgtgcctggctaccggcttctaccccgaccatgtggaactgtcttggtgggtcaacggcaaagaggtgcacagcggcgtgtgtaccgacccccagccactgaaagaacagcccgccctgaacgacagccggtactgcctgagcagcagactgagagtgtccgccaccttctggcagaacccccggaaccacttcagatgccaggtgcagttctacggcctgagcgagaacgacgagtggacccaggacagagccaagcccgtgacccagatcgtgtctgccgaagcctggggcagagccgattgcgacgtgaagctggtggaaaagagcttcgagacagacaccaacctgaacttccagaacctgagcgtgatcggcttcagaatcctgctgctgaaagtggccggctttaacctgctgatgaccctgcggctgtggtccagcagggccaagcgatctggatctggagcaacaaacttctcactactcaaacaagcaggtgacgtggaggagaatcccgggcctactagtatggactggatttggcgcatccttttccttgtcggcgctgctaccggcgcgcattccttcgaacaactccagctgcaagagtctggccctggcctggtcaagcctagcgaaacactgagcctgacctgtaccgtgtctggcggctctatcagctccagcagctatttctggggctggatcagacaacctcctggcaaaggactggaatggatcggctccatctactacagcggcatcacctactacaaccccagcctgaagtccagagtgaccatctccgtggacaccagcaagaaccagttctccctgaagctgagcagcgtgacagccgccgataccgccgtgtattattgtgccagacatgacggcgctgtggccggcctgtttgattattggggacagggcaccctggtcaccgtgtcatctgctacgcgtatccagaaccctgatcctgccgtgtaccagctgcgggatagcaagagcagcgacaagagcgtgtgtctgttcaccgacttcgacagccagaccaacgtgtcccagagcaaggactccgacgtgtacatcaccgataagtgcgtgctggacatgcggagcatggacttcaagagcaactccgccgtggcctggtccaacaagtccgatttcgcctgcgccaacgccttcaacaacagcattatccccgaggacacattcttcccaagccccgagagcagctgcggctttaccagcgagagctaccagcagggcgtgctgagcgccaccatcctgtacgagatcctgctgggcaaggccaccctgtacgccgtgctggtgtctgccctggtgctgatggctatggtcaagcggaaggacagccggggataa

SEQ ID NO: 33616 - DNA, 2313 bp, synthetic construct
  source 1..2313: mol_type = other DNA
atggccttaccagtgaccgccttgctcctgccgctggccttgctgctccacgccgccaggccggaagtgcagctggttgaatctggcggaggactggttcagcctggcggatctctgagactgagctgtgaagccagcggcttcgccagcgacgattacatcatcggctggttcagacaggcccctggcaaagagagagagggcgtcagctgcatcagctctaagtacgccaacaccgtgtacaccgacagcgtgaagggcagattcagactgagcagaggcaccgccaagaataccgtgtacctccagatgagcgccctgaagcctgaggataccgccgtgtactactgcgctatggacagccgcagagtgacatgccctgagatcagcaccatgcaccggaacttcgattcttggggccagggcacactggtcacagtgtcatctggtaccggcggaggcggatctggcggcggaggtagcggtggcggaggatctgaattcagctacgtgctgacacagcctccatccgtgtctgtggctccaggacagaccgccagaatcacatgcggcggcaacaacatcggcggcaagagcgtgcactggtatcagcagccacctggacaggctccagtggtggtggtgtacgacgacagcgatagacctagcggcatccccgagagattcagcggcagcaattccggcaataccgccacactgaccatcagcagagtggaagctggcgacgaggccgtgtactactgccaagtgtgggacagcagcagcgatcacgtggtgtttggcggcggaacaaagctgacagtgcttctcgaggacctgaagaacgtgttcccacctgaggtggccgtgttcgagcctagcgaggccgagatcagccacacccagaaagccaccctcgtgtgcctggctaccggcttctaccccgaccatgtggaactgtcttggtgggtcaacggcaaagaggtgcacagcggcgtgtgtaccgacccccagccactgaaagaacagcccgccctgaacgacagccggtactgcctgagcagcagactgagagtgtccgccaccttctggcagaacccccggaaccacttcagatgccaggtgcagttctacggcctgagcgagaacgacgagtggacccaggacagagccaagcccgtgacccagatcgtgtctgccgaagcctggggcagagccgattgcgacgtgaagctggtggaaaagagcttcgagacagacaccaacctgaacttccagaacctgagcgtgatcggcttcagaatcctgctgctgaaagtggccggctttaacctgctgatgaccctgcggctgtggtccagcagggccaagcgatctggatctggagcaacaaacttctcactactcaaacaagcaggtgacgtggaggagaatcccgggcctactagtatggactggatttggcgcatccttttccttgtcggcgctgctaccggcgcgcattccttcgaacaactccagctgcaagagtctggccctggcctggtcaagcctagcgaaacactgagcctgacctgtaccgtgtctggcggctctatcagctccagcagctatttctggggctggatcagacaacctcctggcaaaggactggaatggatcggctccatctactacagcggcatcacctactacaaccccagcctgaagtccagagtgaccatctccgtggacaccagcaagaaccagttctccctgaagctgagcagcgtgacagccgccgataccgccgtgtattattgtgccagacatgacggcgctgtggccggcctgtttgattattggggacagggcaccctggtcaccgtgtcatctgctacgcgtatccagaaccctgatcctgccgtgtaccagctgcgggatagcaagagcagcgacaagagcgtgtgtctgttcaccgacttcgacagccagaccaacgtgtcccagagcaaggactccgacgtgtacatcaccgataagtgcgtgctggacatgcggagcatggacttcaagagcaactccgccgtggcctggtccaacaagtccgatttcgcctgcgccaacgccttcaacaacagcattatccccgaggacacattcttcccaagccccgagagcagctgcggctttaccagcgagagctaccagcagggcgtgctgagcgccaccatcctgtacgagatcctgctgggcaaggccaccctgtacgccgtgctggtgtctgccctggtgctgatggctatggtcaagcggaaggacagccggggataa

SEQ ID NO: 33617 - DNA, 2310 bp, synthetic construct
  source 1..2310: mol_type = other DNA
atggccttaccagtgaccgccttgctcctgccgctggccttgctgctccacgccgccaggccggaagtgcagctggttgaatctggcggaggactggttcagcctggcggatctctgagactgtcttgtgccgcctctggcttcgccagcgactactatatcatcggctggttcagacaggcccctggcaaagagagagagggcgtcagctgtatcagcagcagatacgccaacaccaactacgccgacagcgtgaagggcagattcaccatcagccgggacaacgccaagaacaccgtgtacctccagatgaacagcctgaagcctgaggacaccgccgtgtactactgtgccgccgacaccagaagatacacctgtcctgacattgccaccatgcaccggaacttcgattcttggggccagggcacactggtcaccgtttcttctggtaccggcggaggcggatctggcggcggaggtagcggtggcggaggatctgaattcagctacgtgctgacacagcctccatccgtgtctgtggctccaggacagaccgccagaatcacatgcggcggcaacaacatcggcggcaagagcgtgcactggtatcagcagccacctggacaggctccagtggtggtggtgtacgacgacagcgatagacctagcggcatccccgagagattcagcggcagcaattccggcaataccgccacactgaccatcagcagagtggaagctggcgacgaggccgtgtactactgccaagtgtgggacagcagcagcgatcacgtggtgtttggcggcggaacaaagctgacagtgcttctcgagatccagaaccctgatcctgccgtgtaccagctgcgggatagcaagagcagcgacaagagcgtgtgtctgttcaccgacttcgacagccagaccaacgtgtcccagagcaaggactccgacgtgtacatcaccgataagtgcgtgctggacatgcggagcatggacttcaagagcaactccgccgtggcctggtccaacaagtccgatttcgcctgcgccaacgccttcaacaacagcattatccccgaggacacattcttcccaagccccgagagcagctgcggctttaccagcgagagctaccagcagggcgtgctgagcgccaccatcctgtacgagatcctgctgggcaaggccaccctgtacgccgtgctggtgtctgccctggtgctgatggctatggtcaagcggaaggacagccggggaagggccaagcgatctggatctggagcaacaaacttctcactactcaaacaagcaggtgacgtggaggagaatcccgggcctactagtatggactggatttggcgcatccttttccttgtcggcgctgctaccggcgcgcattccttcgaacaactccagctgcaagagtctggccctggcctggtcaagcctagcgaaacactgagcctgacctgtaccgtgtctggcggctctatcagctccagcagctatttctggggctggatcagacaacctcctggcaaaggactggaatggatcggctccatctactacagcggcatcacctactacaaccccagcctgaagtccagagtgaccatctccgtggacaccagcaagaaccagttctccctgaagctgagcagcgtgacagccgccgataccgccgtgtattattgtgccagacatgacggcgctgtggccggcctgtttgattattggggacagggcaccctggtcaccgtgtcatctgctacgcgtgacctgaagaacgtgttcccacctgaggtggccgtgttcgagcctagcgaggccgagatcagccacacccagaaagccaccctcgtgtgcctggctaccggcttctaccccgaccatgtggaactgtcttggtgggtcaacggcaaagaggtgcacagcggcgtgtgtaccgacccccagccactgaaagaacagcccgccctgaacgacagccggtactgcctgagcagcagactgagagtgtccgccaccttctggcagaacccccggaaccacttcagatgccaggtgcagttctacggcctgagcgagaacgacgagtggacccaggacagagccaagcccgtgacccagatcgtgtctgccgaagcctggggcagagccgattgcgacgtgaagctggtggaaaagagcttcgagacagacaccaacctgaacttccagaacctgagcgtgatcggcttcagaatcctgctgctgaaagtggccggctttaacctgctgatgaccctgcggctgtggtccagc

SEQ ID NO: 33618 - DNA, 2310 bp, synthetic construct
  source 1..2310: mol_type = other DNA
atggccttaccagtgaccgccttgctcctgccgctggccttgctgctccacgccgccaggccggaagtgcagctggttgaatctggcggaggactggttcagcctggcggatctctgagactgagctgtgaagccagcggcttcgccagcgacgattacatcatcggctggttcagacaggcccctggcaaagagagagagggcgtcagctgcatcagctctaagtacgccaacaccgtgtacaccgacagcgtgaagggcagattcagactgagcagaggcaccgccaagaataccgtgtacctccagatgagcgccctgaagcctgaggataccgccgtgtactactgcgctatggacagccgcagagtgacatgccctgagatcagcaccatgcaccggaacttcgattcttggggccagggcacactggtcacagtgtcatctggtaccggcggaggcggatctggcggcggaggtagcggtggcggaggatctgaattcagctacgtgctgacacagcctccatccgtgtctgtggctccaggacagaccgccagaatcacatgcggcggcaacaacatcggcggcaagagcgtgcactggtatcagcagccacctggacaggctccagtggtggtggtgtacgacgacagcgatagacctagcggcatccccgagagattcagcggcagcaattccggcaataccgccacactgaccatcagcagagtggaagctggcgacgaggccgtgtactactgccaagtgtgggacagcagcagcgatcacgtggtgtttggcggcggaacaaagctgacagtgcttctcgagatccagaaccctgatcctgccgtgtaccagctgcgggatagcaagagcagcgacaagagcgtgtgtctgttcaccgacttcgacagccagaccaacgtgtcccagagcaaggactccgacgtgtacatcaccgataagtgcgtgctggacatgcggagcatggacttcaagagcaactccgccgtggcctggtccaacaagtccgatttcgcctgcgccaacgccttcaacaacagcattatccccgaggacacattcttcccaagccccgagagcagctgcggctttaccagcgagagctaccagcagggcgtgctgagcgccaccatcctgtacgagatcctgctgggcaaggccaccctgtacgccgtgctggtgtctgccctggtgctgatggctatggtcaagcggaaggacagccggggaagggccaagcgatctggatctggagcaacaaacttctcactactcaaacaagcaggtgacgtggaggagaatcccgggcctactagtatggactggatttggcgcatccttttccttgtcggcgctgctaccggcgcgcattccttcgaacaactccagctgcaagagtctggccctggcctggtcaagcctagcgaaacactgagcctgacctgtaccgtgtctggcggctctatcagctccagcagctatttctggggctggatcagacaacctcctggcaaaggactggaatggatcggctccatctactacagcggcatcacctactacaaccccagcctgaagtccagagtgaccatctccgtggacaccagcaagaaccagttctccctgaagctgagcagcgtgacagccgccgataccgccgtgtattattgtgccagacatgacggcgctgtggccggcctgtttgattattggggacagggcaccctggtcaccgtgtcatctgctacgcgtgacctgaagaacgtgttcccacctgaggtggccgtgttcgagcctagcgaggccgagatcagccacacccagaaagccaccctcgtgtgcctggctaccggcttctaccccgaccatgtggaactgtcttggtgggtcaacggcaaagaggtgcacagcggcgtgtgtaccgacccccagccactgaaagaacagcccgccctgaacgacagccggtactgcctgagcagcagactgagagtgtccgccaccttctggcagaacccccggaaccacttcagatgccaggtgcagttctacggcctgagcgagaacgacgagtggacccaggacagagccaagcccgtgacccagatcgtgtctgccgaagcctggggcagagccgattgcgacgtgaagctggtggaaaagagcttcgagacagacaccaacctgaacttccagaacctgagcgtgatcggcttcagaatcctgctgctgaaagtggccggctttaacctgctgatgaccctgcggctgtggtccagc

SEQ ID NO: 33619 - DNA, 2283 bp, synthetic construct
  source 1..2283: mol_type = other DNA
atggccttaccagtgaccgccttgctcctgccgctggccttgctgctccacgccgccaggccgcaagtcaaactggaagaaagcggtggcggcctggtgcaacctggcgaatctctgagactgagctgtagcgccagcggctccatcttcaaggtgttcagagtgttcgccatgagctggtacaggcaaggccctggcaagcagagagagctggtcgcctctatcagcagcggcgagacaaccacatacgccgaatctgtgaaaggccggttcaccatcagccgggataatgccaagaataccgcctatctccagatggactccctgaagcctgaagatacagctgtgtactactgcaacgccgaccataccttcaccggcgatttttggggccagggaacccaagtgaccgtgtctagtggtaccggcggaggcggatctggcggcggaggtagcggtggcggaggatctgaattcagctacgtgctgacacagcctccatccgtgtctgtggctccaggacagaccgccagaatcacatgcggcggcaacaacatcggcggcaagagcgtgcactggtatcagcagccacctggacaggctccagtggtggtggtgtacgacgacagcgatagacctagcggcatccccgagagattcagcggcagcaattccggcaataccgccacactgaccatcagcagagtggaagctggcgacgaggccgtgtactactgccaagtgtgggacagcagcagcgatcacgtggtgtttggcggcggaacaaagctgacagtgcttctcgagatccagaaccctgatcctgccgtgtaccagctgcgggatagcaagagcagcgacaagagcgtgtgtctgttcaccgacttcgacagccagaccaacgtgtcccagagcaaggactccgacgtgtacatcaccgataagtgcgtgctggacatgcggagcatggacttcaagagcaactccgccgtggcctggtccaacaagtccgatttcgcctgcgccaacgccttcaacaacagcattatccccgaggacacattcttcccaagccccgagagcagctgcggctttaccagcgagagctaccagcagggcgtgctgagcgccaccatcctgtacgagatcctgctgggcaaggccaccctgtacgccgtgctggtgtctgccctggtgctgatggctatggtcaagcggaaggacagccggggaagggccaagcgatctggatctggagcaacaaacttctcactactcaaacaagcaggtgacgtggaggagaatcccgggcctactagtatggactggatttggcgcatccttttccttgtcggcgctgctaccggcgcgcattccttcgaacaactccagctgcaagagtctggccctggcctggtcaagcctagcgaaacactgagcctgacctgtaccgtgtctggcggctctatcagctccagcagctatttctggggctggatcagacaacctcctggcaaaggactggaatggatcggctccatctactacagcggcatcacctactacaaccccagcctgaagtccagagtgaccatctccgtggacaccagcaagaaccagttctccctgaagctgagcagcgtgacagccgccgataccgccgtgtattattgtgccagacatgacggcgctgtggccggcctgtttgattattggggacagggcaccctggtcaccgtgtcatctgctacgcgtgacctgaagaacgtgttcccacctgaggtggccgtgttcgagcctagcgaggccgagatcagccacacccagaaagccaccctcgtgtgcctggctaccggcttctaccccgaccatgtggaactgtcttggtgggtcaacggcaaagaggtgcacagcggcgtgtgtaccgacccccagccactgaaagaacagcccgccctgaacgacagccggtactgcctgagcagcagactgagagtgtccgccaccttctggcagaacccccggaaccacttcagatgccaggtgcagttctacggcctgagcgagaacgacgagtggacccaggacagagccaagcccgtgacccagatcgtgtctgccgaagcctggggcagagccgattgcgacgtgaagctggtggaaaagagcttcgagacagacaccaacctgaacttccagaacctgagcgtgatcggcttcagaatcctgctgctgaaagtggccggctttaacctgctgatgaccctgcggctgtggtccagc

SEQ ID NO: 33620 - DNA, 2289 bp, synthetic construct
  source 1..2289: mol_type = other DNA
atggccttaccagtgaccgccttgctcctgccgctggccttgctgctccacgccgccaggccgagctacgtgctgacacagcctccatccgtgtctgtggctccaggacagaccgccagaatcacatgcggcggcaacaacatcggcggcaagagcgtgcactggtatcagcagccacctggacaggctccagtggtggtggtgtacgacgacagcgatagacctagcggcatccccgagagattcagcggcagcaattccggcaataccgccacactgaccatcagcagagtggaagctggcgacgaggccgtgtactactgccaagtgtgggacagcagcagcgatcacgtggtgtttggcggcggaacaaagctgacagtgcttctcgaggacctgaagaacgtgttcccacctgaggtggccgtgttcgagcctagcgaggccgagatcagccacacccagaaagccaccctcgtgtgcctggctaccggcttctaccccgaccatgtggaactgtcttggtgggtcaacggcaaagaggtgcacagcggcgtgtgtaccgacccccagccactgaaagaacagcccgccctgaacgacagccggtactgcctgagcagcagactgagagtgtccgccaccttctggcagaacccccggaaccacttcagatgccaggtgcagttctacggcctgagcgagaacgacgagtggacccaggacagagccaagcccgtgacccagatcgtgtctgccgaagcctggggcagagccgattgcgacgtgaagctggtggaaaagagcttcgagacagacaccaacctgaacttccagaacctgagcgtgatcggcttcagaatcctgctgctgaaagtggccggctttaacctgctgatgaccctgcggctgtggtccagcagggccaagcgatctggatctggagcaacaaacttctcactactcaaacaagcaggtgacgtggaggagaatcccgggcctactagtgccaccatggactggatttggcgcatccttttccttgtcggcgctgctaccggcgcccattccgggcccgaagtgcagctggttgaatctggcggaggactggttcaggctggcggatctctgagactgtcttgtgccgccagcggcagaacctttagcatgggctggtttagacaggcccctggcaaagagagagagttcgtcgccgccatcacatactctggcggcagcccttactacgccgactctgtgaagggcagattcaccatcagccgggacaacgccaagaacaccgtgtacctccagatgaacagcctgaagcctgaggacaccgccgtgtactactgcgccgccaatccaacatacggcagcgactggaacgccgagaattggggccagggaacccaagtgacagtgtctagcggatccggcggcggaggatctggcggaggcggatctgggggcggaggctctttcgaacaactccagctgcaagagtctggccctggcctggtcaagcctagcgaaacactgagcctgacctgtaccgtgtctggcggctctatcagctccagcagctatttctggggctggatcagacaacctcctggcaaaggactggaatggatcggctccatctactacagcggcatcacctactacaaccccagcctgaagtccagagtgaccatctccgtggacaccagcaagaaccagttctccctgaagctgagcagcgtgacagccgccgataccgccgtgtattattgtgccagacatgacggcgctgtggccggcctgtttgattattggggacagggcaccctggtcaccgtgtcatctgctacgcgtatccagaaccctgatcctgccgtgtaccagctgcgggatagcaagagcagcgacaagagcgtgtgtctgttcaccgacttcgacagccagaccaacgtgtcccagagcaaggactccgacgtgtacatcaccgataagtgcgtgctggacatgcggagcatggacttcaagagcaactccgccgtggcctggtccaacaagtccgatttcgcctgcgccaacgccttcaacaacagcattatccccgaggacacattcttcccaagccccgagagcagctgcggctttaccagcgagagctaccagcagggcgtgctgagcgccaccatcctgtacgagatcctgctgggcaaggccaccctgtacgccgtgctggtgtctgccctggtgctgatggctatggtcaagcggaaggacagccggggataa

SEQ ID NO: 33621 - DNA, 2292 bp, synthetic construct
  source 1..2292: mol_type = other DNA
atggccttaccagtgaccgccttgctcctgccgctggccttgctgctccacgccgccaggccgagctacgtgctgacacagcctccatccgtgtctgtggctccaggacagaccgccagaatcacatgcggcggcaacaacatcggcggcaagagcgtgcactggtatcagcagccacctggacaggctccagtggtggtggtgtacgacgacagcgatagacctagcggcatccccgagagattcagcggcagcaattccggcaataccgccacactgaccatcagcagagtggaagctggcgacgaggccgtgtactactgccaagtgtgggacagcagcagcgatcacgtggtgtttggcggcggaacaaagctgacagtgcttctcgaggacctgaagaacgtgttcccacctgaggtggccgtgttcgagcctagcgaggccgagatcagccacacccagaaagccaccctcgtgtgcctggctaccggcttctaccccgaccatgtggaactgtcttggtgggtcaacggcaaagaggtgcacagcggcgtgtgtaccgacccccagccactgaaagaacagcccgccctgaacgacagccggtactgcctgagcagcagactgagagtgtccgccaccttctggcagaacccccggaaccacttcagatgccaggtgcagttctacggcctgagcgagaacgacgagtggacccaggacagagccaagcccgtgacccagatcgtgtctgccgaagcctggggcagagccgattgcgacgtgaagctggtggaaaagagcttcgagacagacaccaacctgaacttccagaacctgagcgtgatcggcttcagaatcctgctgctgaaagtggccggctttaacctgctgatgaccctgcggctgtggtccagcagggccaagcgatctggatctggagcaacaaacttctcactactcaaacaagcaggtgacgtggaggagaatcccgggcctactagtgccaccatggactggatttggcgcatccttttccttgtcggcgctgctaccggcgcccattccgggcccgaagtgcaactggtggaatctgggggcggactggtgcagccaggcggaagtctgaggctgtcttgtgccgcctccggcagcatcttcggcttcaacgacatggcctggtatcggcaggctcccggaaaacagcgcgagctggtggctctgattagcagagtgggcgtgaccagcagcgccgactctgtgaagggcagattcacaatctccagagtgaacgccaaggatacagtgtacctccagatgaactctctgaaacctgaggatacagcagtgtactattgctacatggaccagcggctggacggcagcacactggcctactggggacagggaactcaagtgacagtgtctagcggatccggcggcggaggatctggcggaggcggatctgggggcggaggctctttcgaacaactccagctgcaagagtctggccctggcctggtcaagcctagcgaaacactgagcctgacctgtaccgtgtctggcggctctatcagctccagcagctatttctggggctggatcagacaacctcctggcaaaggactggaatggatcggctccatctactacagcggcatcacctactacaaccccagcctgaagtccagagtgaccatctccgtggacaccagcaagaaccagttctccctgaagctgagcagcgtgacagccgccgataccgccgtgtattattgtgccagacatgacggcgctgtggccggcctgtttgattattggggacagggcaccctggtcaccgtgtcatctgctacgcgtatccagaaccctgatcctgccgtgtaccagctgcgggatagcaagagcagcgacaagagcgtgtgtctgttcaccgacttcgacagccagaccaacgtgtcccagagcaaggactccgacgtgtacatcaccgataagtgcgtgctggacatgcggagcatggacttcaagagcaactccgccgtggcctggtccaacaagtccgatttcgcctgcgccaacgccttcaacaacagcattatccccgaggacacattcttcccaagccccgagagcagctgcggctttaccagcgagagctaccagcagggcgtgctgagcgccaccatcctgtacgagatcctgctgggcaaggccaccctgtacgccgtgctggtgtctgccctggtgctgatggctatggtcaagcggaaggacagccggggataa

SEQ ID NO: 33622 - DNA, 2280 bp, synthetic construct
  source 1..2280: mol_type = other DNA
atggccttaccagtgaccgccttgctcctgccgctggccttgctgctccacgccgccaggccgagctacgtgctgacacagcctccatccgtgtctgtggctccaggacagaccgccagaatcacatgcggcggcaacaacatcggcggcaagagcgtgcactggtatcagcagccacctggacaggctccagtggtggtggtgtacgacgacagcgatagacctagcggcatccccgagagattcagcggcagcaattccggcaataccgccacactgaccatcagcagagtggaagctggcgacgaggccgtgtactactgccaagtgtgggacagcagcagcgatcacgtggtgtttggcggcggaacaaagctgacagtgcttctcgaggacctgaagaacgtgttcccacctgaggtggccgtgttcgagcctagcgaggccgagatcagccacacccagaaagccaccctcgtgtgcctggctaccggcttctaccccgaccatgtggaactgtcttggtgggtcaacggcaaagaggtgcacagcggcgtgtgtaccgacccccagccactgaaagaacagcccgccctgaacgacagccggtactgcctgagcagcagactgagagtgtccgccaccttctggcagaacccccggaaccacttcagatgccaggtgcagttctacggcctgagcgagaacgacgagtggacccaggacagagccaagcccgtgacccagatcgtgtctgccgaagcctggggcagagccgattgcgacgtgaagctggtggaaaagagcttcgagacagacaccaacctgaacttccagaacctgagcgtgatcggcttcagaatcctgctgctgaaagtggccggctttaacctgctgatgaccctgcggctgtggtccagcagggccaagcgatctggatctggagcaacaaacttctcactactcaaacaagcaggtgacgtggaggagaatcccgggcctactagtgccaccatggactggatttggcgcatccttttccttgtcggcgctgctaccggcgcccattccgggcccgaggtgcagctggttgaatctggcggaggactggttcaggctggcggatctctgagactgtcttgtgccgccagcggctctgtgttcagcggcaatgtgatgggctggtacagacaggcccctggcaaagaaagagagtgggttgccgccattgccagcggcggcagcatctactacagagactctgtgaagggcagattcaccatcagccgggacaacgccaagaacaccgtgtacctccagatgaacagcctgaagcctgaggacaccgccgtgtactactgcaactctcaccctcctacactgccctattggggcctgggaacccaagtgacagtgtcctctggatccggcggcggaggatctggcggaggcggatctgggggcggaggctctttcgaacaactccagctgcaagagtctggccctggcctggtcaagcctagcgaaacactgagcctgacctgtaccgtgtctggcggctctatcagctccagcagctatttctggggctggatcagacaacctcctggcaaaggactggaatggatcggctccatctactacagcggcatcacctactacaaccccagcctgaagtccagagtgaccatctccgtggacaccagcaagaaccagttctccctgaagctgagcagcgtgacagccgccgataccgccgtgtattattgtgccagacatgacggcgctgtggccggcctgtttgattattggggacagggcaccctggtcaccgtgtcatctgctacgcgtatccagaaccctgatcctgccgtgtaccagctgcgggatagcaagagcagcgacaagagcgtgtgtctgttcaccgacttcgacagccagaccaacgtgtcccagagcaaggactccgacgtgtacatcaccgataagtgcgtgctggacatgcggagcatggacttcaagagcaactccgccgtggcctggtccaacaagtccgatttcgcctgcgccaacgccttcaacaacagcattatccccgaggacacattcttcccaagccccgagagcagctgcggctttaccagcgagagctaccagcagggcgtgctgagcgccaccatcctgtacgagatcctgctgggcaaggccaccctgtacgccgtgctggtgtctgccctggtgctgatggctatggtcaagcggaaggacagccggggataa

SEQ ID NO: 33623 - DNA, 2274 bp, synthetic construct
  source 1..2274: mol_type = other DNA
atggccttaccagtgaccgccttgctcctgccgctggccttgctgctccacgccgccaggccgagctacgtgctgacacagcctccatccgtgtctgtggctccaggacagaccgccagaatcacatgcggcggcaacaacatcggcggcaagagcgtgcactggtatcagcagccacctggacaggctccagtggtggtggtgtacgacgacagcgatagacctagcggcatccccgagagattcagcggcagcaattccggcaataccgccacactgaccatcagcagagtggaagctggcgacgaggccgtgtactactgccaagtgtgggacagcagcagcgatcacgtggtgtttggcggcggaacaaagctgacagtgcttctcgaggacctgaagaacgtgttcccacctgaggtggccgtgttcgagcctagcgaggccgagatcagccacacccagaaagccaccctcgtgtgcctggctaccggcttctaccccgaccatgtggaactgtcttggtgggtcaacggcaaagaggtgcacagcggcgtgtgtaccgacccccagccactgaaagaacagcccgccctgaacgacagccggtactgcctgagcagcagactgagagtgtccgccaccttctggcagaacccccggaaccacttcagatgccaggtgcagttctacggcctgagcgagaacgacgagtggacccaggacagagccaagcccgtgacccagatcgtgtctgccgaagcctggggcagagccgattgcgacgtgaagctggtggaaaagagcttcgagacagacaccaacctgaacttccagaacctgagcgtgatcggcttcagaatcctgctgctgaaagtggccggctttaacctgctgatgaccctgcggctgtggtccagcagggccaagcgatctggatctggagcaacaaacttctcactactcaaacaagcaggtgacgtggaggagaatcccgggcctactagtgccaccatggactggatttggcgcatccttttccttgtcggcgctgctaccggcgcccattccgggcccgaagttcagctgctggaatctggcggaggactcgttcaacctggcggctctctgagactgagctgtgccgcttctggcttcagcttctctagctacgccctgagctgggttcgacaagctcccggaaagggccttgaatgggtgtccagcatcggcgagaatgacggcaccacagactatgccgatgccgtgaaaggccggtttaccatcagcagagacaattccaagaacacgctctatctgcaaatgaactccctgcgcgtggaagatacagccgtgtattattgcgtgaaggacggcatccactggggacagggaaccctggttacagtgtctagcggatccggcggcggaggatctggcggaggcggatctgggggcggaggctctttcgaacaactccagctgcaagagtctggccctggcctggtcaagcctagcgaaacactgagcctgacctgtaccgtgtctggcggctctatcagctccagcagctatttctggggctggatcagacaacctcctggcaaaggactggaatggatcggctccatctactacagcggcatcacctactacaaccccagcctgaagtccagagtgaccatctccgtggacaccagcaagaaccagttctccctgaagctgagcagcgtgacagccgccgataccgccgtgtattattgtgccagacatgacggcgctgtggccggcctgtttgattattggggacagggcaccctggtcaccgtgtcatctgctacgcgtatccagaaccctgatcctgccgtgtaccagctgcgggatagcaagagcagcgacaagagcgtgtgtctgttcaccgacttcgacagccagaccaacgtgtcccagagcaaggactccgacgtgtacatcaccgataagtgcgtgctggacatgcggagcatggacttcaagagcaactccgccgtggcctggtccaacaagtccgatttcgcctgcgccaacgccttcaacaacagcattatccccgaggacacattcttcccaagccccgagagcagctgcggctttaccagcgagagctaccagcagggcgtgctgagcgccaccatcctgtacgagatcctgctgggcaaggccaccctgtacgccgtgctggtgtctgccctggtgctgatggctatggtcaagcggaaggacagccggggataa

SEQ ID NO: 33624 - DNA, 3381 bp, synthetic construct
  source 1..3381: mol_type = other DNA
atgggacccagactgctgttttgggctctgctgtgtctgctcggcacaggacctgttgaagctggcgtgacacagagccccacacacctgattaagaccagaggccagcaggccacactgagatgcagccctatcagcggccacaccagcgtgtactggtatcagcaggctctcggactgggcctccagttcctgctttggtacgacgagggcgaagagagaaaccggggcaacttccctcctcggttttccggcagacagttccccaactacagcagcgagctgaacgtgaacgccctggaactggaagatagcgccctgtacctgtgtgcctcttctcttggtggacctcgcggactggctggactgagaggggatgagcagtttttcggccctggcaccagactgaccgtgctggaaggtaccggcggaggcggatctggcggcggagaattcagctacgtgctgacacagcctccatccgtgtctgtggctccaggacagaccgccagaatcacatgcggcggcaacaacatcggcggcaagagcgtgcactggtatcagcagccacctggacaggctccagtggtggtggtgtacgacgacagcgatagacctagcggcatccccgagagattcagcggcagcaattccggcaataccgccacactgaccatcagcagagtggaagctggcgacgaggccgtgtactactgccaagtgtgggacagcagcagcgatcacgtggtgtttggcggcggaacaaagctgacagtgcttctcgaggacctgaagaacgtgttcccacctgaggtggccgtgttcgagcctagcgaggccgagatcagccacacccagaaagccaccctcgtgtgcctggctaccggcttctaccccgaccatgtggaactgtcttggtgggtcaacggcaaagaggtgcacagcggcgtgtgtaccgacccccagccactgaaagaacagcccgccctgaacgacagccggtactgcctgagcagcagactgagagtgtccgccaccttctggcagaacccccggaaccacttcagatgccaggtgcagttctacggcctgagcgagaacgacgagtggacccaggacagagccaagcccgtgacccagatcgtgtctgccgaagcctggggcagagccgattgcgacgtgaagctggtggaaaagagcttcgagacagacaccaacctgaacttccagaacctgagcgtgatcggcttcagaatcctgctgctgaaagtggccggctttaacctgctgatgaccctgcggctgtggtccagcagggccaagcgatctggatctggagcaacaaacttctcactactcaaacaagcaggtgacgtggaggagaatcccgggcctactagtgccaccatggactggatttggcgcatccttttccttgtcggcgctgctaccggcgcccattccgggcccgaagtgcagctggttgaatctggcggaggactggttcaggctggcggatctctgagactgtcttgtgccgccagcggcagaacctttagcatgggctggtttagacaggcccctggcaaagagagagagttcgtcgccgccatcacatactctggcggcagcccttactacgccgactctgtgaagggcagattcaccatcagccgggacaacgccaagaacaccgtgtacctccagatgaacagcctgaagcctgaggacaccgccgtgtactactgcgccgccaatccaacatacggcagcgactggaacgccgagaattggggccagggaacccaagtgacagtgtctagcggatccggcggcggaggatctggcggaggcggatctgggggcggaggctctttcgaacaactccagctgcaagagtctggccctggcctggtcaagcctagcgaaacactgagcctgacctgtaccgtgtctggcggctctatcagctccagcagctatttctggggctggatcagacaacctcctggcaaaggactggaatggatcggctccatctactacagcggcatcacctactacaaccccagcctgaagtccagagtgaccatctccgtggacaccagcaagaaccagttctccctgaagctgagcagcgtgacagccgccgataccgccgtgtattattgtgccagacatgacggcgctgtggccggcctgtttgattattggggacagggcaccctggtcaccgtgtcatctgctacgcgtatccagaaccctgatcctgccgtgtaccagctgcgggatagcaagagcagcgacaagagcgtgtgtctgttcaccgacttcgacagccagaccaacgtgtcccagagcaaggactccgacgtgtacatcaccgataagtgcgtgctggacatgcggagcatggacttcaagagcaactccgccgtggcctggtccaacaagtccgatttcgcctgcgccaacgccttcaacaacagcattatccccgaggacacattcttcccaagccccgagagcagctgcggctttaccagcgagagctaccagcagggcgtgctgagcgccaccatcctgtacgagatcctgctgggcaaggccaccctgtacgccgtgctggtgtctgccctggtgctgatggctatggtcaagcggaaggacagccggggacgcgccaagagaagcggatctggcgtgaagcagaccctgaatttcgacctgctgaagctggctggcgacgtggaatccaacccaggcccttctagaggccatatgaccgagtacaagcccacggtgcgcctcgccacccgcgacgacgtccccagggccgtacgcaccctcgccgccgcgttcgccgactaccccgccacgcgccacaccgtcgatccggaccgccacatcgagcgggtcaccgagctgcaagaactcttcctcacgcgcgtcgggctcgacatcggcaaggtgtgggtcgcggacgacggcgccgcggtggcggtctggaccacgccggagagcgtcgaagcgggggcggtgttcgccgagatcggcccgcgcatggccgagttgagcggttcccggctggccgcgcagcaacagatggaaggcctcctggcgccgcaccggcccaaggagcccgcgtggttcctggccaccgtcggcgtctcgcccgaccaccagggcaagggtctgggcagcgccgtcgtgctccccggagtggaggcggccgagcgcgccggggtgcccgccttcctggagacctccgcgccccgcaacctccccttctacgagcggctcggcttcaccgtcaccgccgacgtcgaggtgcccgaaggaccgcgcacctggtgcatgacccgcaagcccggtgcctga

SEQ ID NO: 33625 - DNA, 3378 bp, synthetic construct
  source 1..3378: mol_type = other DNA
atgggacccagactgctgttttgggctctgctgtgtctgctcggcacaggacctgttgaagctggcgtgacacagagccccacacacctgattaagaccagaggccagcaggccacactgagatgcagccctatcagcggccacaccagcgtgtactggtatcagcaggctctcggactgggcctccagttcctgctttggtacgacgagggcgaagagagaaaccggggcaacttccctcctcggttttccggcagacagttccccaactacagcagcgagctgaacgtgaacgccctggaactggaagatagcgccctgtacctgtgtgccagctctctcggcggagatgaactgggagccgatggcaacgagcagttctttggccctggcaccagactgaccgtgctggaaggtaccggcggaggcggatctggcggcggaagcgaattcagctacgtgctgacacagcctccatccgtgtctgtggctccaggacagaccgccagaatcacatgcggcggcaacaacatcggcggcaagagcgtgcactggtatcagcagccacctggacaggctccagtggtggtggtgtacgacgacagcgatagacctagcggcatccccgagagattcagcggcagcaattccggcaataccgccacactgaccatcagcagagtggaagctggcgacgaggccgtgtactactgccaagtgtgggacagcagcagcgatcacgtggtgtttggcggcggaacaaagctgacagtgcttctcgaggacctgaagaacgtgttcccacctgaggtggccgtgttcgagcctagcgaggccgagatcagccacacccagaaagccaccctcgtgtgcctggctaccggcttctaccccgaccatgtggaactgtcttggtgggtcaacggcaaagaggtgcacagcggcgtgtgtaccgacccccagccactgaaagaacagcccgccctgaacgacagccggtactgcctgagcagcagactgagagtgtccgccaccttctggcagaacccccggaaccacttcagatgccaggtgcagttctacggcctgagcgagaacgacgagtggacccaggacagagccaagcccgtgacccagatcgtgtctgccgaagcctggggcagagccgattgcgacgtgaagctggtggaaaagagcttcgagacagacaccaacctgaacttccagaacctgagcgtgatcggcttcagaatcctgctgctgaaagtggccggctttaacctgctgatgaccctgcggctgtggtccagcagggccaagcgatctggatctggagcaacaaacttctcactactcaaacaagcaggtgacgtggaggagaatcccgggcctactagtgccaccatggactggatttggcgcatccttttccttgtcggcgctgctaccggcgcccattccgggcccgaagtgcagctggttgaatctggcggaggactggttcaggctggcggatctctgagactgtcttgtgccgccagcggcagaacctttagcatgggctggtttagacaggcccctggcaaagagagagagttcgtcgccgccatcacatactctggcggcagcccttactacgccgactctgtgaagggcagattcaccatcagccgggacaacgccaagaacaccgtgtacctccagatgaacagcctgaagcctgaggacaccgccgtgtactactgcgccgccaatccaacatacggcagcgactggaacgccgagaattggggccagggaacccaagtgacagtgtctagcggatccggcggcggaggatctggcggaggcggatctgggggcggaggctctttcgaacaactccagctgcaagagtctggccctggcctggtcaagcctagcgaaacactgagcctgacctgtaccgtgtctggcggctctatcagctccagcagctatttctggggctggatcagacaacctcctggcaaaggactggaatggatcggctccatctactacagcggcatcacctactacaaccccagcctgaagtccagagtgaccatctccgtggacaccagcaagaaccagttctccctgaagctgagcagcgtgacagccgccgataccgccgtgtattattgtgccagacatgacggcgctgtggccggcctgtttgattattggggacagggcaccctggtcaccgtgtcatctgctacgcgtatccagaaccctgatcctgccgtgtaccagctgcgggatagcaagagcagcgacaagagcgtgtgtctgttcaccgacttcgacagccagaccaacgtgtcccagagcaaggactccgacgtgtacatcaccgataagtgcgtgctggacatgcggagcatggacttcaagagcaactccgccgtggcctggtccaacaagtccgatttcgcctgcgccaacgccttcaacaacagcattatccccgaggacacattcttcccaagccccgagagcagctgcggctttaccagcgagagctaccagcagggcgtgctgagcgccaccatcctgtacgagatcctgctgggcaaggccaccctgtacgccgtgctggtgtctgccctggtgctgatggctatggtcaagcggaaggacagccggggacgcgccaagagaagcggatctggcgtgaagcagaccctgaatttcgacctgctgaagctggctggcgacgtggaatccaacccaggcccttctagaggccatatgaccgagtacaagcccacggtgcgcctcgccacccgcgacgacgtccccagggccgtacgcaccctcgccgccgcgttcgccgactaccccgccacgcgccacaccgtcgatccggaccgccacatcgagcgggtcaccgagctgcaagaactcttcctcacgcgcgtcgggctcgacatcggcaaggtgtgggtcgcggacgacggcgccgcggtggcggtctggaccacgccggagagcgtcgaagcgggggcggtgttcgccgagatcggcccgcgcatggccgagttgagcggttcccggctggccgcgcagcaacagatggaaggcctcctggcgccgcaccggcccaaggagcccgcgtggttcctggccaccgtcggcgtctcgcccgaccaccagggcaagggtctgggcagcgccgtcgtgctccccggagtggaggcggccgagcgcgccggggtgcccgccttcctggagacctccgcgccccgcaacctccccttctacgagcggctcggcttcaccgtcaccgccgacgtcgaggtgcccgaaggaccgcgcacctggtgcatgacccgcaagcccggtgcctga

SEQ ID NO: 33626 - DNA, 2853 bp, synthetic construct
  source 1..2853: mol_type = other DNA
atggccttaccagtgaccgccttgctcctgccgctggccttgctgctccacgccgccaggccgagctacgtgctgacacagcctccatccgtgtctgtggctccaggacagaccgccagaatcacatgcggcggcaacaacatcggcggcaagagcgtgcactggtatcagcagccacctggacaggctccagtggtggtggtgtacgacgacagcgatagacctagcggcatccccgagagattcagcggcagcaattccggcaataccgccacactgaccatcagcagagtggaagctggcgacgaggccgtgtactactgccaagtgtgggacagcagcagcgatcacgtggtgtttggcggcggaacaaagctgacagtgcttctcgaggacctgaagaacgtgttcccacctgaggtggccgtgttcgagcctagcgaggccgagatcagccacacccagaaagccaccctcgtgtgcctggctaccggcttctaccccgaccatgtggaactgtcttggtgggtcaacggcaaagaggtgcacagcggcgtgtgtaccgacccccagccactgaaagaacagcccgccctgaacgacagccggtactgcctgagcagcagactgagagtgtccgccaccttctggcagaacccccggaaccacttcagatgccaggtgcagttctacggcctgagcgagaacgacgagtggacccaggacagagccaagcccgtgacccagatcgtgtctgccgaagcctggggcagagccgattgcgacgtgaagctggtggaaaagagcttcgagacagacaccaacctgaacttccagaacctgagcgtgatcggcttcagaatcctgctgctgaaagtggccggctttaacctgctgatgaccctgcggctgtggtccagcagggccaagcgatctggatctggagcaacaaacttctcactactcaaacaagcaggtgacgtggaggagaatcccgggcctactagtgccaccatggactggatttggcgcatccttttccttgtcggcgctgctaccggcgcccattccgggcccatgggaagctggcttgagttctaccacagactcaacgccattgacagcaggctgtgggcacttggcggaagcgaagctgaactcgccgcttttgaaaaagaaattgccgctttcgagtccgagcttcaggcttacaaaggcaaagggaatcctgaggtcgagagcctgagagatcacgctgcccacattagagagtggttgcaggcataccggcacaatggatccggcggcggaggatctggcggaggcggatctgggggcggaggctctttcgaacaactccagctgcaagagtctggccctggcctggtcaagcctagcgaaacactgagcctgacctgtaccgtgtctggcggctctatcagctccagcagctatttctggggctggatcagacaacctcctggcaaaggactggaatggatcggctccatctactacagcggcatcacctactacaaccccagcctgaagtccagagtgaccatctccgtggacaccagcaagaaccagttctccctgaagctgagcagcgtgacagccgccgataccgccgtgtattattgtgccagacatgacggcgctgtggccggcctgtttgattattggggacagggcaccctggtcaccgtgtcatctgctacgcgtatccagaaccctgatcctgccgtgtaccagctgcgggatagcaagagcagcgacaagagcgtgtgtctgttcaccgacttcgacagccagaccaacgtgtcccagagcaaggactccgacgtgtacatcaccgataagtgcgtgctggacatgcggagcatggacttcaagagcaactccgccgtggcctggtccaacaagtccgatttcgcctgcgccaacgccttcaacaacagcattatccccgaggacacattcttcccaagccccgagagcagctgcggctttaccagcgagagctaccagcagggcgtgctgagcgccaccatcctgtacgagatcctgctgggcaaggccaccctgtacgccgtgctggtgtctgccctggtgctgatggctatggtcaagcggaaggacagccggggacgcgccaagagaagcggatctggcgtgaagcagaccctgaatttcgacctgctgaagctggctggcgacgtggaatccaacccaggcccttctagaggccatatgaccgagtacaagcccacggtgcgcctcgccacccgcgacgacgtccccagggccgtacgcaccctcgccgccgcgttcgccgactaccccgccacgcgccacaccgtcgatccggaccgccacatcgagcgggtcaccgagctgcaagaactcttcctcacgcgcgtcgggctcgacatcggcaaggtgtgggtcgcggacgacggcgccgcggtggcggtctggaccacgccggagagcgtcgaagcgggggcggtgttcgccgagatcggcccgcgcatggccgagttgagcggttcccggctggccgcgcagcaacagatggaaggcctcctggcgccgcaccggcccaaggagcccgcgtggttcctggccaccgtcggcgtctcgcccgaccaccagggcaagggtctgggcagcgccgtcgtgctccccggagtggaggcggccgagcgcgccggggtgcccgccttcctggagacctccgcgccccgcaacctccccttctacgagcggctcggcttcaccgtcaccgccgacgtcgaggtgcccgaaggaccgcgcacctggtgcatgacccgcaagcccggtgcctga

SEQ ID NO: 33627 - DNA, 2853 bp, synthetic construct
  source 1..2853: mol_type = other DNA
atggccttaccagtgaccgccttgctcctgccgctggccttgctgctccacgccgccaggccggcatgcatgggcagttggttcgagttctacgaccggctgaatgccatcgacgccagactgtgggctctcggaggatctgaagctgagctggccgccttcgagaaagagatcgccgcctttgagagcgagctgcaagcctacaaaggcaagggcaaccccgaggtggaaaacctgagagtgcacgccgctgccatcagagaatggctccaggcttacagacacaacggtaccggcggaggcggatctggcggcggaggtagcggtggcggaggatctgaattcagctacgtgctgacacagcctccatccgtgtctgtggctccaggacagaccgccagaatcacatgcggcggcaacaacatcggcggcaagagcgtgcactggtatcagcagccacctggacaggctccagtggtggtggtgtacgacgacagcgatagacctagcggcatccccgagagattcagcggcagcaattccggcaataccgccacactgaccatcagcagagtggaagctggcgacgaggccgtgtactactgccaagtgtgggacagcagcagcgatcacgtggtgtttggcggcggaacaaagctgacagtgcttctcgaggacctgaagaacgtgttcccacctgaggtggccgtgttcgagcctagcgaggccgagatcagccacacccagaaagccaccctcgtgtgcctggctaccggcttctaccccgaccatgtggaactgtcttggtgggtcaacggcaaagaggtgcacagcggcgtgtgtaccgacccccagccactgaaagaacagcccgccctgaacgacagccggtactgcctgagcagcagactgagagtgtccgccaccttctggcagaacccccggaaccacttcagatgccaggtgcagttctacggcctgagcgagaacgacgagtggacccaggacagagccaagcccgtgacccagatcgtgtctgccgaagcctggggcagagccgattgcgacgtgaagctggtggaaaagagcttcgagacagacaccaacctgaacttccagaacctgagcgtgatcggcttcagaatcctgctgctgaaagtggccggctttaacctgctgatgaccctgcggctgtggtccagcagggccaagcgatctggatctggagcaacaaacttctcactactcaaacaagcaggtgacgtggaggagaatcccgggcctactagtatggactggatttggcgcatccttttccttgtcggcgctgctaccggcgcgcattccttcgaacaactccagctgcaagagtctggccctggcctggtcaagcctagcgaaacactgagcctgacctgtaccgtgtctggcggctctatcagctccagcagctatttctggggctggatcagacaacctcctggcaaaggactggaatggatcggctccatctactacagcggcatcacctactacaaccccagcctgaagtccagagtgaccatctccgtggacaccagcaagaaccagttctccctgaagctgagcagcgtgacagccgccgataccgccgtgtattattgtgccagacatgacggcgctgtggccggcctgtttgattattggggacagggcaccctggtcaccgtgtcatctgctacgcgtatccagaaccctgatcctgccgtgtaccagctgcgggatagcaagagcagcgacaagagcgtgtgtctgttcaccgacttcgacagccagaccaacgtgtcccagagcaaggactccgacgtgtacatcaccgataagtgcgtgctggacatgcggagcatggacttcaagagcaactccgccgtggcctggtccaacaagtccgatttcgcctgcgccaacgccttcaacaacagcattatccccgaggacacattcttcccaagccccgagagcagctgcggctttaccagcgagagctaccagcagggcgtgctgagcgccaccatcctgtacgagatcctgctgggcaaggccaccctgtacgccgtgctggtgtctgccctggtgctgatggctatggtcaagcggaaggacagccggggacgcgccaagagaagcggatctggcgtgaagcagaccctgaatttcgacctgctgaagctggctggcgacgtggaatccaacccaggcccttctagaggccatatgaccgagtacaagcccacggtgcgcctcgccacccgcgacgacgtccccagggccgtacgcaccctcgccgccgcgttcgccgactaccccgccacgcgccacaccgtcgatccggaccgccacatcgagcgggtcaccgagctgcaagaactcttcctcacgcgcgtcgggctcgacatcggcaaggtgtgggtcgcggacgacggcgccgcggtggcggtctggaccacgccggagagcgtcgaagcgggggcggtgttcgccgagatcggcccgcgcatggccgagttgagcggttcccggctggccgcgcagcaacagatggaaggcctcctggcgccgcaccggcccaaggagcccgcgtggttcctggccaccgtcggcgtctcgcccgaccaccagggcaagggtctgggcagcgccgtcgtgctccccggagtggaggcggccgagcgcgccggggtgcccgccttcctggagacctccgcgccccgcaacctccccttctacgagcggctcggcttcaccgtcaccgccgacgtcgaggtgcccgaaggaccgcgcacctggtgcatgacccgcaagcccggtgcctga

SEQ ID NO: 33628 - DNA, 3204 bp, synthetic construct
  source 1..3204: mol_type = other DNA
atggccttaccagtgaccgccttgctcctgccgctggccttgctgctccacgccgccaggccggcatgcatggaccccgacctggaaatcagagccgccttcctgcggcagagaaacacagccctgagaacagaggtggccgagctggaacaagaggtgcagcggctggaaaacgaggtgtcccagtacgagacaagatacggccctctcggaggcggaaaaggtaccggcggaggcggatctggcggcggaggtagcggtggcggaggatctgaattcagctacgtgctgacacagcctccatccgtgtctgtggctccaggacagaccgccagaatcacatgcggcggcaacaacatcggcggcaagagcgtgcactggtatcagcagccacctggacaggctccagtggtggtggtgtacgacgacagcgatagacctagcggcatccccgagagattcagcggcagcaattccggcaataccgccacactgaccatcagcagagtggaagctggcgacgaggccgtgtactactgccaagtgtgggacagcagcagcgatcacgtggtgtttggcggcggaacaaagctgacagtgcttctcgaggacctgaagaacgtgttcccacctgaggtggccgtgttcgagcctagcgaggccgagatcagccacacccagaaagccaccctcgtgtgcctggctaccggcttctaccccgaccatgtggaactgtcttggtgggtcaacggcaaagaggtgcacagcggcgtgtgtaccgacccccagccactgaaagaacagcccgccctgaacgacagccggtactgcctgagcagcagactgagagtgtccgccaccttctggcagaacccccggaaccacttcagatgccaggtgcagttctacggcctgagcgagaacgacgagtggacccaggacagagccaagcccgtgacccagatcgtgtctgccgaagcctggggcagagccgattgcgacgtgaagctggtggaaaagagcttcgagacagacaccaacctgaacttccagaacctgagcgtgatcggcttcagaatcctgctgctgaaagtggccggctttaacctgctgatgaccctgcggctgtggtccagcagggccaagcgatctggatctggagcaacaaacttctcactactcaaacaagcaggtgacgtggaggagaatcccgggcctactagtgccaccatggactggatttggcgcatccttttccttgtcggcgctgctaccggcgcccattccgggcccgaagtgcagctggttgaatctggcggaggactggttcaggctggcggatctctgagactgtcttgtgccgccagcggcagaacctttagcatgggctggtttagacaggcccctggcaaagagagagagttcgtcgccgccatcacatactctggcggcagcccttactacgccgactctgtgaagggcagattcaccatcagccgggacaacgccaagaacaccgtgtacctccagatgaacagcctgaagcctgaggacaccgccgtgtactactgcgccgccaatccaacatacggcagcgactggaacgccgagaattggggccagggaacccaagtgacagtgtctagcggatccggcggcggaggatctggcggaggcggatctgggggcggaggctctttcgaacaactccagctgcaagagtctggccctggcctggtcaagcctagcgaaacactgagcctgacctgtaccgtgtctggcggctctatcagctccagcagctatttctggggctggatcagacaacctcctggcaaaggactggaatggatcggctccatctactacagcggcatcacctactacaaccccagcctgaagtccagagtgaccatctccgtggacaccagcaagaaccagttctccctgaagctgagcagcgtgacagccgccgataccgccgtgtattattgtgccagacatgacggcgctgtggccggcctgtttgattattggggacagggcaccctggtcaccgtgtcatctgctacgcgtatccagaaccctgatcctgccgtgtaccagctgcgggatagcaagagcagcgacaagagcgtgtgtctgttcaccgacttcgacagccagaccaacgtgtcccagagcaaggactccgacgtgtacatcaccgataagtgcgtgctggacatgcggagcatggacttcaagagcaactccgccgtggcctggtccaacaagtccgatttcgcctgcgccaacgccttcaacaacagcattatccccgaggacacattcttcccaagccccgagagcagctgcggctttaccagcgagagctaccagcagggcgtgctgagcgccaccatcctgtacgagatcctgctgggcaaggccaccctgtacgccgtgctggtgtctgccctggtgctgatggctatggtcaagcggaaggacagccggggacgcgccaagagaagcggatctggcgtgaagcagaccctgaatttcgacctgctgaagctggctggcgacgtggaatccaacccaggcccttctagaggccatatgaccgagtacaagcccacggtgcgcctcgccacccgcgacgacgtccccagggccgtacgcaccctcgccgccgcgttcgccgactaccccgccacgcgccacaccgtcgatccggaccgccacatcgagcgggtcaccgagctgcaagaactcttcctcacgcgcgtcgggctcgacatcggcaaggtgtgggtcgcggacgacggcgccgcggtggcggtctggaccacgccggagagcgtcgaagcgggggcggtgttcgccgagatcggcccgcgcatggccgagttgagcggttcccggctggccgcgcagcaacagatggaaggcctcctggcgccgcaccggcccaaggagcccgcgtggttcctggccaccgtcggcgtctcgcccgaccaccagggcaagggtctgggcagcgccgtcgtgctccccggagtggaggcggccgagcgcgccggggtgcccgccttcctggagacctccgcgccccgcaacctccccttctacgagcggctcggcttcaccgtcaccgccgacgtcgaggtgcccgaaggaccgcgcacctggtgcatgacccgcaagcccggtgcctga

SEQ ID NO: 33629 - DNA, 2853 bp, synthetic construct
  source 1..2853: mol_type = other DNA
atggccttaccagtgaccgccttgctcctgccgctggccttgctgctccacgccgccaggccgagctacgtgctgacacagcctccatccgtgtctgtggctccaggacagaccgccagaatcacatgcggcggcaacaacatcggcggcaagagcgtgcactggtatcagcagccacctggacaggctccagtggtggtggtgtacgacgacagcgatagacctagcggcatccccgagagattcagcggcagcaattccggcaataccgccacactgaccatcagcagagtggaagctggcgacgaggccgtgtactactgccaagtgtgggacagcagcagcgatcacgtggtgtttggcggcggaacaaagctgacagtgcttctcgaggacctgaagaacgtgttcccacctgaggtggccgtgttcgagcctagcgaggccgagatcagccacacccagaaagccaccctcgtgtgcctggctaccggcttctaccccgaccatgtggaactgtcttggtgggtcaacggcaaagaggtgcacagcggcgtgtgtaccgacccccagccactgaaagaacagcccgccctgaacgacagccggtactgcctgagcagcagactgagagtgtccgccaccttctggcagaacccccggaaccacttcagatgccaggtgcagttctacggcctgagcgagaacgacgagtggacccaggacagagccaagcccgtgacccagatcgtgtctgccgaagcctggggcagagccgattgcgacgtgaagctggtggaaaagagcttcgagacagacaccaacctgaacttccagaacctgagcgtgatcggcttcagaatcctgctgctgaaagtggccggctttaacctgctgatgaccctgcggctgtggtccagcagggccaagcgatctggatctggagcaacaaacttctcactactcaaacaagcaggtgacgtggaggagaatcccgggcctactagtgccaccatggactggatttggcgcatccttttccttgtcggcgctgctaccggcgcccattccgggcccatgggatcttggagcgagttttacgatcggctgcacgccattcaccaccggctgtatgctctcggaggaagcgaagctgagctggccgcttttgaaaaagaaattgccgctttcgagtccgagcttcaggcttacaaaggcaaagggaatcctgaggtcgaggccctgagagataccgccgccttcatcagaacccggttgcaggcataccggcacaacggatccggcggcggaggatctggcggaggcggatctgggggcggaggctctttcgaacaactccagctgcaagagtctggccctggcctggtcaagcctagcgaaacactgagcctgacctgtaccgtgtctggcggctctatcagctccagcagctatttctggggctggatcagacaacctcctggcaaaggactggaatggatcggctccatctactacagcggcatcacctactacaaccccagcctgaagtccagagtgaccatctccgtggacaccagcaagaaccagttctccctgaagctgagcagcgtgacagccgccgataccgccgtgtattattgtgccagacatgacggcgctgtggccggcctgtttgattattggggacagggcaccctggtcaccgtgtcatctgctacgcgtatccagaaccctgatcctgccgtgtaccagctgcgggatagcaagagcagcgacaagagcgtgtgtctgttcaccgacttcgacagccagaccaacgtgtcccagagcaaggactccgacgtgtacatcaccgataagtgcgtgctggacatgcggagcatggacttcaagagcaactccgccgtggcctggtccaacaagtccgatttcgcctgcgccaacgccttcaacaacagcattatccccgaggacacattcttcccaagccccgagagcagctgcggctttaccagcgagagctaccagcagggcgtgctgagcgccaccatcctgtacgagatcctgctgggcaaggccaccctgtacgccgtgctggtgtctgccctggtgctgatggctatggtcaagcggaaggacagccggggacgcgccaagagaagcggatctggcgtgaagcagaccctgaatttcgacctgctgaagctggctggcgacgtggaatccaacccaggcccttctagaggccatatgaccgagtacaagcccacggtgcgcctcgccacccgcgacgacgtccccagggccgtacgcaccctcgccgccgcgttcgccgactaccccgccacgcgccacaccgtcgatccggaccgccacatcgagcgggtcaccgagctgcaagaactcttcctcacgcgcgtcgggctcgacatcggcaaggtgtgggtcgcggacgacggcgccgcggtggcggtctggaccacgccggagagcgtcgaagcgggggcggtgttcgccgagatcggcccgcgcatggccgagttgagcggttcccggctggccgcgcagcaacagatggaaggcctcctggcgccgcaccggcccaaggagcccgcgtggttcctggccaccgtcggcgtctcgcccgaccaccagggcaagggtctgggcagcgccgtcgtgctccccggagtggaggcggccgagcgcgccggggtgcccgccttcctggagacctccgcgccccgcaacctccccttctacgagcggctcggcttcaccgtcaccgccgacgtcgaggtgcccgaaggaccgcgcacctggtgcatgacccgcaagcccggtgcctga

SEQ ID NO: 33630 - DNA, 3483 bp, synthetic construct
  source 1..3483: mol_type = other DNA
atggccttaccagtgaccgccttgctcctgccgctggccttgctgctccacgccgccaggccgagctacgtgctgacacagcctccatccgtgtctgtggctccaggacagaccgccagaatcacatgcggcggcaacaacatcggcggcaagagcgtgcactggtatcagcagccacctggacaggctccagtggtggtggtgtacgacgacagcgatagacctagcggcatccccgagagattcagcggcagcaattccggcaataccgccacactgaccatcagcagagtggaagctggcgacgaggccgtgtactactgccaagtgtgggacagcagcagcgatcacgtggtgtttggcggcggaacaaagctgacagtgcttctcgaggacctgaagaacgtgttcccacctgaggtggccgtgttcgagcctagcgaggccgagatcagccacacccagaaagccaccctcgtgtgcctggctaccggcttctaccccgaccatgtggaactgtcttggtgggtcaacggcaaagaggtgcacagcggcgtgtgtaccgacccccagccactgaaagaacagcccgccctgaacgacagccggtactgcctgagcagcagactgagagtgtccgccaccttctggcagaacccccggaaccacttcagatgccaggtgcagttctacggcctgagcgagaacgacgagtggacccaggacagagccaagcccgtgacccagatcgtgtctgccgaagcctggggcagagccgattgcgacgtgaagctggtggaaaagagcttcgagacagacaccaacctgaacttccagaacctgagcgtgatcggcttcagaatcctgctgctgaaagtggccggctttaacctgctgatgaccctgcggctgtggtccagcagggccaagcgatctggatctggagcaacaaacttctcactactcaaacaagcaggtgacgtggaggagaatcccgggcctactagtaccatggactggatttggcgcatccttttccttgtcggcgctgctaccggcgcccattccctgttcaatcaagaggtgcagatccctctgaccgagagctactgtggcccctgtcctaagaactggatctgctacaagaacaactgctaccagttcttcgacgagagcaagaattggtacgagagccaggccagctgcatgagccagaatgccagcctgctgaaggtgtacagcaaagaggaccaggacctgctgaaactggtcaagagcgcccactggatgggccttgtgcacatccccaccaatggctcttggcagtgggaggacggcagcattctgagccctaacctgctgaccatcatcgagatgcagaagggcgactgcgccctgtacgccagcagctttaagggctacatcgagaattgcagcaccccgaacacctacatctgtatgcagagaaccgtttctggcggaggcggctctggaggaggcggaagtggcggcggaggcgacctctttaatcaagaagtccagattccactcaccgaatcctactgcggaccttgtccaaaaaattggatttgttataagaacaactgttatcaattctttgatgagtctaaaaattggtatgagtcccaggcttcctgcatgtctcagaacgcttctctgctgaaagtctactctaaagaagatcaggatctcctgaagctcgtcaagtctgcccattggatggggctcgtccacattcctaccaacggaagctggcaatgggaagatggctccatcctgtctccaaatctgctcacgattattgaaatgcagaaaggggattgtgctctctacgccagctccttcaagggatatattgagaactgtagcacgcccaatacttatatctgtatgcaacggaccgtgggatccggcggcggaggatctggcggaggcggatctgggggcggaggctctttcgaacaactccagctgcaagagtctggccctggcctggtcaagcctagcgaaacactgagcctgacctgtaccgtgtctggcggctctatcagctccagcagctatttctggggctggatcagacaacctcctggcaaaggactggaatggatcggctccatctactacagcggcatcacctactacaaccccagcctgaagtccagagtgaccatctccgtggacaccagcaagaaccagttctccctgaagctgagcagcgtgacagccgccgataccgccgtgtattattgtgccagacatgacggcgctgtggccggcctgtttgattattggggacagggcaccctggtcaccgtgtcatctgctacgcgtatccagaaccctgatcctgccgtgtaccagctgcgggatagcaagagcagcgacaagagcgtgtgtctgttcaccgacttcgacagccagaccaacgtgtcccagagcaaggactccgacgtgtacatcaccgataagtgcgtgctggacatgcggagcatggacttcaagagcaactccgccgtggcctggtccaacaagtccgatttcgcctgcgccaacgccttcaacaacagcattatccccgaggacacattcttcccaagccccgagagcagctgcggctttaccagcgagagctaccagcagggcgtgctgagcgccaccatcctgtacgagatcctgctgggcaaggccaccctgtacgccgtgctggtgtctgccctggtgctgatggctatggtcaagcggaaggacagccggggacgcgccaagagaagcggatctggcgtgaagcagaccctgaatttcgacctgctgaagctggctggcgacgtggaatccaacccaggcccttctagaggccatatgaccgagtacaagcccacggtgcgcctcgccacccgcgacgacgtccccagggccgtacgcaccctcgccgccgcgttcgccgactaccccgccacgcgccacaccgtcgatccggaccgccacatcgagcgggtcaccgagctgcaagaactcttcctcacgcgcgtcgggctcgacatcggcaaggtgtgggtcgcggacgacggcgccgcggtggcggtctggaccacgccggagagcgtcgaagcgggggcggtgttcgccgagatcggcccgcgcatggccgagttgagcggttcccggctggccgcgcagcaacagatggaaggcctcctggcgccgcaccggcccaaggagcccgcgtggttcctggccaccgtcggcgtctcgcccgaccaccagggcaagggtctgggcagcgccgtcgtgctccccggagtggaggcggccgagcgcgccggggtgcccgccttcctggagacctccgcgccccgcaacctccccttctacgagcggctcggcttcaccgtcaccgccgacgtcgaggtgcccgaaggaccgcgcacctggtgcatgacccgcaagcccggtgcctga

SEQ ID NO: 33631 - DNA, 1869 bp, synthetic construct
  source 1..1869: mol_type = other DNA
atggccttaccagtgaccgccttgctcctgccgctggccttgctgctccacgccgccaggccgagctacgtgctgacacagcctccatccgtgtctgtggctccaggacagaccgccagaatcacatgcggcggcaacaacatcggcggcaagagcgtgcactggtatcagcagccacctggacaggctccagtggtggtggtgtacgacgacagcgatagacctagcggcatccccgagagattcagcggcagcaattccggcaataccgccacactgaccatcagcagagtggaagctggcgacgaggccgtgtactactgccaagtgtgggacagcagcagcgatcacgtggtgtttggcggcggaacaaagctgacagtgcttctcgaggacctgaagaacgtgttcccacctgaggtggccgtgttcgagcctagcgaggccgagatcagccacacccagaaagccaccctcgtgtgcctggctaccggcttctaccccgaccatgtggaactgtcttggtgggtcaacggcaaagaggtgcacagcggcgtgtgtaccgacccccagccactgaaagaacagcccgccctgaacgacagccggtactgcctgagcagcagactgagagtgtccgccaccttctggcagaacccccggaaccacttcagatgccaggtgcagttctacggcctgagcgagaacgacgagtggacccaggacagagccaagcccgtgacccagatcgtgtctgccgaagcctggggcagagccgattgcggctttaccagcgagagctaccagcagggcgtgctgagcgccaccaacctgagcgtgatcggcttcagaatcctgctgctgaaagtggccggctttaacctgctgatgaccctgcggctgtggtccagcagggccaagcgatctggatctggagcaacaaacttctcactactcaaacaagcaggtgacgtggaggagaatcccgggcctactagtatggactggatttggcgcatccttttccttgtcggcgctgctaccggcgcgcattccttcgaacaactccagctgcaagagtctggccctggcctggtcaagcctagcgaaacactgagcctgacctgtaccgtgtctggcggctctatcagctccagcagctatttctggggctggatcagacaacctcctggcaaaggactggaatggatcggctccatctactacagcggcatcacctactacaaccccagcctgaagtccagagtgaccatctccgtggacaccagcaagaaccagttctccctgaagctgagcagcgtgacagccgccgataccgccgtgtattattgtgccagacatgacggcgctgtggccggcctgtttgattattggggacagggcaccctggtcaccgtgtcatctgctacgcgtatccagaaccctgatcctgccgtgtaccagctgcgggatagcaagagcagcgacaagagcgtgtgtctgttcaccgacttcgacagccagaccaacgtgtcccagagcaaggactccgacgtgtacatcaccgataagtgcgtgctggacatgcggagcatggacttcaagagcaactccgccgtggcctggtccaacaagtccgatttcgcctgcgccaacgccttcaacaacagcattatccccgaggacacattcttcccaagccccgagagcagctgcgacgtgaagctggtggaaaagagcttcgagacagacaccaacctgaacttccagatcctgtacgagatcctgctgggcaaggccaccctgtacgccgtgctggtgtctgccctggtgctgatggctatggtcaagcggaaggacagccgggga

SEQ ID NO: 33632 - DNA, 1881 bp, synthetic construct
  source 1..1881: mol_type = other DNA
atggccttaccagtgaccgccttgctcctgccgctggccttgctgctccacgccgccaggccgagctacgtgctgacacagcctccatccgtgtctgtggctccaggacagaccgccagaatcacatgcggcggcaacaacatcggcggcaagagcgtgcactggtatcagcagccacctggacaggctccagtggtggtggtgtacgacgacagcgatagacctagcggcatccccgagagattcagcggcagcaattccggcaataccgccacactgaccatcagcagagtggaagctggcgacgaggccgtgtactactgccaagtgtgggacagcagcagcgatcacgtggtgtttggcggcggaacaaagctgacagtgcttctcgagatccagaaccctgatcctgccgtgtaccagctgcgggatagcaagagcagcgacaagagcgtgtgtctgttcaccgacttcgacagccagaccaacgtgtcccagagcaaggactccgacgtgtacatcaccgataagtgcgtgctggacatgcggagcatggacttcaagagcaactccgccgtggcctggtccaacaagtccgatttcgcctgcgccaacgccttcaacaacagcattatccccgaggacacattcttcccaagccccgagagcagctgcgacgtgaagctggtggaaaagagcttcgagacagacaccaacctgaacttccagatcctgtacgagatcctgctgggcaaggccaccctgtacgccgtgctggtgtctgccctggtgctgatggctatggtcaagcggaaggacagccggggacgcgccaagagaagcggatctggcgtgaagcagaccctgaatttcgacctgctgaagctggctggcgacgtggaatccaacccaggccctactagtatggactggatttggcgcatccttttccttgtcggcgctgctaccggcgcgcattccttcgaacaactccagctgcaagagtctggccctggcctggtcaagcctagcgaaacactgagcctgacctgtaccgtgtctggcggctctatcagctccagcagctatttctggggctggatcagacaacctcctggcaaaggactggaatggatcggctccatctactacagcggcatcacctactacaaccccagcctgaagtccagagtgaccatctccgtggacaccagcaagaaccagttctccctgaagctgagcagcgtgacagccgccgataccgccgtgtattattgtgccagacatgacggcgctgtggccggcctgtttgattattggggacagggcaccctggtcaccgtgtcatctgctacgcgtgaggacctgaagaacgtgttcccacctgaggtggccgtgttcgagcctagcgaggccgagatcagccacacccagaaagccaccctcgtgtgcctggctaccggcttctaccccgaccatgtggaactgtcttggtgggtcaacggcaaagaggtgcacagcggcgtgtgtaccgacccccagccactgaaagaacagcccgccctgaacgacagccggtactgcctgagcagcagactgagagtgtccgccaccttctggcagaacccccggaaccacttcagatgccaggtgcagttctacggcctgagcgagaacgacgagtggacccaggacagagccaagcccgtgacccagatcgtgtctgccgaagcctggggcagagccgattgcggctttaccagcgagagctaccagcagggcgtgctgagcgccaccaacctgagcgtgatcggcttcagaatcctgctgctgaaagtggccggctttaacctgctgatgaccctgcggctgtggtccagc

SEQ ID NO: 33633 - DNA, 2274 bp, synthetic construct
  source 1..2274: mol_type = other DNA
atggccttaccagtgaccgccttgctcctgccgctggccttgctgctccacgccgccaggccggaagtgcagctggttgaatctggcggaggactggttcagcctggcggatctctgagactgtcttgtgccgccagcggcttcagcttcagcgacttttggatgagctgggtccgacaggcccctggcaaaggacttgaatgggtcgccacaatcagccaggccggcagcgagaaggactacgtggactctgtgaagggcagattcaccatcagccgggacaacgccaagaagtccctgtacctccagatgaacagcctgagagccgaggacaccgccgtgtactattgtgcctctggcgtgtacagcttcgactacagaggccagggcaccctggtcacagtctcttctggtaccggcggaggcggatctggcggcggaggtagcggtggcggaggatctgaattcagctacgtgctgacacagcctccatccgtgtctgtggctccaggacagaccgccagaatcacatgcggcggcaacaacatcggcggcaagagcgtgcactggtatcagcagccacctggacaggctccagtggtggtggtgtacgacgacagcgatagacctagcggcatccccgagagattcagcggcagcaattccggcaataccgccacactgaccatcagcagagtggaagctggcgacgaggccgtgtactactgccaagtgtgggacagcagcagcgatcacgtggtgtttggcggcggaacaaagctgacagtgcttctcgaggacctgaagaacgtgttcccacctgaggtggccgtgttcgagcctagcgaggccgagatcagccacacccagaaagccaccctcgtgtgcctggctaccggcttctaccccgaccatgtggaactgtcttggtgggtcaacggcaaagaggtgcacagcggcgtgtgtaccgacccccagccactgaaagaacagcccgccctgaacgacagccggtactgcctgagcagcagactgagagtgtccgccaccttctggcagaacccccggaaccacttcagatgccaggtgcagttctacggcctgagcgagaacgacgagtggacccaggacagagccaagcccgtgacccagatcgtgtctgccgaagcctggggcagagccgattgcggctttaccagcgagagctaccagcagggcgtgctgagcgccaccaacctgagcgtgatcggcttcagaatcctgctgctgaaagtggccggctttaacctgctgatgaccctgcggctgtggtccagcagggccaagcgatctggatctggagcaacaaacttctcactactcaaacaagcaggtgacgtggaggagaatcccgggcctactagtatggactggatttggcgcatccttttccttgtcggcgctgctaccggcgcgcattccttcgaacaactccagctgcaagagtctggccctggcctggtcaagcctagcgaaacactgagcctgacctgtaccgtgtctggcggctctatcagctccagcagctatttctggggctggatcagacaacctcctggcaaaggactggaatggatcggctccatctactacagcggcatcacctactacaaccccagcctgaagtccagagtgaccatctccgtggacaccagcaagaaccagttctccctgaagctgagcagcgtgacagccgccgataccgccgtgtattattgtgccagacatgacggcgctgtggccggcctgtttgattattggggacagggcaccctggtcaccgtgtcatctgctacgcgtatccagaaccctgatcctgccgtgtaccagctgcgggatagcaagagcagcgacaagagcgtgtgtctgttcaccgacttcgacagccagaccaacgtgtcccagagcaaggactccgacgtgtacatcaccgataagtgcgtgctggacatgcggagcatggacttcaagagcaactccgccgtggcctggtccaacaagtccgatttcgcctgcgccaacgccttcaacaacagcattatccccgaggacacattcttcccaagccccgagagcagctgcgacgtgaagctggtggaaaagagcttcgagacagacaccaacctgaacttccagatcctgtacgagatcctgctgggcaaggccaccctgtacgccgtgctggtgtctgccctggtgctgatggctatggtcaagcggaaggacagccgggga

SEQ ID NO: 33634 - DNA, 2286 bp, synthetic construct
  source 1..2286: mol_type = other DNA
atggccttaccagtgaccgccttgctcctgccgctggccttgctgctccacgccgccaggccggaagtgcagctggttgaatctggcggaggactggttcagcctggcggatctctgagactgtcttgtgccgccagcggcttcagcttcagcgacttttggatgagctgggtccgacaggcccctggcaaaggacttgaatgggtcgccacaatcagccaggccggcagcgagaaggactacgtggactctgtgaagggcagattcaccatcagccgggacaacgccaagaagtccctgtacctccagatgaacagcctgagagccgaggacaccgccgtgtactattgtgcctctggcgtgtacagcttcgactacagaggccagggcaccctggtcacagtctcttctggtaccggcggaggcggatctggcggcggaggtagcggtggcggaggatctgaattcagctacgtgctgacacagcctccatccgtgtctgtggctccaggacagaccgccagaatcacatgcggcggcaacaacatcggcggcaagagcgtgcactggtatcagcagccacctggacaggctccagtggtggtggtgtacgacgacagcgatagacctagcggcatccccgagagattcagcggcagcaattccggcaataccgccacactgaccatcagcagagtggaagctggcgacgaggccgtgtactactgccaagtgtgggacagcagcagcgatcacgtggtgtttggcggcggaacaaagctgacagtgcttctcgagatccagaaccctgatcctgccgtgtaccagctgcgggatagcaagagcagcgacaagagcgtgtgtctgttcaccgacttcgacagccagaccaacgtgtcccagagcaaggactccgacgtgtacatcaccgataagtgcgtgctggacatgcggagcatggacttcaagagcaactccgccgtggcctggtccaacaagtccgatttcgcctgcgccaacgccttcaacaacagcattatccccgaggacacattcttcccaagccccgagagcagctgcgacgtgaagctggtggaaaagagcttcgagacagacaccaacctgaacttccagatcctgtacgagatcctgctgggcaaggccaccctgtacgccgtgctggtgtctgccctggtgctgatggctatggtcaagcggaaggacagccggggacgcgccaagagaagcggatctggcgtgaagcagaccctgaatttcgacctgctgaagctggctggcgacgtggaatccaacccaggccctactagtatggactggatttggcgcatccttttccttgtcggcgctgctaccggcgcgcattccttcgaacaactccagctgcaagagtctggccctggcctggtcaagcctagcgaaacactgagcctgacctgtaccgtgtctggcggctctatcagctccagcagctatttctggggctggatcagacaacctcctggcaaaggactggaatggatcggctccatctactacagcggcatcacctactacaaccccagcctgaagtccagagtgaccatctccgtggacaccagcaagaaccagttctccctgaagctgagcagcgtgacagccgccgataccgccgtgtattattgtgccagacatgacggcgctgtggccggcctgtttgattattggggacagggcaccctggtcaccgtgtcatctgctacgcgtgaggacctgaagaacgtgttcccacctgaggtggccgtgttcgagcctagcgaggccgagatcagccacacccagaaagccaccctcgtgtgcctggctaccggcttctaccccgaccatgtggaactgtcttggtgggtcaacggcaaagaggtgcacagcggcgtgtgtaccgacccccagccactgaaagaacagcccgccctgaacgacagccggtactgcctgagcagcagactgagagtgtccgccaccttctggcagaacccccggaaccacttcagatgccaggtgcagttctacggcctgagcgagaacgacgagtggacccaggacagagccaagcccgtgacccagatcgtgtctgccgaagcctggggcagagccgattgcggctttaccagcgagagctaccagcagggcgtgctgagcgccaccaacctgagcgtgatcggcttcagaatcctgctgctgaaagtggccggctttaacctgctgatgaccctgcggctgtggtccagc

SEQ ID NO: 33635 - DNA, 2685 bp, synthetic construct
  source 1..2685: mol_type = other DNA
atggccttaccagtgaccgccttgctcctgccgctggccttgctgctccacgccgccaggccggaagtgcagctggttgaatctggcggaggactggttcagcctggcggatctctgagactgtcttgtgccgccagcggcttcagcttcagcgacttttggatgagctgggtccgacaggcccctggcaaaggacttgaatgggtcgccacaatcagccaggccggcagcgagaaggactacgtggactctgtgaagggcagattcaccatcagccgggacaacgccaagaagtccctgtacctccagatgaacagcctgagagccgaggacaccgccgtgtactattgtgcctctggcgtgtacagcttcgactacagaggccagggcaccctggtcacagtctcttctggtaccggcggaggcggatctggcggcggaggtagcggtggcggaggatctgaattcagctacgtgctgacacagcctccatccgtgtctgtggctccaggacagaccgccagaatcacatgcggcggcaacaacatcggcggcaagagcgtgcactggtatcagcagccacctggacaggctccagtggtggtggtgtacgacgacagcgatagacctagcggcatccccgagagattcagcggcagcaattccggcaataccgccacactgaccatcagcagagtggaagctggcgacgaggccgtgtactactgccaagtgtgggacagcagcagcgatcacgtggtgtttggcggcggaacaaagctgacagtgcttctcgaggacctgaagaacgtgttcccacctgaggtggccgtgttcgagcctagcgaggccgagatcagccacacccagaaagccaccctcgtgtgcctggctaccggcttctaccccgaccatgtggaactgtcttggtgggtcaacggcaaagaggtgcacagcggcgtgtgtaccgacccccagccactgaaagaacagcccgccctgaacgacagccggtactgcctgagcagcagactgagagtgtccgccaccttctggcagaacccccggaaccacttcagatgccaggtgcagttctacggcctgagcgagaacgacgagtggacccaggacagagccaagcccgtgacccagatcgtgtctgccgaagcctggggcagagccgattgcggctttaccagcgagagctaccagcagggcgtgctgagcgccaccaacctgagcgtgatcggcttcagaatcctgctgctgaaagtggccggctttaacctgctgatgaccctgcggctgtggtccagcagggccaagcgatctggatctggagcaacaaacttctcactactcaaacaagcaggtgacgtggaggagaatcccgggcctactagtatggactggatttggcgcatccttttccttgtcggcgctgctaccggcgcgcattccgggccccagctccagctgcaagagtctggacctggcctggtcaagcctagcgagacactgagcctgacctgtaccgtgtccggcgatagcatcagcagcggcgattactactggggctggatcagacagcctcctggcaaaggactggaatggatcggccacatctactacagcggcgtgacctactacaaccccagcctgaagtccagagtgaccatcagcgtggacaccagccggaaccagttctccctgaagctgtctagcgtgacagccgccgataccgccgtgtactactgcaccagagaggacagcagcaactggcggagtagaggccagggaacactggtcacagttagctctggatccggcggaggcggaagtggaggcggaggatctggcggcggaggctctttcgaacaactccagctgcaagagtctggccctggcctggtcaagcctagcgaaacactgagcctgacctgtaccgtgtctggcggctctatcagctccagcagctatttctggggctggatcagacaacctcctggcaaaggactggaatggatcggctccatctactacagcggcatcacctactacaaccccagcctgaagtccagagtgaccatctccgtggacaccagcaagaaccagttctccctgaagctgagcagcgtgacagccgccgataccgccgtgtattattgtgccagacatgacggcgctgtggccggcctgtttgattattggggacagggcaccctggtcaccgtgtcatctgctacgcgtatccagaaccctgatcctgccgtgtaccagctgcgggatagcaagagcagcgacaagagcgtgtgtctgttcaccgacttcgacagccagaccaacgtgtcccagagcaaggactccgacgtgtacatcaccgataagtgcgtgctggacatgcggagcatggacttcaagagcaactccgccgtggcctggtccaacaagtccgatttcgcctgcgccaacgccttcaacaacagcattatccccgaggacacattcttcccaagccccgagagcagctgcgacgtgaagctggtggaaaagagcttcgagacagacaccaacctgaacttccagatcctgtacgagatcctgctgggcaaggccaccctgtacgccgtgctggtgtctgccctggtgctgatggctatggtcaagcggaaggacagccgggga

SEQ ID NO: 33636 - DNA, 2697 bp, synthetic construct
  source 1..2697: mol_type = other DNA
atggccttaccagtgaccgccttgctcctgccgctggccttgctgctccacgccgccaggccggaagtgcagctggttgaatctggcggaggactggttcagcctggcggatctctgagactgtcttgtgccgccagcggcttcagcttcagcgacttttggatgagctgggtccgacaggcccctggcaaaggacttgaatgggtcgccacaatcagccaggccggcagcgagaaggactacgtggactctgtgaagggcagattcaccatcagccgggacaacgccaagaagtccctgtacctccagatgaacagcctgagagccgaggacaccgccgtgtactattgtgcctctggcgtgtacagcttcgactacagaggccagggcaccctggtcacagtctcttctggtaccggcggaggcggatctggcggcggaggtagcggtggcggaggatctgaattcagctacgtgctgacacagcctccatccgtgtctgtggctccaggacagaccgccagaatcacatgcggcggcaacaacatcggcggcaagagcgtgcactggtatcagcagccacctggacaggctccagtggtggtggtgtacgacgacagcgatagacctagcggcatccccgagagattcagcggcagcaattccggcaataccgccacactgaccatcagcagagtggaagctggcgacgaggccgtgtactactgccaagtgtgggacagcagcagcgatcacgtggtgtttggcggcggaacaaagctgacagtgcttctcgagatccagaaccctgatcctgccgtgtaccagctgcgggatagcaagagcagcgacaagagcgtgtgtctgttcaccgacttcgacagccagaccaacgtgtcccagagcaaggactccgacgtgtacatcaccgataagtgcgtgctggacatgcggagcatggacttcaagagcaactccgccgtggcctggtccaacaagtccgatttcgcctgcgccaacgccttcaacaacagcattatccccgaggacacattcttcccaagccccgagagcagctgcgacgtgaagctggtggaaaagagcttcgagacagacaccaacctgaacttccagatcctgtacgagatcctgctgggcaaggccaccctgtacgccgtgctggtgtctgccctggtgctgatggctatggtcaagcggaaggacagccggggacgcgccaagagaagcggatctggcgtgaagcagaccctgaatttcgacctgctgaagctggctggcgacgtggaatccaacccaggccctactagtatggactggatttggcgcatccttttccttgtcggcgctgctaccggcgcgcattccgggccccagctccagctgcaagagtctggacctggcctggtcaagcctagcgagacactgagcctgacctgtaccgtgtccggcgatagcatcagcagcggcgattactactggggctggatcagacagcctcctggcaaaggactggaatggatcggccacatctactacagcggcgtgacctactacaaccccagcctgaagtccagagtgaccatcagcgtggacaccagccggaaccagttctccctgaagctgtctagcgtgacagccgccgataccgccgtgtactactgcaccagagaggacagcagcaactggcggagtagaggccagggaacactggtcacagttagctctggatccggcggaggcggaagtggaggcggaggatctggcggcggaggctctttcgaacaactccagctgcaagagtctggccctggcctggtcaagcctagcgaaacactgagcctgacctgtaccgtgtctggcggctctatcagctccagcagctatttctggggctggatcagacaacctcctggcaaaggactggaatggatcggctccatctactacagcggcatcacctactacaaccccagcctgaagtccagagtgaccatctccgtggacaccagcaagaaccagttctccctgaagctgagcagcgtgacagccgccgataccgccgtgtattattgtgccagacatgacggcgctgtggccggcctgtttgattattggggacagggcaccctggtcaccgtgtcatctgctacgcgtgaggacctgaagaacgtgttcccacctgaggtggccgtgttcgagcctagcgaggccgagatcagccacacccagaaagccaccctcgtgtgcctggctaccggcttctaccccgaccatgtggaactgtcttggtgggtcaacggcaaagaggtgcacagcggcgtgtgtaccgacccccagccactgaaagaacagcccgccctgaacgacagccggtactgcctgagcagcagactgagagtgtccgccaccttctggcagaacccccggaaccacttcagatgccaggtgcagttctacggcctgagcgagaacgacgagtggacccaggacagagccaagcccgtgacccagatcgtgtctgccgaagcctggggcagagccgattgcggctttaccagcgagagctaccagcagggcgtgctgagcgccaccaacctgagcgtgatcggcttcagaatcctgctgctgaaagtggccggctttaacctgctgatgaccctgcggctgtggtccagc

SEQ ID NO: 33637 - DNA, 2181 bp, synthetic construct
  source 1..2181: mol_type = other DNA
atggccttaccagtgaccgccttgctcctgccgctggccttgctgctccacgccgccaggccgagctacgtgctgacacagcctccatccgtgtctgtggctccaggacagaccgccagaatcacatgcggcggcaacaacatcggcggcaagagcgtgcactggtatcagcagccacctggacaggctccagtggtggtggtgtacgacgacagcgatagacctagcggcatccccgagagattcagcggcagcaattccggcaataccgccacactgaccatcagcagagtggaagctggcgacgaggccgtgtactactgccaagtgtgggacagcagcagcgatcacgtggtgtttggcggcggaacaaagctgacagtgcttctcgaggacctgaagaacgtgttcccacctgaggtggccgtgttcgagcctagcgaggccgagatcagccacacccagaaagccaccctcgtgtgcctggctaccggcttctaccccgaccatgtggaactgtcttggtgggtcaacggcaaagaggtgcacagcggcgtgtgtaccgacccccagccactgaaagaacagcccgccctgaacgacagccggtactgcctgagcagcagactgagagtgtccgccaccttctggcagaacccccggaaccacttcagatgccaggtgcagttctacggcctgagcgagaacgacgagtggacccaggacagagccaagcccgtgacccagatcgtgtctgccgaagcctggggcagagccgatgatgtgattaagatccactggcaggaaaagaagtccaacaccatcctgggcagccaggaaggcaacaccatgaagaccaacgacacctacatgaagttcagctggctgaccgtgcccgagaagtccctggacaaagaacacagatgcatcgtgcggcacgaaaacaacaagaacggcgtggaccaggaaatcatcttcccacccatcaagaccgatgtgattacaatggaccccaaggacaactgctccaaggacgccaacgataccctgctgctccagctgaccaacaccagcgcctactacatgtacttgttgctgctgctgaagtccgtggtgtacttcgccatcatcacatgctgcctgctgatggctatggtcaagcggaaggacagccggggaagggccaagcgatctggatctggagcaacaaacttctcactactcaaacaagcaggtgacgtggaggagaatcccgggcctactagtatggactggatttggcgcatccttttccttgtcggcgctgctaccggcgcgcattccttcgaacaactccagctgcaagagtctggccctggcctggtcaagcctagcgaaacactgagcctgacctgtaccgtgtctggcggctctatcagctccagcagctatttctggggctggatcagacaacctcctggcaaaggactggaatggatcggctccatctactacagcggcatcacctactacaaccccagcctgaagtccagagtgaccatctccgtggacaccagcaagaaccagttctccctgaagctgagcagcgtgacagccgccgataccgccgtgtattattgtgccagacatgacggcgctgtggccggcctgtttgattattggggacagggcaccctggtcaccgtgtcatctgctacgcgtatccagaaccctgatcctgccgtgtaccagctgcgggatagcaagagcagcgacaagagcgtgtgtctgttcaccgacttcgacagccagaccaacgtgtcccagagcaaggactccgacgtgtacatcaccgataagtgcgtgctggacatgcggagcatggacttcaagagcaactccgccgtggcctggtccaacaagtccgatttcgcctgcgccaacgccttcaacaacagcattatccccgaggacacattcttcccaagccccgagagcagcgactccaccgaccacgtgaagcccaaagagacagagaacaccaagcagcccagcaagagctgccacaagcccaaggccatcgtgcacaccgagaaagtgaacatgatgagcctgaccgtgctgggcctgcggatgctgttcgccaaaaccgtggccgtgaacttcctgctgaccgccaagctgttcttcctcctcaccgcc

SEQ ID NO: 33638 - DNA, 2193 bp, synthetic construct
  source 1..2193: mol_type = other DNA
atggccttaccagtgaccgccttgctcctgccgctggccttgctgctccacgccgccaggccgagctacgtgctgacacagcctccatccgtgtctgtggctccaggacagaccgccagaatcacatgcggcggcaacaacatcggcggcaagagcgtgcactggtatcagcagccacctggacaggctccagtggtggtggtgtacgacgacagcgatagacctagcggcatccccgagagattcagcggcagcaattccggcaataccgccacactgaccatcagcagagtggaagctggcgacgaggccgtgtactactgccaagtgtgggacagcagcagcgatcacgtggtgtttggcggcggaacaaagctgacagtgcttctcgagatccagaaccctgatcctgccgtgtaccagctgcgggatagcaagagcagcgacaagagcgtgtgtctgttcaccgacttcgacagccagaccaacgtgtcccagagcaaggactccgacgtgtacatcaccgataagtgcgtgctggacatgcggagcatggacttcaagagcaactccgccgtggcctggtccaacaagtccgatttcgcctgcgccaacgccttcaacaacagcattatccccgaggacacattcttcccaagccccgagagcagcgactccaccgaccacgtgaagcccaaagagacagagaacaccaagcagcccagcaagagctgccacaagcccaaggccatcgtgcacaccgagaaagtgaacatgatgagcctgaccgtgctgggcctgcggatgctgttcgccaaaaccgtggccgtgaacttcctgctgaccgccaagctgttcttcctcctcaccgcccgcgccaagagaagcggatctggcgtgaagcagaccctgaatttcgacctgctgaagctggctggcgacgtggaatccaacccaggccctactagtatggactggatttggcgcatccttttccttgtcggcgctgctaccggcgcgcattccttcgaacaactccagctgcaagagtctggccctggcctggtcaagcctagcgaaacactgagcctgacctgtaccgtgtctggcggctctatcagctccagcagctatttctggggctggatcagacaacctcctggcaaaggactggaatggatcggctccatctactacagcggcatcacctactacaaccccagcctgaagtccagagtgaccatctccgtggacaccagcaagaaccagttctccctgaagctgagcagcgtgacagccgccgataccgccgtgtattattgtgccagacatgacggcgctgtggccggcctgtttgattattggggacagggcaccctggtcaccgtgtcatctgctacgcgtgaggacctgaagaacgtgttcccacctgaggtggccgtgttcgagcctagcgaggccgagatcagccacacccagaaagccaccctcgtgtgcctggctaccggcttctaccccgaccatgtggaactgtcttggtgggtcaacggcaaagaggtgcacagcggcgtgtgtaccgacccccagccactgaaagaacagcccgccctgaacgacagccggtactgcctgagcagcagactgagagtgtccgccaccttctggcagaacccccggaaccacttcagatgccaggtgcagttctacggcctgagcgagaacgacgagtggacccaggacagagccaagcccgtgacccagatcgtgtctgccgaagcctggggcagagccgatgatgtgattaagatccactggcaggaaaagaagtccaacaccatcctgggcagccaggaaggcaacaccatgaagaccaacgacacctacatgaagttcagctggctgaccgtgcccgagaagtccctggacaaagaacacagatgcatcgtgcggcacgaaaacaacaagaacggcgtggaccaggaaatcatcttcccacccatcaagaccgatgtgattacaatggaccccaaggacaactgctccaaggacgccaacgataccctgctgctccagctgaccaacaccagcgcctactacatgtacttgttgctgctgctgaagtccgtggtgtacttcgccatcatcacatgctgcctgctgatggctatggtcaagcggaaggacagccgggga

SEQ ID NO: 33639 - DNA, 2586 bp, synthetic construct
  source 1..2586: mol_type = other DNA
atggccttaccagtgaccgccttgctcctgccgctggccttgctgctccacgccgccaggccggaagtgcagctggttgaatctggcggaggactggttcagcctggcggatctctgagactgtcttgtgccgccagcggcttcagcttcagcgacttttggatgagctgggtccgacaggcccctggcaaaggacttgaatgggtcgccacaatcagccaggccggcagcgagaaggactacgtggactctgtgaagggcagattcaccatcagccgggacaacgccaagaagtccctgtacctccagatgaacagcctgagagccgaggacaccgccgtgtactattgtgcctctggcgtgtacagcttcgactacagaggccagggcaccctggtcacagtctcttctggtaccggcggaggcggatctggcggcggaggtagcggtggcggaggatctgaattcagctacgtgctgacacagcctccatccgtgtctgtggctccaggacagaccgccagaatcacatgcggcggcaacaacatcggcggcaagagcgtgcactggtatcagcagccacctggacaggctccagtggtggtggtgtacgacgacagcgatagacctagcggcatccccgagagattcagcggcagcaattccggcaataccgccacactgaccatcagcagagtggaagctggcgacgaggccgtgtactactgccaagtgtgggacagcagcagcgatcacgtggtgtttggcggcggaacaaagctgacagtgcttctcgaggacctgaagaacgtgttcccacctgaggtggccgtgttcgagcctagcgaggccgagatcagccacacccagaaagccaccctcgtgtgcctggctaccggcttctaccccgaccatgtggaactgtcttggtgggtcaacggcaaagaggtgcacagcggcgtgtgtaccgacccccagccactgaaagaacagcccgccctgaacgacagccggtactgcctgagcagcagactgagagtgtccgccaccttctggcagaacccccggaaccacttcagatgccaggtgcagttctacggcctgagcgagaacgacgagtggacccaggacagagccaagcccgtgacccagatcgtgtctgccgaagcctggggcagagccgatgatgtgattaagatccactggcaggaaaagaagtccaacaccatcctgggcagccaggaaggcaacaccatgaagaccaacgacacctacatgaagttcagctggctgaccgtgcccgagaagtccctggacaaagaacacagatgcatcgtgcggcacgaaaacaacaagaacggcgtggaccaggaaatcatcttcccacccatcaagaccgatgtgattacaatggaccccaaggacaactgctccaaggacgccaacgataccctgctgctccagctgaccaacaccagcgcctactacatgtacttgttgctgctgctgaagtccgtggtgtacttcgccatcatcacatgctgcctgctgatggctatggtcaagcggaaggacagccggggaagggccaagcgatctggatctggagcaacaaacttctcactactcaaacaagcaggtgacgtggaggagaatcccgggcctactagtatggactggatttggcgcatccttttccttgtcggcgctgctaccggcgcgcattccttcgaacaactccagctgcaagagtctggccctggcctggtcaagcctagcgaaacactgagcctgacctgtaccgtgtctggcggctctatcagctccagcagctatttctggggctggatcagacaacctcctggcaaaggactggaatggatcggctccatctactacagcggcatcacctactacaaccccagcctgaagtccagagtgaccatctccgtggacaccagcaagaaccagttctccctgaagctgagcagcgtgacagccgccgataccgccgtgtattattgtgccagacatgacggcgctgtggccggcctgtttgattattggggacagggcaccctggtcaccgtgtcatctgctacgcgtatccagaaccctgatcctgccgtgtaccagctgcgggatagcaagagcagcgacaagagcgtgtgtctgttcaccgacttcgacagccagaccaacgtgtcccagagcaaggactccgacgtgtacatcaccgataagtgcgtgctggacatgcggagcatggacttcaagagcaactccgccgtggcctggtccaacaagtccgatttcgcctgcgccaacgccttcaacaacagcattatccccgaggacacattcttcccaagccccgagagcagcgactccaccgaccacgtgaagcccaaagagacagagaacaccaagcagcccagcaagagctgccacaagcccaaggccatcgtgcacaccgagaaagtgaacatgatgagcctgaccgtgctgggcctgcggatgctgttcgccaaaaccgtggccgtgaacttcctgctgaccgccaagctgttcttcctcctcaccgcc

SEQ ID NO: 33640 - DNA, 2598 bp, synthetic construct
  source 1..2598: mol_type = other DNA
atggccttaccagtgaccgccttgctcctgccgctggccttgctgctccacgccgccaggccggaagtgcagctggttgaatctggcggaggactggttcagcctggcggatctctgagactgtcttgtgccgccagcggcttcagcttcagcgacttttggatgagctgggtccgacaggcccctggcaaaggacttgaatgggtcgccacaatcagccaggccggcagcgagaaggactacgtggactctgtgaagggcagattcaccatcagccgggacaacgccaagaagtccctgtacctccagatgaacagcctgagagccgaggacaccgccgtgtactattgtgcctctggcgtgtacagcttcgactacagaggccagggcaccctggtcacagtctcttctggtaccggcggaggcggatctggcggcggaggtagcggtggcggaggatctgaattcagctacgtgctgacacagcctccatccgtgtctgtggctccaggacagaccgccagaatcacatgcggcggcaacaacatcggcggcaagagcgtgcactggtatcagcagccacctggacaggctccagtggtggtggtgtacgacgacagcgatagacctagcggcatccccgagagattcagcggcagcaattccggcaataccgccacactgaccatcagcagagtggaagctggcgacgaggccgtgtactactgccaagtgtgggacagcagcagcgatcacgtggtgtttggcggcggaacaaagctgacagtgcttctcgagatccagaaccctgatcctgccgtgtaccagctgcgggatagcaagagcagcgacaagagcgtgtgtctgttcaccgacttcgacagccagaccaacgtgtcccagagcaaggactccgacgtgtacatcaccgataagtgcgtgctggacatgcggagcatggacttcaagagcaactccgccgtggcctggtccaacaagtccgatttcgcctgcgccaacgccttcaacaacagcattatccccgaggacacattcttcccaagccccgagagcagcgactccaccgaccacgtgaagcccaaagagacagagaacaccaagcagcccagcaagagctgccacaagcccaaggccatcgtgcacaccgagaaagtgaacatgatgagcctgaccgtgctgggcctgcggatgctgttcgccaaaaccgtggccgtgaacttcctgctgaccgccaagctgttcttcctcctcaccgcccgcgccaagagaagcggatctggcgtgaagcagaccctgaatttcgacctgctgaagctggctggcgacgtggaatccaacccaggccctactagtatggactggatttggcgcatccttttccttgtcggcgctgctaccggcgcgcattccttcgaacaactccagctgcaagagtctggccctggcctggtcaagcctagcgaaacactgagcctgacctgtaccgtgtctggcggctctatcagctccagcagctatttctggggctggatcagacaacctcctggcaaaggactggaatggatcggctccatctactacagcggcatcacctactacaaccccagcctgaagtccagagtgaccatctccgtggacaccagcaagaaccagttctccctgaagctgagcagcgtgacagccgccgataccgccgtgtattattgtgccagacatgacggcgctgtggccggcctgtttgattattggggacagggcaccctggtcaccgtgtcatctgctacgcgtgaggacctgaagaacgtgttcccacctgaggtggccgtgttcgagcctagcgaggccgagatcagccacacccagaaagccaccctcgtgtgcctggctaccggcttctaccccgaccatgtggaactgtcttggtgggtcaacggcaaagaggtgcacagcggcgtgtgtaccgacccccagccactgaaagaacagcccgccctgaacgacagccggtactgcctgagcagcagactgagagtgtccgccaccttctggcagaacccccggaaccacttcagatgccaggtgcagttctacggcctgagcgagaacgacgagtggacccaggacagagccaagcccgtgacccagatcgtgtctgccgaagcctggggcagagccgatgatgtgattaagatccactggcaggaaaagaagtccaacaccatcctgggcagccaggaaggcaacaccatgaagaccaacgacacctacatgaagttcagctggctgaccgtgcccgagaagtccctggacaaagaacacagatgcatcgtgcggcacgaaaacaacaagaacggcgtggaccaggaaatcatcttcccacccatcaagaccgatgtgattacaatggaccccaaggacaactgctccaaggacgccaacgataccctgctgctccagctgaccaacaccagcgcctactacatgtacttgttgctgctgctgaagtccgtggtgtacttcgccatcatcacatgctgcctgctgatggctatggtcaagcggaaggacagccgggga

SEQ ID NO: 33641 - DNA, 2997 bp, synthetic construct
  source 1..2997: mol_type = other DNA
atggccttaccagtgaccgccttgctcctgccgctggccttgctgctccacgccgccaggccggaagtgcagctggttgaatctggcggaggactggttcagcctggcggatctctgagactgtcttgtgccgccagcggcttcagcttcagcgacttttggatgagctgggtccgacaggcccctggcaaaggacttgaatgggtcgccacaatcagccaggccggcagcgagaaggactacgtggactctgtgaagggcagattcaccatcagccgggacaacgccaagaagtccctgtacctccagatgaacagcctgagagccgaggacaccgccgtgtactattgtgcctctggcgtgtacagcttcgactacagaggccagggcaccctggtcacagtctcttctggtaccggcggaggcggatctggcggcggaggtagcggtggcggaggatctgaattcagctacgtgctgacacagcctccatccgtgtctgtggctccaggacagaccgccagaatcacatgcggcggcaacaacatcggcggcaagagcgtgcactggtatcagcagccacctggacaggctccagtggtggtggtgtacgacgacagcgatagacctagcggcatccccgagagattcagcggcagcaattccggcaataccgccacactgaccatcagcagagtggaagctggcgacgaggccgtgtactactgccaagtgtgggacagcagcagcgatcacgtggtgtttggcggcggaacaaagctgacagtgcttctcgaggacctgaagaacgtgttcccacctgaggtggccgtgttcgagcctagcgaggccgagatcagccacacccagaaagccaccctcgtgtgcctggctaccggcttctaccccgaccatgtggaactgtcttggtgggtcaacggcaaagaggtgcacagcggcgtgtgtaccgacccccagccactgaaagaacagcccgccctgaacgacagccggtactgcctgagcagcagactgagagtgtccgccaccttctggcagaacccccggaaccacttcagatgccaggtgcagttctacggcctgagcgagaacgacgagtggacccaggacagagccaagcccgtgacccagatcgtgtctgccgaagcctggggcagagccgatgatgtgattaagatccactggcaggaaaagaagtccaacaccatcctgggcagccaggaaggcaacaccatgaagaccaacgacacctacatgaagttcagctggctgaccgtgcccgagaagtccctggacaaagaacacagatgcatcgtgcggcacgaaaacaacaagaacggcgtggaccaggaaatcatcttcccacccatcaagaccgatgtgattacaatggaccccaaggacaactgctccaaggacgccaacgataccctgctgctccagctgaccaacaccagcgcctactacatgtacttgttgctgctgctgaagtccgtggtgtacttcgccatcatcacatgctgcctgctgatggctatggtcaagcggaaggacagccggggaagggccaagcgatctggatctggagcaacaaacttctcactactcaaacaagcaggtgacgtggaggagaatcccgggcctactagtatggactggatttggcgcatccttttccttgtcggcgctgctaccggcgcgcattccgggccccagctccagctgcaagagtctggacctggcctggtcaagcctagcgagacactgagcctgacctgtaccgtgtccggcgatagcatcagcagcggcgattactactggggctggatcagacagcctcctggcaaaggactggaatggatcggccacatctactacagcggcgtgacctactacaaccccagcctgaagtccagagtgaccatcagcgtggacaccagccggaaccagttctccctgaagctgtctagcgtgacagccgccgataccgccgtgtactactgcaccagagaggacagcagcaactggcggagtagaggccagggaacactggtcacagttagctctggatccggcggaggcggaagtggaggcggaggatctggcggcggaggctctttcgaacaactccagctgcaagagtctggccctggcctggtcaagcctagcgaaacactgagcctgacctgtaccgtgtctggcggctctatcagctccagcagctatttctggggctggatcagacaacctcctggcaaaggactggaatggatcggctccatctactacagcggcatcacctactacaaccccagcctgaagtccagagtgaccatctccgtggacaccagcaagaaccagttctccctgaagctgagcagcgtgacagccgccgataccgccgtgtattattgtgccagacatgacggcgctgtggccggcctgtttgattattggggacagggcaccctggtcaccgtgtcatctgctacgcgtatccagaaccctgatcctgccgtgtaccagctgcgggatagcaagagcagcgacaagagcgtgtgtctgttcaccgacttcgacagccagaccaacgtgtcccagagcaaggactccgacgtgtacatcaccgataagtgcgtgctggacatgcggagcatggacttcaagagcaactccgccgtggcctggtccaacaagtccgatttcgcctgcgccaacgccttcaacaacagcattatccccgaggacacattcttcccaagccccgagagcagcgactccaccgaccacgtgaagcccaaagagacagagaacaccaagcagcccagcaagagctgccacaagcccaaggccatcgtgcacaccgagaaagtgaacatgatgagcctgaccgtgctgggcctgcggatgctgttcgccaaaaccgtggccgtgaacttcctgctgaccgccaagctgttcttcctcctcaccgcc

SEQ ID NO: 33642 - DNA, 3009 bp, synthetic construct
  source 1..3009: mol_type = other DNA
atggccttaccagtgaccgccttgctcctgccgctggccttgctgctccacgccgccaggccggaagtgcagctggttgaatctggcggaggactggttcagcctggcggatctctgagactgtcttgtgccgccagcggcttcagcttcagcgacttttggatgagctgggtccgacaggcccctggcaaaggacttgaatgggtcgccacaatcagccaggccggcagcgagaaggactacgtggactctgtgaagggcagattcaccatcagccgggacaacgccaagaagtccctgtacctccagatgaacagcctgagagccgaggacaccgccgtgtactattgtgcctctggcgtgtacagcttcgactacagaggccagggcaccctggtcacagtctcttctggtaccggcggaggcggatctggcggcggaggtagcggtggcggaggatctgaattcagctacgtgctgacacagcctccatccgtgtctgtggctccaggacagaccgccagaatcacatgcggcggcaacaacatcggcggcaagagcgtgcactggtatcagcagccacctggacaggctccagtggtggtggtgtacgacgacagcgatagacctagcggcatccccgagagattcagcggcagcaattccggcaataccgccacactgaccatcagcagagtggaagctggcgacgaggccgtgtactactgccaagtgtgggacagcagcagcgatcacgtggtgtttggcggcggaacaaagctgacagtgcttctcgagatccagaaccctgatcctgccgtgtaccagctgcgggatagcaagagcagcgacaagagcgtgtgtctgttcaccgacttcgacagccagaccaacgtgtcccagagcaaggactccgacgtgtacatcaccgataagtgcgtgctggacatgcggagcatggacttcaagagcaactccgccgtggcctggtccaacaagtccgatttcgcctgcgccaacgccttcaacaacagcattatccccgaggacacattcttcccaagccccgagagcagcgactccaccgaccacgtgaagcccaaagagacagagaacaccaagcagcccagcaagagctgccacaagcccaaggccatcgtgcacaccgagaaagtgaacatgatgagcctgaccgtgctgggcctgcggatgctgttcgccaaaaccgtggccgtgaacttcctgctgaccgccaagctgttcttcctcctcaccgcccgcgccaagagaagcggatctggcgtgaagcagaccctgaatttcgacctgctgaagctggctggcgacgtggaatccaacccaggccctactagtatggactggatttggcgcatccttttccttgtcggcgctgctaccggcgcgcattccgggccccagctccagctgcaagagtctggacctggcctggtcaagcctagcgagacactgagcctgacctgtaccgtgtccggcgatagcatcagcagcggcgattactactggggctggatcagacagcctcctggcaaaggactggaatggatcggccacatctactacagcggcgtgacctactacaaccccagcctgaagtccagagtgaccatcagcgtggacaccagccggaaccagttctccctgaagctgtctagcgtgacagccgccgataccgccgtgtactactgcaccagagaggacagcagcaactggcggagtagaggccagggaacactggtcacagttagctctggatccggcggaggcggaagtggaggcggaggatctggcggcggaggctctttcgaacaactccagctgcaagagtctggccctggcctggtcaagcctagcgaaacactgagcctgacctgtaccgtgtctggcggctctatcagctccagcagctatttctggggctggatcagacaacctcctggcaaaggactggaatggatcggctccatctactacagcggcatcacctactacaaccccagcctgaagtccagagtgaccatctccgtggacaccagcaagaaccagttctccctgaagctgagcagcgtgacagccgccgataccgccgtgtattattgtgccagacatgacggcgctgtggccggcctgtttgattattggggacagggcaccctggtcaccgtgtcatctgctacgcgtgaggacctgaagaacgtgttcccacctgaggtggccgtgttcgagcctagcgaggccgagatcagccacacccagaaagccaccctcgtgtgcctggctaccggcttctaccccgaccatgtggaactgtcttggtgggtcaacggcaaagaggtgcacagcggcgtgtgtaccgacccccagccactgaaagaacagcccgccctgaacgacagccggtactgcctgagcagcagactgagagtgtccgccaccttctggcagaacccccggaaccacttcagatgccaggtgcagttctacggcctgagcgagaacgacgagtggacccaggacagagccaagcccgtgacccagatcgtgtctgccgaagcctggggcagagccgatgatgtgattaagatccactggcaggaaaagaagtccaacaccatcctgggcagccaggaaggcaacaccatgaagaccaacgacacctacatgaagttcagctggctgaccgtgcccgagaagtccctggacaaagaacacagatgcatcgtgcggcacgaaaacaacaagaacggcgtggaccaggaaatcatcttcccacccatcaagaccgatgtgattacaatggaccccaaggacaactgctccaaggacgccaacgataccctgctgctccagctgaccaacaccagcgcctactacatgtacttgttgctgctgctgaagtccgtggtgtacttcgccatcatcacatgctgcctgctgatggctatggtcaagcggaaggacagccgggga

SEQ ID NO: 33643 - DNA, 2175 bp, synthetic construct
  source 1..2175: mol_type = other DNA
atggccttaccagtgaccgccttgctcctgccgctggccttgctgctccacgccgccaggccgagctacgtgctgacacagcctccatccgtgtctgtggctccaggacagaccgccagaatcacatgcggcggcaacaacatcggcggcaagagcgtgcactggtatcagcagccacctggacaggctccagtggtggtggtgtacgacgacagcgatagacctagcggcatccccgagagattcagcggcagcaattccggcaataccgccacactgaccatcagcagagtggaagctggcgacgaggccgtgtactactgccaagtgtgggacagcagcagcgatcacgtggtgtttggcggcggaacaaagctgacagtgcttctcgaggacctgaagaacgtgttcccacctgaggtggccgtgttcgagcctagcgaggccgagatcagccacacccagaaagccaccctcgtgtgcctggctaccggcttctaccccgaccatgtggaactgtcttggtgggtcaacggcaaagaggtgcacagcggcgtgtgtaccgacccccagccactgaaagaacagcccgccctgaacgacagccggtactgcctgagcagcagactgagagtgtccgccaccttctggcagaacccccggaaccacttcagatgccaggtgcagttctacggcctgagcgagaacgacgagtggacccaggacagagccaagcccgtgacccagatcgtgtctgccgaagcctggggcagagccgatgatgtgattaagatccactggcaggaaaagaagtccaacaccatcctgggcagccaggaaggcaacaccatgaagaccaacgacacctacatgaagttcagctggctgaccgtgcccgagaagtccctggacaaagaacacagatgcatcgtgcggcacgaaaacaacaagaacggcgtggaccaggaaatcatcttcccacccatcaagaccgatgtgattacaatggaccccaaggacaactgctccaaggacgccaacgataccctgctgctccagctgaccaacaccagcgcctactacatgtacttgttgctgctgctgaagtccgtggtgtacttcgccatcatcacatgctgcctgctgcggagaaccgccttctgctgcaacggcgagaagtctagggccaagcgatctggatctggagcaacaaacttctcactactcaaacaagcaggtgacgtggaggagaatcccgggcctactagtatggactggatttggcgcatccttttccttgtcggcgctgctaccggcgcgcattccttcgaacaactccagctgcaagagtctggccctggcctggtcaagcctagcgaaacactgagcctgacctgtaccgtgtctggcggctctatcagctccagcagctatttctggggctggatcagacaacctcctggcaaaggactggaatggatcggctccatctactacagcggcatcacctactacaaccccagcctgaagtccagagtgaccatctccgtggacaccagcaagaaccagttctccctgaagctgagcagcgtgacagccgccgataccgccgtgtattattgtgccagacatgacggcgctgtggccggcctgtttgattattggggacagggcaccctggtcaccgtgtcatctgctacgcgtatccagaaccctgatcctgccgtgtaccagctgcgggatagcaagagcagcgacaagagcgtgtgtctgttcaccgacttcgacagccagaccaacgtgtcccagagcaaggactccgacgtgtacatcaccgataagtgcgtgctggacatgcggagcatggacttcaagagcaactccgccgtggcctggtccaacaagtccgatttcgcctgcgccaacgccttcaacaacagcattatccccgaggacacattcttcccaagccccgagagcagcgactccaccgaccacgtgaagcccaaagagacagagaacaccaagcagcccagcaagagctgccacaagcccaaggccatcgtgcacaccgagaaagtgaacatgatgagcctgaccgtgctgggcctgcggatgctgttcgccaaaaccgtggccgtgaacttcctgctgaccgccaagctgttcttcctc

SEQ ID NO: 33644 - DNA, 2187 bp, synthetic construct
  source 1..2187: mol_type = other DNA
atggccttaccagtgaccgccttgctcctgccgctggccttgctgctccacgccgccaggccgagctacgtgctgacacagcctccatccgtgtctgtggctccaggacagaccgccagaatcacatgcggcggcaacaacatcggcggcaagagcgtgcactggtatcagcagccacctggacaggctccagtggtggtggtgtacgacgacagcgatagacctagcggcatccccgagagattcagcggcagcaattccggcaataccgccacactgaccatcagcagagtggaagctggcgacgaggccgtgtactactgccaagtgtgggacagcagcagcgatcacgtggtgtttggcggcggaacaaagctgacagtgcttctcgagatccagaaccctgatcctgccgtgtaccagctgcgggatagcaagagcagcgacaagagcgtgtgtctgttcaccgacttcgacagccagaccaacgtgtcccagagcaaggactccgacgtgtacatcaccgataagtgcgtgctggacatgcggagcatggacttcaagagcaactccgccgtggcctggtccaacaagtccgatttcgcctgcgccaacgccttcaacaacagcattatccccgaggacacattcttcccaagccccgagagcagcgactccaccgaccacgtgaagcccaaagagacagagaacaccaagcagcccagcaagagctgccacaagcccaaggccatcgtgcacaccgagaaagtgaacatgatgagcctgaccgtgctgggcctgcggatgctgttcgccaaaaccgtggccgtgaacttcctgctgaccgccaagctgttcttcctccgcgccaagagaagcggatctggcgtgaagcagaccctgaatttcgacctgctgaagctggctggcgacgtggaatccaacccaggccctactagtatggactggatttggcgcatccttttccttgtcggcgctgctaccggcgcgcattccttcgaacaactccagctgcaagagtctggccctggcctggtcaagcctagcgaaacactgagcctgacctgtaccgtgtctggcggctctatcagctccagcagctatttctggggctggatcagacaacctcctggcaaaggactggaatggatcggctccatctactacagcggcatcacctactacaaccccagcctgaagtccagagtgaccatctccgtggacaccagcaagaaccagttctccctgaagctgagcagcgtgacagccgccgataccgccgtgtattattgtgccagacatgacggcgctgtggccggcctgtttgattattggggacagggcaccctggtcaccgtgtcatctgctacgcgtgaggacctgaagaacgtgttcccacctgaggtggccgtgttcgagcctagcgaggccgagatcagccacacccagaaagccaccctcgtgtgcctggctaccggcttctaccccgaccatgtggaactgtcttggtgggtcaacggcaaagaggtgcacagcggcgtgtgtaccgacccccagccactgaaagaacagcccgccctgaacgacagccggtactgcctgagcagcagactgagagtgtccgccaccttctggcagaacccccggaaccacttcagatgccaggtgcagttctacggcctgagcgagaacgacgagtggacccaggacagagccaagcccgtgacccagatcgtgtctgccgaagcctggggcagagccgatgatgtgattaagatccactggcaggaaaagaagtccaacaccatcctgggcagccaggaaggcaacaccatgaagaccaacgacacctacatgaagttcagctggctgaccgtgcccgagaagtccctggacaaagaacacagatgcatcgtgcggcacgaaaacaacaagaacggcgtggaccaggaaatcatcttcccacccatcaagaccgatgtgattacaatggaccccaaggacaactgctccaaggacgccaacgataccctgctgctccagctgaccaacaccagcgcctactacatgtacttgttgctgctgctgaagtccgtggtgtacttcgccatcatcacatgctgcctgctgcggagaaccgccttctgctgcaacggcgagaagtct

SEQ ID NO: 33645 - DNA, 2580 bp, synthetic construct
  source 1..2580: mol_type = other DNA
atggccttaccagtgaccgccttgctcctgccgctggccttgctgctccacgccgccaggccggaagtgcagctggttgaatctggcggaggactggttcagcctggcggatctctgagactgtcttgtgccgccagcggcttcagcttcagcgacttttggatgagctgggtccgacaggcccctggcaaaggacttgaatgggtcgccacaatcagccaggccggcagcgagaaggactacgtggactctgtgaagggcagattcaccatcagccgggacaacgccaagaagtccctgtacctccagatgaacagcctgagagccgaggacaccgccgtgtactattgtgcctctggcgtgtacagcttcgactacagaggccagggcaccctggtcacagtctcttctggtaccggcggaggcggatctggcggcggaggtagcggtggcggaggatctgaattcagctacgtgctgacacagcctccatccgtgtctgtggctccaggacagaccgccagaatcacatgcggcggcaacaacatcggcggcaagagcgtgcactggtatcagcagccacctggacaggctccagtggtggtggtgtacgacgacagcgatagacctagcggcatccccgagagattcagcggcagcaattccggcaataccgccacactgaccatcagcagagtggaagctggcgacgaggccgtgtactactgccaagtgtgggacagcagcagcgatcacgtggtgtttggcggcggaacaaagctgacagtgcttctcgaggacctgaagaacgtgttcccacctgaggtggccgtgttcgagcctagcgaggccgagatcagccacacccagaaagccaccctcgtgtgcctggctaccggcttctaccccgaccatgtggaactgtcttggtgggtcaacggcaaagaggtgcacagcggcgtgtgtaccgacccccagccactgaaagaacagcccgccctgaacgacagccggtactgcctgagcagcagactgagagtgtccgccaccttctggcagaacccccggaaccacttcagatgccaggtgcagttctacggcctgagcgagaacgacgagtggacccaggacagagccaagcccgtgacccagatcgtgtctgccgaagcctggggcagagccgatgatgtgattaagatccactggcaggaaaagaagtccaacaccatcctgggcagccaggaaggcaacaccatgaagaccaacgacacctacatgaagttcagctggctgaccgtgcccgagaagtccctggacaaagaacacagatgcatcgtgcggcacgaaaacaacaagaacggcgtggaccaggaaatcatcttcccacccatcaagaccgatgtgattacaatggaccccaaggacaactgctccaaggacgccaacgataccctgctgctccagctgaccaacaccagcgcctactacatgtacttgttgctgctgctgaagtccgtggtgtacttcgccatcatcacatgctgcctgctgcggagaaccgccttctgctgcaacggcgagaagtctagggccaagcgatctggatctggagcaacaaacttctcactactcaaacaagcaggtgacgtggaggagaatcccgggcctactagtatggactggatttggcgcatccttttccttgtcggcgctgctaccggcgcgcattccttcgaacaactccagctgcaagagtctggccctggcctggtcaagcctagcgaaacactgagcctgacctgtaccgtgtctggcggctctatcagctccagcagctatttctggggctggatcagacaacctcctggcaaaggactggaatggatcggctccatctactacagcggcatcacctactacaaccccagcctgaagtccagagtgaccatctccgtggacaccagcaagaaccagttctccctgaagctgagcagcgtgacagccgccgataccgccgtgtattattgtgccagacatgacggcgctgtggccggcctgtttgattattggggacagggcaccctggtcaccgtgtcatctgctacgcgtatccagaaccctgatcctgccgtgtaccagctgcgggatagcaagagcagcgacaagagcgtgtgtctgttcaccgacttcgacagccagaccaacgtgtcccagagcaaggactccgacgtgtacatcaccgataagtgcgtgctggacatgcggagcatggacttcaagagcaactccgccgtggcctggtccaacaagtccgatttcgcctgcgccaacgccttcaacaacagcattatccccgaggacacattcttcccaagccccgagagcagcgactccaccgaccacgtgaagcccaaagagacagagaacaccaagcagcccagcaagagctgccacaagcccaaggccatcgtgcacaccgagaaagtgaacatgatgagcctgaccgtgctgggcctgcggatgctgttcgccaaaaccgtggccgtgaacttcctgctgaccgccaagctgttcttcctc

SEQ ID NO: 33646 - DNA, 2991 bp, synthetic construct
  source 1..2991: mol_type = other DNA
atggccttaccagtgaccgccttgctcctgccgctggccttgctgctccacgccgccaggccggaagtgcagctggttgaatctggcggaggactggttcagcctggcggatctctgagactgtcttgtgccgccagcggcttcagcttcagcgacttttggatgagctgggtccgacaggcccctggcaaaggacttgaatgggtcgccacaatcagccaggccggcagcgagaaggactacgtggactctgtgaagggcagattcaccatcagccgggacaacgccaagaagtccctgtacctccagatgaacagcctgagagccgaggacaccgccgtgtactattgtgcctctggcgtgtacagcttcgactacagaggccagggcaccctggtcacagtctcttctggtaccggcggaggcggatctggcggcggaggtagcggtggcggaggatctgaattcagctacgtgctgacacagcctccatccgtgtctgtggctccaggacagaccgccagaatcacatgcggcggcaacaacatcggcggcaagagcgtgcactggtatcagcagccacctggacaggctccagtggtggtggtgtacgacgacagcgatagacctagcggcatccccgagagattcagcggcagcaattccggcaataccgccacactgaccatcagcagagtggaagctggcgacgaggccgtgtactactgccaagtgtgggacagcagcagcgatcacgtggtgtttggcggcggaacaaagctgacagtgcttctcgaggacctgaagaacgtgttcccacctgaggtggccgtgttcgagcctagcgaggccgagatcagccacacccagaaagccaccctcgtgtgcctggctaccggcttctaccccgaccatgtggaactgtcttggtgggtcaacggcaaagaggtgcacagcggcgtgtgtaccgacccccagccactgaaagaacagcccgccctgaacgacagccggtactgcctgagcagcagactgagagtgtccgccaccttctggcagaacccccggaaccacttcagatgccaggtgcagttctacggcctgagcgagaacgacgagtggacccaggacagagccaagcccgtgacccagatcgtgtctgccgaagcctggggcagagccgatgatgtgattaagatccactggcaggaaaagaagtccaacaccatcctgggcagccaggaaggcaacaccatgaagaccaacgacacctacatgaagttcagctggctgaccgtgcccgagaagtccctggacaaagaacacagatgcatcgtgcggcacgaaaacaacaagaacggcgtggaccaggaaatcatcttcccacccatcaagaccgatgtgattacaatggaccccaaggacaactgctccaaggacgccaacgataccctgctgctccagctgaccaacaccagcgcctactacatgtacttgttgctgctgctgaagtccgtggtgtacttcgccatcatcacatgctgcctgctgcggagaaccgccttctgctgcaacggcgagaagtctagggccaagcgatctggatctggagcaacaaacttctcactactcaaacaagcaggtgacgtggaggagaatcccgggcctactagtatggactggatttggcgcatccttttccttgtcggcgctgctaccggcgcgcattccgggccccagctccagctgcaagagtctggacctggcctggtcaagcctagcgagacactgagcctgacctgtaccgtgtccggcgatagcatcagcagcggcgattactactggggctggatcagacagcctcctggcaaaggactggaatggatcggccacatctactacagcggcgtgacctactacaaccccagcctgaagtccagagtgaccatcagcgtggacaccagccggaaccagttctccctgaagctgtctagcgtgacagccgccgataccgccgtgtactactgcaccagagaggacagcagcaactggcggagtagaggccagggaacactggtcacagttagctctggatccggcggaggcggaagtggaggcggaggatctggcggcggaggctctttcgaacaactccagctgcaagagtctggccctggcctggtcaagcctagcgaaacactgagcctgacctgtaccgtgtctggcggctctatcagctccagcagctatttctggggctggatcagacaacctcctggcaaaggactggaatggatcggctccatctactacagcggcatcacctactacaaccccagcctgaagtccagagtgaccatctccgtggacaccagcaagaaccagttctccctgaagctgagcagcgtgacagccgccgataccgccgtgtattattgtgccagacatgacggcgctgtggccggcctgtttgattattggggacagggcaccctggtcaccgtgtcatctgctacgcgtatccagaaccctgatcctgccgtgtaccagctgcgggatagcaagagcagcgacaagagcgtgtgtctgttcaccgacttcgacagccagaccaacgtgtcccagagcaaggactccgacgtgtacatcaccgataagtgcgtgctggacatgcggagcatggacttcaagagcaactccgccgtggcctggtccaacaagtccgatttcgcctgcgccaacgccttcaacaacagcattatccccgaggacacattcttcccaagccccgagagcagcgactccaccgaccacgtgaagcccaaagagacagagaacaccaagcagcccagcaagagctgccacaagcccaaggccatcgtgcacaccgagaaagtgaacatgatgagcctgaccgtgctgggcctgcggatgctgttcgccaaaaccgtggccgtgaacttcctgctgaccgccaagctgttcttcctc

SEQ ID NO: 33647 - DNA, 1869 bp, synthetic construct
  source 1..1869: mol_type = other DNA
atggccttaccagtgaccgccttgctcctgccgctggccttgctgctccacgccgccaggccgagctacgtgctgacacagcctccatccgtgtctgtggctccaggacagaccgccagaatcacatgcggcggcaacaacatcggcggcaagagcgtgcactggtatcagcagccacctggacaggctccagtggtggtggtgtacgacgacagcgatagacctagcggcatccccgagagattcagcggcagcaattccggcaataccgccacactgaccatcagcagagtggaagctggcgacgaggccgtgtactactgccaagtgtgggacagcagcagcgatcacgtggtgtttggcggcggaacaaagctgacagtgcttctcgaggacctgaagaacgtgttcccacctgaggtggccgtgttcgagcctagcgaggccgagatcagccacacccagaaagccaccctcgtgtgcctggctaccggcttctaccccgaccatgtggaactgtcttggtgggtcaacggcaaagaggtgcacagcggcgtgtctaccgacccccagccactgaaagaacagcccgccctgaacgacagccggtactgcctgagcagcagactgagagtgtccgccaccttctggcagaacccccggaaccacttcagatgccaggtgcagttctacggcctgagcgagaacgacgagtggacccaggacagagccaagcccgtgacccagatcgtgtctgccgaagcctggggcagagccgattgcgacgtgaagctggtggaaaagagcttcgagacagacaccaacctgaacttccagaacctgagcgtgatcggcttcagaatcctgctgctgaaagtggccggctttaacctgctgatgaccctgcggctgtggtccagcagggccaagcgatctggatctggagcaacaaacttctcactactcaaacaagcaggtgacgtggaggagaatcccgggcctactagtatggactggatttggcgcatccttttccttgtcggcgctgctaccggcgcgcattccttcgaacaactccagctgcaagagtctggccctggcctggtcaagcctagcgaaacactgagcctgacctgtaccgtgtctggcggctctatcagctccagcagctatttctggggctggatcagacaacctcctggcaaaggactggaatggatcggctccatctactacagcggcatcacctactacaaccccagcctgaagtccagagtgaccatctccgtggacaccagcaagaaccagttctccctgaagctgagcagcgtgacagccgccgataccgccgtgtattattgtgccagacatgacggcgctgtggccggcctgtttgattattggggacagggcaccctggtcaccgtgtcatctgctacgcgtatccagaaccctgatcctgccgtgtaccagctgcgggatagcaagagcagcgacaagagcgtgtgtctgttcaccgacttcgacagccagaccaacgtgtcccagagcaaggactccgacgtgtacatcaccgataagaccgtgctggacatgcggagcatggacttcaagagcaactccgccgtggcctggtccaacaagtccgatttcgcctgcgccaacgccttcaacaacagcattatccccgaggacacattcttcccaagccccgagagcagctgcggctttaccagcgagagctaccagcagggcgtgctgagcgccaccatcctgtacgagatcctgctgggcaaggccaccctgtacgccgtgctggtgtctgccctggtgctgatggctatggtcaagcggaaggacagccgggga

SEQ ID NO: 33648 - DNA, 1869 bp, synthetic construct
  source 1..1869: mol_type = other DNA
atggccttaccagtgaccgccttgctcctgccgctggccttgctgctccacgccgccaggccgagctacgtgctgacacagcctccatccgtgtctgtggctccaggacagaccgccagaatcacatgcggcggcaacaacatcggcggcaagagcgtgcactggtatcagcagccacctggacaggctccagtggtggtggtgtacgacgacagcgatagacctagcggcatccccgagagattcagcggcagcaattccggcaataccgccacactgaccatcagcagagtggaagctggcgacgaggccgtgtactactgccaagtgtgggacagcagcagcgatcacgtggtgtttggcggcggaacaaagctgacagtgcttctcgaggacctgaagaacgtgttcccacctgaggtggccgtgttcgagcctagcgaggccgagatcagccacacccagaaagccaccctcgtgtgcctggctaccggcttctaccccgaccatgtggaactgtcttggtgggtcaacggcaaagaggtgcacagcggcgtgtctaccgacccccagccactgaaagaacagcccgccctgaacgacagccggtactgcctgagcagcagactgagagtgtccgccaccttctggcagaacccccggaaccacttcagatgccaggtgcagttctacggcctgagcgagaacgacgagtggacccaggacagagccaagcccgtgacccagatcgtgtctgccgaagcctggggcagagccgattgcggctttaccagcgagagctaccagcagggcgtgctgagcgccaccaacctgagcgtgatcggcttcagaatcctgctgctgaaagtggccggctttaacctgctgatgaccctgcggctgtggtccagcagggccaagcgatctggatctggagcaacaaacttctcactactcaaacaagcaggtgacgtggaggagaatcccgggcctactagtatggactggatttggcgcatccttttccttgtcggcgctgctaccggcgcgcattccttcgaacaactccagctgcaagagtctggccctggcctggtcaagcctagcgaaacactgagcctgacctgtaccgtgtctggcggctctatcagctccagcagctatttctggggctggatcagacaacctcctggcaaaggactggaatggatcggctccatctactacagcggcatcacctactacaaccccagcctgaagtccagagtgaccatctccgtggacaccagcaagaaccagttctccctgaagctgagcagcgtgacagccgccgataccgccgtgtattattgtgccagacatgacggcgctgtggccggcctgtttgattattggggacagggcaccctggtcaccgtgtcatctgctacgcgtatccagaaccctgatcctgccgtgtaccagctgcgggatagcaagagcagcgacaagagcgtgtgtctgttcaccgacttcgacagccagaccaacgtgtcccagagcaaggactccgacgtgtacatcaccgataagaccgtgctggacatgcggagcatggacttcaagagcaactccgccgtggcctggtccaacaagtccgatttcgcctgcgccaacgccttcaacaacagcattatccccgaggacacattcttcccaagccccgagagcagctgcgacgtgaagctggtggaaaagagcttcgagacagacaccaacctgaacttccagatcctgtacgagatcctgctgggcaaggccaccctgtacgccgtgctggtgtctgccctggtgctgatggctatggtcaagcggaaggacagccgggga

SEQ ID NO: 33649 - DNA, 2181 bp, synthetic construct
  source 1..2181: mol_type = other DNA
atggccttaccagtgaccgccttgctcctgccgctggccttgctgctccacgccgccaggccgagctacgtgctgacacagcctccatccgtgtctgtggctccaggacagaccgccagaatcacatgcggcggcaacaacatcggcggcaagagcgtgcactggtatcagcagccacctggacaggctccagtggtggtggtgtacgacgacagcgatagacctagcggcatccccgagagattcagcggcagcaattccggcaataccgccacactgaccatcagcagagtggaagctggcgacgaggccgtgtactactgccaagtgtgggacagcagcagcgatcacgtggtgtttggcggcggaacaaagctgacagtgcttctcgaggacctgaagaacgtgttcccacctgaggtggccgtgttcgagcctagcgaggccgagatcagccacacccagaaagccaccctcgtgtgcctggctaccggcttctaccccgaccatgtggaactgtcttggtgggtcaacggcaaagaggtgcacagcggcgtgtctaccgacccccagccactgaaagaacagcccgccctgaacgacagccggtactgcctgagcagcagactgagagtgtccgccaccttctggcagaacccccggaaccacttcagatgccaggtgcagttctacggcctgagcgagaacgacgagtggacccaggacagagccaagcccgtgacccagatcgtgtctgccgaagcctggggcagagccgatgatgtgattaagatccactggcaggaaaagaagtccaacaccatcctgggcagccaggaaggcaacaccatgaagaccaacgacacctacatgaagttcagctggctgaccgtgcccgagaagtccctggacaaagaacacagatgcatcgtgcggcacgaaaacaacaagaacggcgtggaccaggaaatcatcttcccacccatcaagaccgatgtgattacaatggaccccaaggacaactgctccaaggacgccaacgataccctgctgctccagctgaccaacaccagcgcctactacatgtacttgttgctgctgctgaagtccgtggtgtacttcgccatcatcacatgctgcctgctgatggctatggtcaagcggaaggacagccggggaagggccaagcgatctggatctggagcaacaaacttctcactactcaaacaagcaggtgacgtggaggagaatcccgggcctactagtatggactggatttggcgcatccttttccttgtcggcgctgctaccggcgcgcattccttcgaacaactccagctgcaagagtctggccctggcctggtcaagcctagcgaaacactgagcctgacctgtaccgtgtctggcggctctatcagctccagcagctatttctggggctggatcagacaacctcctggcaaaggactggaatggatcggctccatctactacagcggcatcacctactacaaccccagcctgaagtccagagtgaccatctccgtggacaccagcaagaaccagttctccctgaagctgagcagcgtgacagccgccgataccgccgtgtattattgtgccagacatgacggcgctgtggccggcctgtttgattattggggacagggcaccctggtcaccgtgtcatctgctacgcgtatccagaaccctgatcctgccgtgtaccagctgcgggatagcaagagcagcgacaagagcgtgtgtctgttcaccgacttcgacagccagaccaacgtgtcccagagcaaggactccgacgtgtacatcaccgataagaccgtgctggacatgcggagcatggacttcaagagcaactccgccgtggcctggtccaacaagtccgatttcgcctgcgccaacgccttcaacaacagcattatccccgaggacacattcttcccaagccccgagagcagcgactccaccgaccacgtgaagcccaaagagacagagaacaccaagcagcccagcaagagctgccacaagcccaaggccatcgtgcacaccgagaaagtgaacatgatgagcctgaccgtgctgggcctgcggatgctgttcgccaaaaccgtggccgtgaacttcctgctgaccgccaagctgttcttcctcctcaccgcc

SEQ ID NO: 33650 - DNA, 2175 bp, synthetic construct
  source 1..2175: mol_type = other DNA
atggccttaccagtgaccgccttgctcctgccgctggccttgctgctccacgccgccaggccgagctacgtgctgacacagcctccatccgtgtctgtggctccaggacagaccgccagaatcacatgcggcggcaacaacatcggcggcaagagcgtgcactggtatcagcagccacctggacaggctccagtggtggtggtgtacgacgacagcgatagacctagcggcatccccgagagattcagcggcagcaattccggcaataccgccacactgaccatcagcagagtggaagctggcgacgaggccgtgtactactgccaagtgtgggacagcagcagcgatcacgtggtgtttggcggcggaacaaagctgacagtgcttctcgaggacctgaagaacgtgttcccacctgaggtggccgtgttcgagcctagcgaggccgagatcagccacacccagaaagccaccctcgtgtgcctggctaccggcttctaccccgaccatgtggaactgtcttggtgggtcaacggcaaagaggtgcacagcggcgtgtctaccgacccccagccactgaaagaacagcccgccctgaacgacagccggtactgcctgagcagcagactgagagtgtccgccaccttctggcagaacccccggaaccacttcagatgccaggtgcagttctacggcctgagcgagaacgacgagtggacccaggacagagccaagcccgtgacccagatcgtgtctgccgaagcctggggcagagccgatgatgtgattaagatccactggcaggaaaagaagtccaacaccatcctgggcagccaggaaggcaacaccatgaagaccaacgacacctacatgaagttcagctggctgaccgtgcccgagaagtccctggacaaagaacacagatgcatcgtgcggcacgaaaacaacaagaacggcgtggaccaggaaatcatcttcccacccatcaagaccgatgtgattacaatggaccccaaggacaactgctccaaggacgccaacgataccctgctgctccagctgaccaacaccagcgcctactacatgtacttgttgctgctgctgaagtccgtggtgtacttcgccatcatcacatgctgcctgctgcggagaaccgccttctgctgcaacggcgagaagtctagggccaagcgatctggatctggagcaacaaacttctcactactcaaacaagcaggtgacgtggaggagaatcccgggcctactagtatggactggatttggcgcatccttttccttgtcggcgctgctaccggcgcgcattccttcgaacaactccagctgcaagagtctggccctggcctggtcaagcctagcgaaacactgagcctgacctgtaccgtgtctggcggctctatcagctccagcagctatttctggggctggatcagacaacctcctggcaaaggactggaatggatcggctccatctactacagcggcatcacctactacaaccccagcctgaagtccagagtgaccatctccgtggacaccagcaagaaccagttctccctgaagctgagcagcgtgacagccgccgataccgccgtgtattattgtgccagacatgacggcgctgtggccggcctgtttgattattggggacagggcaccctggtcaccgtgtcatctgctacgcgtatccagaaccctgatcctgccgtgtaccagctgcgggatagcaagagcagcgacaagagcgtgtgtctgttcaccgacttcgacagccagaccaacgtgtcccagagcaaggactccgacgtgtacatcaccgataagaccgtgctggacatgcggagcatggacttcaagagcaactccgccgtggcctggtccaacaagtccgatttcgcctgcgccaacgccttcaacaacagcattatccccgaggacacattcttcccaagccccgagagcagcgactccaccgaccacgtgaagcccaaagagacagagaacaccaagcagcccagcaagagctgccacaagcccaaggccatcgtgcacaccgagaaagtgaacatgatgagcctgaccgtgctgggcctgcggatgctgttcgccaaaaccgtggccgtgaacttcctgctgaccgccaagctgttcttcctc

SEQ ID NO: 33651 - DNA, 2607 bp, synthetic construct
  source 1..2607: mol_type = other DNA
atggccttaccagtgaccgccttgctcctgccgctggccttgctgctccacgccgccaggccgctcgaggaggacctgaagaacgtgttcccacctgaggtggccgtgttcgagcctagcgaggccgagatcagccacacccagaaagccaccctcgtgtgcctggctaccggcttctaccccgaccatgtggaactgtcttggtgggtcaacggcaaagaggtgcacagcggcgtgtgtaccgacccccagccactgaaagaacagcccgccctgaacgacagccggtactgcctgagcagcagactgagagtgtccgccaccttctggcagaacccccggaaccacttcagatgccaggtgcagttctacggcctgagcgagaacgacgagtggacccaggacagagccaagcccgtgacccagatcgtgtctgccgaagcctggggcagagccgattgcggctttaccagcgagagctaccagcagggcgtgctgagcgccaccaacctgagcgtgatcggcttcagaatcctgctgctgaaagtggccggctttaacctgctgatgaccctgcggctgtggtccagcagggccaagcgatctggatctggagcaacaaacttctcactactcaaacaagcaggtgacgtggaggagaatcccgggcctactagcatggccttaccagtgaccgccttgctcctgccgctggccttgctgctccacgccgccaggccgagctacgtgctgacacagcctccatccgtgtctgtggctccaggacagaccgccagaatcacatgcggcggcaacaacatcggcggcaagagcgtgcactggtatcagcagccacctggacaggctccagtggtggtggtgtacgacgacagcgatagacctagcggcatccccgagagattcagcggcagcaattccggcaataccgccacactgaccatcagcagagtggaagctggcgacgaggccgtgtactactgccaagtgtgggacagcagcagcgatcacgtggtgtttggcggcggaacaaagctgacagtgcttggcggaggcggaagtggaggcggaggatctggcggcggaggctctcaactccagctgcaagagtctggccctggcctggtcaagcctagcgaaacactgagcctgacctgtaccgtgtctggcggctctatcagctccagcagctatttctggggctggatcagacaacctcctggcaaaggactggaatggatcggctccatctactacagcggcatcacctactacaaccccagcctgaagtccagagtgaccatctccgtggacaccagcaagaaccagttctccctgaagctgagcagcgtgacagccgccgataccgccgtgtattattgtgccagacatgacggcgctgtggccggcctgtttgattattggggacagggcaccctggtcaccgtgtcatctgctacgcgtatccagaaccctgatcctgccgtgtaccagctgcgggatagcaagagcagcgacaagagcgtgtgtctgttcaccgacttcgacagccagaccaacgtgtcccagagcaaggactccgacgtgtacatcaccgataagtgcgtgctggacatgcggagcatggacttcaagagcaactccgccgtggcctggtccaacaagtccgatttcgcctgcgccaacgccttcaacaacagcattatccccgaggacacattcttcccaagccccgagagcagctgcgacgtgaagctggtggaaaagagcttcgagacagacaccaacctgaacttccagatcctgtacgaggtgatcggcttcagaatcctgctgctgaaagtggccggctttaacctgctgatgaccctgcggctgtggtccagccgcgccaagagaagcggatctggcgtgaagcagaccctgaatttcgacctgctgaagctggctggcgacgtggaatccaacccaggcccttctagaggccatatgaccgagtacaagcccacggtgcgcctcgccacccgcgacgacgtccccagggccgtacgcaccctcgccgccgcgttcgccgactaccccgccacgcgccacaccgtcgatccggaccgccacatcgagcgggtcaccgagctgcaagaactcttcctcacgcgcgtcgggctcgacatcggcaaggtgtgggtcgcggacgacggcgccgcggtggcggtctggaccacgccggagagcgtcgaagcgggggcggtgttcgccgagatcggcccgcgcatggccgagttgagcggttcccggctggccgcgcagcaacagatggaaggcctcctggcgccgcaccggcccaaggagcccgcgtggttcctggccaccgtcggcgtctcgcccgaccaccagggcaagggtctgggcagcgccgtcgtgctccccggagtggaggcggccgagcgcgccggggtgcccgccttcctggagacctccgcgccccgcaacctccccttctacgagcggctcggcttcaccgtcaccgccgacgtcgaggtgcccgaaggaccgcgcacctggtgcatgacccgcaagcccggtgcctga

SEQ ID NO: 33652 - DNA, 2607 bp, synthetic construct
  source 1..2607: mol_type = other DNA
atggccttaccagtgaccgccttgctcctgccgctggccttgctgctccacgccgccaggccgctcgagatccagaaccctgatcctgccgtgtaccagctgcgggatagcaagagcagcgacaagagcgtgtgtctgttcaccgacttcgacagccagaccaacgtgtcccagagcaaggactccgacgtgtacatcaccgataagtgcgtgctggacatgcggagcatggacttcaagagcaactccgccgtggcctggtccaacaagtccgatttcgcctgcgccaacgccttcaacaacagcattatccccgaggacacattcttcccaagccccgagagcagctgcgacgtgaagctggtggaaaagagcttcgagacagacaccaacctgaacttccagatcctgtacgaggtgatcggcttcagaatcctgctgctgaaagtggccggctttaacctgctgatgaccctgcggctgtggtccagcagggccaagcgatctggatctggagcaacaaacttctcactactcaaacaagcaggtgacgtggaggagaatcccgggcctactagcatggccttaccagtgaccgccttgctcctgccgctggccttgctgctccacgccgccaggccgagctacgtgctgacacagcctccatccgtgtctgtggctccaggacagaccgccagaatcacatgcggcggcaacaacatcggcggcaagagcgtgcactggtatcagcagccacctggacaggctccagtggtggtggtgtacgacgacagcgatagacctagcggcatccccgagagattcagcggcagcaattccggcaataccgccacactgaccatcagcagagtggaagctggcgacgaggccgtgtactactgccaagtgtgggacagcagcagcgatcacgtggtgtttggcggcggaacaaagctgacagtgcttggcggaggcggaagtggaggcggaggatctggcggcggaggctctcaactccagctgcaagagtctggccctggcctggtcaagcctagcgaaacactgagcctgacctgtaccgtgtctggcggctctatcagctccagcagctatttctggggctggatcagacaacctcctggcaaaggactggaatggatcggctccatctactacagcggcatcacctactacaaccccagcctgaagtccagagtgaccatctccgtggacaccagcaagaaccagttctccctgaagctgagcagcgtgacagccgccgataccgccgtgtattattgtgccagacatgacggcgctgtggccggcctgtttgattattggggacagggcaccctggtcaccgtgtcatctgctacgcgtgaggacctgaagaacgtgttcccacctgaggtggccgtgttcgagcctagcgaggccgagatcagccacacccagaaagccaccctcgtgtgcctggctaccggcttctaccccgaccatgtggaactgtcttggtgggtcaacggcaaagaggtgcacagcggcgtgtgtaccgacccccagccactgaaagaacagcccgccctgaacgacagccggtactgcctgagcagcagactgagagtgtccgccaccttctggcagaacccccggaaccacttcagatgccaggtgcagttctacggcctgagcgagaacgacgagtggacccaggacagagccaagcccgtgacccagatcgtgtctgccgaagcctggggcagagccgattgcggctttaccagcgagagctaccagcagggcgtgctgagcgccaccaacctgagcgtgatcggcttcagaatcctgctgctgaaagtggccggctttaacctgctgatgaccctgcggctgtggtccagccgcgccaagagaagcggatctggcgtgaagcagaccctgaatttcgacctgctgaagctggctggcgacgtggaatccaacccaggcccttctagaggccatatgaccgagtacaagcccacggtgcgcctcgccacccgcgacgacgtccccagggccgtacgcaccctcgccgccgcgttcgccgactaccccgccacgcgccacaccgtcgatccggaccgccacatcgagcgggtcaccgagctgcaagaactcttcctcacgcgcgtcgggctcgacatcggcaaggtgtgggtcgcggacgacggcgccgcggtggcggtctggaccacgccggagagcgtcgaagcgggggcggtgttcgccgagatcggcccgcgcatggccgagttgagcggttcccggctggccgcgcagcaacagatggaaggcctcctggcgccgcaccggcccaaggagcccgcgtggttcctggccaccgtcggcgtctcgcccgaccaccagggcaagggtctgggcagcgccgtcgtgctccccggagtggaggcggccgagcgcgccggggtgcccgccttcctggagacctccgcgccccgcaacctccccttctacgagcggctcggcttcaccgtcaccgccgacgtcgaggtgcccgaaggaccgcgcacctggtgcatgacccgcaagcccggtgcctga

SEQ ID NO: 33653 - DNA, 2607 bp, synthetic construct; identical to SEQ ID NO: 33651
  source 1..2607: mol_type = other DNA

SEQ ID NO: 33654 - DNA, 2931 bp, synthetic construct
  source 1..2931: mol_type = other DNA
atggccttaccagtgaccgccttgctcctgccgctggccttgctgctccacgccgccaggccgctcgaggaggacctgaagaacgtgttcccacctgaggtggccgtgttcgagcctagcgaggccgagatcagccacacccagaaagccaccctcgtgtgcctggctaccggcttctaccccgaccatgtggaactgtcttggtgggtcaacggcaaagaggtgcacagcggcgtgtctaccgacccccagccactgaaagaacagcccgccctgaacgacagccggtactgcctgagcagcagactgagagtgtccgccaccttctggcagaacccccggaaccacttcagatgccaggtgcagttctacggcctgagcgagaacgacgagtggacccaggacagagccaagcccgtgacccagatcgtgtctgccgaagcctggggcagagccgatgatgtgattaagatccactggcaggaaaagaagtccaacaccatcctgggcagccaggaaggcaacaccatgaagaccaacgacacctacatgaagttcagctggctgaccgtgcccgagaagtccctggacaaagaacacagatgcatcgtgcggcacgaaaacaacaagaacggcgtggaccaggaaatcatcttcccacccatcaagaccgatgtgattacaatggaccccaaggacaactgctccaaggacgccaacgataccctgctgctccagctgaccaacaccagcgcctactacatgtacttgttgctgctgctgaagtccgtggtgtacttcgccatcatcacatgctgcctgctgatggctatggtcaagcggaaggacagccggggaagggccaagcgatctggatctggagcaacaaacttctcactactcaaacaagcaggtgacgtggaggagaatcccgggcctactagcatggccttaccagtgaccgccttgctcctgccgctggccttgctgctccacgccgccaggccgagctacgtgctgacacagcctccatccgtgtctgtggctccaggacagaccgccagaatcacatgcggcggcaacaacatcggcggcaagagcgtgcactggtatcagcagccacctggacaggctccagtggtggtggtgtacgacgacagcgatagacctagcggcatccccgagagattcagcggcagcaattccggcaataccgccacactgaccatcagcagagtggaagctggcgacgaggccgtgtactactgccaagtgtgggacagcagcagcgatcacgtggtgtttggcggcggaacaaagctgacagtgcttggcggaggcggaagtggaggcggaggatctggcggcggaggctctcaactccagctgcaagagtctggccctggcctggtcaagcctagcgaaacactgagcctgacctgtaccgtgtctggcggctctatcagctccagcagctatttctggggctggatcagacaacctcctggcaaaggactggaatggatcggctccatctactacagcggcatcacctactacaaccccagcctgaagtccagagtgaccatctccgtggacaccagcaagaaccagttctccctgaagctgagcagcgtgacagccgccgataccgccgtgtattattgtgccagacatgacggcgctgtggccggcctgtttgattattggggacagggcaccctggtcaccgtgtcatctgctacgcgtatccagaaccctgatcctgccgtgtaccagctgcgggatagcaagagcagcgacaagagcgtgtgtctgttcaccgacttcgacagccagaccaacgtgtcccagagcaaggactccgacgtgtacatcaccgataagaccgtgctggacatgcggagcatggacttcaagagcaactccgccgtggcctggtccaacaagtccgatttcgcctgcgccaacgccttcaacaacagcattatccccgaggacacattcttcccaagccccgagagcagcgactccaccgaccacgtgaagcccaaagagacagagaacaccaagcagcccagcaagagctgccacaagcccaaggccatcgtgcacaccgagaaagtgaacatgatgagcctgaccgtgctgggcctgcggatgctgttcgccaaaaccgtggccgtgaacttcctgctgaccgccaagctgttcttcctcctcaccgcccgcgccaagagaagcggatctggcgtgaagcagaccctgaatttcgacctgctgaagctggctggcgacgtggaatccaacccaggcccttctagaggccatatgaccgagtacaagcccacggtgcgcctcgccacccgcgacgacgtccccagggccgtacgcaccctcgccgccgcgttcgccgactaccccgccacgcgccacaccgtcgatccggaccgccacatcgagcgggtcaccgagctgcaagaactcttcctcacgcgcgtcgggctcgacatcggcaaggtgtgggtcgcggacgacggcgccgcggtggcggtctggaccacgccggagagcgtcgaagcgggggcggtgttcgccgagatcggcccgcgcatggccgagttgagcggttcccggctggccgcgcagcaacagatggaaggcctcctggcgccgcaccggcccaaggagcccgcgtggttcctggccaccgtcggcgtctcgcccgaccaccagggcaagggtctgggcagcgccgtcgtgctccccggagtggaggcggccgagcgcgccggggtgcccgccttcctggagacctccgcgccccgcaacctccccttctacgagcggctcggcttcaccgtcaccgccgacgtcgaggtgcccgaaggaccgcgcacctggtgcatgacccgcaagcccggtgcctga

SEQ ID NO: 33655 - DNA, 2931 bp, synthetic construct
  source 1..2931: mol_type = other DNA
atggccttaccagtgaccgccttgctcctgccgctggccttgctgctccacgccgccaggccgctcgagatccagaaccctgatcctgccgtgtaccagctgcgggatagcaagagcagcgacaagagcgtgtgtctgttcaccgacttcgacagccagaccaacgtgtcccagagcaaggactccgacgtgtacatcaccgataagaccgtgctggacatgcggagcatggacttcaagagcaactccgccgtggcctggtccaacaagtccgatttcgcctgcgccaacgccttcaacaacagcattatccccgaggacacattcttcccaagccccgagagcagcgactccaccgaccacgtgaagcccaaagagacagagaacaccaagcagcccagcaagagctgccacaagcccaaggccatcgtgcacaccgagaaagtgaacatgatgagcctgaccgtgctgggcctgcggatgctgttcgccaaaaccgtggccgtgaacttcctgctgaccgccaagctgttcttcctcctcaccgccagggccaagcgatctggatctggagcaacaaacttctcactactcaaacaagcaggtgacgtggaggagaatcccgggcctactagcatggccttaccagtgaccgccttgctcctgccgctggccttgctgctccacgccgccaggccgagctacgtgctgacacagcctccatccgtgtctgtggctccaggacagaccgccagaatcacatgcggcggcaacaacatcggcggcaagagcgtgcactggtatcagcagccacctggacaggctccagtggtggtggtgtacgacgacagcgatagacctagcggcatccccgagagattcagcggcagcaattccggcaataccgccacactgaccatcagcagagtggaagctggcgacgaggccgtgtactactgccaagtgtgggacagcagcagcgatcacgtggtgtttggcggcggaacaaagctgacagtgcttggcggaggcggaagtggaggcggaggatctggcggcggaggctctcaactccagctgcaagagtctggccctggcctggtcaagcctagcgaaacactgagcctgacctgtaccgtgtctggcggctctatcagctccagcagctatttctggggctggatcagacaacctcctggcaaaggactggaatggatcggctccatctactacagcggcatcacctactacaaccccagcctgaagtccagagtgaccatctccgtggacaccagcaagaaccagttctccctgaagctgagcagcgtgacagccgccgataccgccgtgtattattgtgccagacatgacggcgctgtggccggcctgtttgattattggggacagggcaccctggtcaccgtgtcatctgctacgcgtgaggacctgaagaacgtgttcccacctgaggtggccgtgttcgagcctagcgaggccgagatcagccacacccagaaagccaccctcgtgtgcctggctaccggcttctaccccgaccatgtggaactgtcttggtgggtcaacggcaaagaggtgcacagcggcgtgtctaccgacccccagccactgaaagaacagcccgccctgaacgacagccggtactgcctgagcagcagactgagagtgtccgccaccttctggcagaacccccggaaccacttcagatgccaggtgcagttctacggcctgagcgagaacgacgagtggacccaggacagagccaagcccgtgacccagatcgtgtctgccgaagcctggggcagagccgatgatgtgattaagatccactggcaggaaaagaagtccaacaccatcctgggcagccaggaaggcaacaccatgaagaccaacgacacctacatgaagttcagctggctgaccgtgcccgagaagtccctggacaaagaacacagatgcatcgtgcggcacgaaaacaacaagaacggcgtggaccaggaaatcatcttcccacccatcaagaccgatgtgattacaatggaccccaaggacaactgctccaaggacgccaacgataccctgctgctccagctgaccaacaccagcgcctactacatgtacttgttgctgctgctgaagtccgtggtgtacttcgccatcatcacatgctgcctgctgatggctatggtcaagcggaaggacagccggggacgcgccaagagaagcggatctggcgtgaagcagaccctgaatttcgacctgctgaagctggctggcgacgtggaatccaacccaggcccttctagaggccatatgaccgagtacaagcccacggtgcgcctcgccacccgcgacgacgtccccagggccgtacgcaccctcgccgccgcgttcgccgactaccccgccacgcgccacaccgtcgatccggaccgccacatcgagcgggtcaccgagctgcaagaactcttcctcacgcgcgtcgggctcgacatcggcaaggtgtgggtcgcggacgacggcgccgcggtggcggtctggaccacgccggagagcgtcgaagcgggggcggtgttcgccgagatcggcccgcgcatggccgagttgagcggttcccggctggccgcgcagcaacagatggaaggcctcctggcgccgcaccggcccaaggagcccgcgtggttcctggccaccgtcggcgtctcgcccgaccaccagggcaagggtctgggcagcgccgtcgtgctccccggagtggaggcggccgagcgcgccggggtgcccgccttcctggagacctccgcgccccgcaacctccccttctacgagcggctcggcttcaccgtcaccgccgacgtcgaggtgcccgaaggaccgcgcacctggtgcatgacccgcaagcccggtgcctga

SEQ ID NO: 33656 - DNA, 2925 bp, synthetic construct
  source 1..2925: mol_type = other DNA
atggccttaccagtgaccgccttgctcctgccgctggccttgctgctccacgccgccaggccgctcgaggaggacctgaagaacgtgttcccacctgaggtggccgtgttcgagcctagcgaggccgagatcagccacacccagaaagccaccctcgtgtgcctggctaccggcttctaccccgaccatgtggaactgtcttggtgggtcaacggcaaagaggtgcacagcggcgtgtgtaccgacccccagccactgaaagaacagcccgccctgaacgacagccggtactgcctgagcagcagactgagagtgtccgccaccttctggcagaacccccggaaccacttcagatgccaggtgcagttctacggcctgagcgagaacgacgagtggacccaggacagagccaagcccgtgacccagatcgtgtctgccgaagcctggggcagagccgatgatgtgattaagatccactggcaggaaaagaagtccaacaccatcctgggcagccaggaaggcaacaccatgaagaccaacgacacctacatgaagttcagctggctgaccgtgcccgagaagtccctggacaaagaacacagatgcatcgtgcggcacgaaaacaacaagaacggcgtggaccaggaaatcatcttcccacccatcaagaccgatgtgattacaatggaccccaaggacaactgctccaaggacgccaacgataccctgctgctccagctgaccaacaccagcgcctactacatgtacttgttgctgctgctgaagtccgtggtgtacttcgccatcatcacatgctgcctgctgcggagaaccgccttctgctgcaacggcgagaagtctagggccaagcgatctggatctggagcaacaaacttctcactactcaaacaagcaggtgacgtggaggagaatcccgggcctactagcatggccttaccagtgaccgccttgctcctgccgctggccttgctgctccacgccgccaggccgagctacgtgctgacacagcctccatccgtgtctgtggctccaggacagaccgccagaatcacatgcggcggcaacaacatcggcggcaagagcgtgcactggtatcagcagccacctggacaggctccagtggtggtggtgtacgacgacagcgatagacctagcggcatccccgagagattcagcggcagcaattccggcaataccgccacactgaccatcagcagagtggaagctggcgacgaggccgtgtactactgccaagtgtgggacagcagcagcgatcacgtggtgtttggcggcggaacaaagctgacagtgcttggcggaggcggaagtggaggcggaggatctggcggcggaggctctcaactccagctgcaagagtctggccctggcctggtcaagcctagcgaaacactgagcctgacctgtaccgtgtctggcggctctatcagctccagcagctatttctggggctggatcagacaacctcctggcaaaggactggaatggatcggctccatctactacagcggcatcacctactacaaccccagcctgaagtccagagtgaccatctccgtggacaccagcaagaaccagttctccctgaagctgagcagcgtgacagccgccgataccgccgtgtattattgtgccagacatgacggcgctgtggccggcctgtttgattattggggacagggcaccctggtcaccgtgtcatctgctacgcgtatccagaaccctgatcctgccgtgtaccagctgcgggatagcaagagcagcgacaagagcgtgtgtctgttcaccgacttcgacagccagaccaacgtgtcccagagcaaggactccgacgtgtacatcaccgataagtgcgtgctggacatgcggagcatggacttcaagagcaactccgccgtggcctggtccaacaagtccgatttcgcctgcgccaacgccttcaacaacagcattatccccgaggacacattcttcccaagccccgagagcagcgactccaccgaccacgtgaagcccaaagagacagagaacaccaagcagcccagcaagagctgccacaagcccaaggccatcgtgcacaccgagaaagtgaacatgatgagcctgaccgtgctgggcctgcggatgctgttcgccaaaaccgtggccgtgaacttcctgctgaccgccaagctgttcttcctccgcgccaagagaagcggatctggcgtgaagcagaccctgaatttcgacctgctgaagctggctggcgacgtggaatccaacccaggcccttctagaggccatatgaccgagtacaagcccacggtgcgcctcgccacccgcgacgacgtccccagggccgtacgcaccctcgccgccgcgttcgccgactaccccgccacgcgccacaccgtcgatccggaccgccacatcgagcgggtcaccgagctgcaagaactcttcctcacgcgcgtcgggctcgacatcggcaaggtgtgggtcgcggacgacggcgccgcggtggcggtctggaccacgccggagagcgtcgaagcgggggcggtgttcgccgagatcggcccgcgcatggccgagttgagcggttcccggctggccgcgcagcaacagatggaaggcctcctggcgccgcaccggcccaaggagcccgcgtggttcctggccaccgtcggcgtctcgcccgaccaccagggcaagggtctgggcagcgccgtcgtgctccccggagtggaggcggccgagcgcgccggggtgcccgccttcctggagacctccgcgccccgcaacctccccttctacgagcggctcggcttcaccgtcaccgccgacgtcgaggtgcccgaaggaccgcgcacctggtgcatgacccgcaagcccggtgcctga

SEQ ID NO: 33657 - DNA, 2925 bp, synthetic construct
  source 1..2925: mol_type = other DNA
atggccttaccagtgaccgccttgctcctgccgctggccttgctgctccacgccgccaggccgctcgagatccagaaccctgatcctgccgtgtaccagctgcgggatagcaagagcagcgacaagagcgtgtgtctgttcaccgacttcgacagccagaccaacgtgtcccagagcaaggactccgacgtgtacatcaccgataagtgcgtgctggacatgcggagcatggacttcaagagcaactccgccgtggcctggtccaacaagtccgatttcgcctgcgccaacgccttcaacaacagcattatccccgaggacacattcttcccaagccccgagagcagcgactccaccgaccacgtgaagcccaaagagacagagaacaccaagcagcccagcaagagctgccacaagcccaaggccatcgtgcacaccgagaaagtgaacatgatgagcctgaccgtgctgggcctgcggatgctgttcgccaaaaccgtggccgtgaacttcctgctgaccgccaagctgttcttcctcagggccaagcgatctggatctggagcaacaaacttctcactactcaaacaagcaggtgacgtggaggagaatcccgggcctactagcatggccttaccagtgaccgccttgctcctgccgctggccttgctgctccacgccgccaggccgagctacgtgctgacacagcctccatccgtgtctgtggctccaggacagaccgccagaatcacatgcggcggcaacaacatcggcggcaagagcgtgcactggtatcagcagccacctggacaggctccagtggtggtggtgtacgacgacagcgatagacctagcggcatccccgagagattcagcggcagcaattccggcaataccgccacactgaccatcagcagagtggaagctggcgacgaggccgtgtactactgccaagtgtgggacagcagcagcgatcacgtggtgtttggcggcggaacaaagctgacagtgcttggcggaggcggaagtggaggcggaggatctggcggcggaggctctcaactccagctgcaagagtctggccctggcctggtcaagcctagcgaaacactgagcctgacctgtaccgtgtctggcggctctatcagctccagcagctatttctggggctggatcagacaacctcctggcaaaggactggaatggatcggctccatctactacagcggcatcacctactacaaccccagcctgaagtccagagtgaccatctccgtggacaccagcaagaaccagttctccctgaagctgagcagcgtgacagccgccgataccgccgtgtattattgtgccagacatgacggcgctgtggccggcctgtttgattattggggacagggcaccctggtcaccgtgtcatctgctacgcgtgaggacctgaagaacgtgttcccacctgaggtggccgtgttcgagcctagcgaggccgagatcagccacacccagaaagccaccctcgtgtgcctggctaccggcttctaccccgaccatgtggaactgtcttggtgggtcaacggcaaagaggtgcacagcggcgtgtgtaccgacccccagccactgaaagaacagcccgccctgaacgacagccggtactgcctgagcagcagactgagagtgtccgccaccttctggcagaacccccggaaccacttcagatgccaggtgcagttctacggcctgagcgagaacgacgagtggacccaggacagagccaagcccgtgacccagatcgtgtctgccgaagcctggggcagagccgatgatgtgattaagatccactggcaggaaaagaagtccaacaccatcctgggcagccaggaaggcaacaccatgaagaccaacgacacctacatgaagttcagctggctgaccgtgcccgagaagtccctggacaaagaacacagatgcatcgtgcggcacgaaaacaacaagaacggcgtggaccaggaaatcatcttcccacccatcaagaccgatgtgattacaatggaccccaaggacaactgctccaaggacgccaacgataccctgctgctccagctgaccaacaccagcgcctactacatgtacttgttgctgctgctgaagtccgtggtgtacttcgccatcatcacatgctgcctgctgcggagaaccgccttctgctgcaacggcgagaagtctcgcgccaagagaagcggatctggcgtgaagcagaccctgaatttcgacctgctgaagctggctggcgacgtggaatccaacccaggcccttctagaggccatatgaccgagtacaagcccacggtgcgcctcgccacccgcgacgacgtccccagggccgtacgcaccctcgccgccgcgttcgccgactaccccgccacgcgccacaccgtcgatccggaccgccacatcgagcgggtcaccgagctgcaagaactcttcctcacgcgcgtcgggctcgacatcggcaaggtgtgggtcgcggacgacggcgccgcggtggcggtctggaccacgccggagagcgtcgaagcgggggcggtgttcgccgagatcggcccgcgcatggccgagttgagcggttcccggctggccgcgcagcaacagatggaaggcctcctggcgccgcaccggcccaaggagcccgcgtggttcctggccaccgtcggcgtctcgcccgaccaccagggcaagggtctgggcagcgccgtcgtgctccccggagtggaggcggccgagcgcgccggggtgcccgccttcctggagacctccgcgccccgcaacctccccttctacgagcggctcggcttcaccgtcaccgccgacgtcgaggtgcccgaaggaccgcgcacctggtgcatgacccgcaagcccggtgcctga

SEQ ID NO: 33658 - DNA, 2925 bp, synthetic construct
  source 1..2925: mol_type = other DNA
atggccttaccagtgaccgccttgctcctgccgctggccttgctgctccacgccgccaggccgctcgaggaggacctgaagaacgtgttcccacctgaggtggccgtgttcgagcctagcgaggccgagatcagccacacccagaaagccaccctcgtgtgcctggctaccggcttctaccccgaccatgtggaactgtcttggtgggtcaacggcaaagaggtgcacagcggcgtgtctaccgacccccagccactgaaagaacagcccgccctgaacgacagccggtactgcctgagcagcagactgagagtgtccgccaccttctggcagaacccccggaaccacttcagatgccaggtgcagttctacggcctgagcgagaacgacgagtggacccaggacagagccaagcccgtgacccagatcgtgtctgccgaagcctggggcagagccgatgatgtgattaagatccactggcaggaaaagaagtccaacaccatcctgggcagccaggaaggcaacaccatgaagaccaacgacacctacatgaagttcagctggctgaccgtgcccgagaagtccctggacaaagaacacagatgcatcgtgcggcacgaaaacaacaagaacggcgtggaccaggaaatcatcttcccacccatcaagaccgatgtgattacaatggaccccaaggacaactgctccaaggacgccaacgataccctgctgctccagctgaccaacaccagcgcctactacatgtacttgttgctgctgctgaagtccgtggtgtacttcgccatcatcacatgctgcctgctgcggagaaccgccttctgctgcaacggcgagaagtctagggccaagcgatctggatctggagcaacaaacttctcactactcaaacaagcaggtgacgtggaggagaatcccgggcctactagcatggccttaccagtgaccgccttgctcctgccgctggccttgctgctccacgccgccaggccgagctacgtgctgacacagcctccatccgtgtctgtggctccaggacagaccgccagaatcacatgcggcggcaacaacatcggcggcaagagcgtgcactggtatcagcagccacctggacaggctccagtggtggtggtgtacgacgacagcgatagacctagcggcatccccgagagattcagcggcagcaattccggcaataccgccacactgaccatcagcagagtggaagctggcgacgaggccgtgtactactgccaagtgtgggacagcagcagcgatcacgtggtgtttggcggcggaacaaagctgacagtgcttggcggaggcggaagtggaggcggaggatctggcggcggaggctctcaactccagctgcaagagtctggccctggcctggtcaagcctagcgaaacactgagcctgacctgtaccgtgtctggcggctctatcagctccagcagctatttctggggctggatcagacaacctcctggcaaaggactggaatggatcggctccatctactacagcggcatcacctactacaaccccagcctgaagtccagagtgaccatctccgtggacaccagcaagaaccagttctccctgaagctgagcagcgtgacagccgccgataccgccgtgtattattgtgccagacatgacggcgctgtggccggcctgtttgattattggggacagggcaccctggtcaccgtgtcatctgctacgcgtatccagaaccctgatcctgccgtgtaccagctgcgggatagcaagagcagcgacaagagcgtgtgtctgttcaccgacttcgacagccagaccaacgtgtcccagagcaaggactccgacgtgtacatcaccgataagaccgtgctggacatgcggagcatggacttcaagagcaactccgccgtggcctggtccaacaagtccgatttcgcctgcgccaacgccttcaacaacagcattatccccgaggacacattcttcccaagccccgagagcagcgactccaccgaccacgtgaagcccaaagagacagagaacaccaagcagcccagcaagagctgccacaagcccaaggccatcgtgcacaccgagaaagtgaacatgatgagcctgaccgtgctgggcctgcggatgctgttcgccaaaaccgtggccgtgaacttcctgctgaccgccaagctgttcttcctccgcgccaagagaagcggatctggcgtgaagcagaccctgaatttcgacctgctgaagctggctggcgacgtggaatccaacccaggcccttctagaggccatatgaccgagtacaagcccacggtgcgcctcgccacccgcgacgacgtccccagggccgtacgcaccctcgccgccgcgttcgccgactaccccgccacgcgccacaccgtcgatccggaccgccacatcgagcgggtcaccgagctgcaagaactcttcctcacgcgcgtcgggctcgacatcggcaaggtgtgggtcgcggacgacggcgccgcggtggcggtctggaccacgccggagagcgtcgaagcgggggcggtgttcgccgagatcggcccgcgcatggccgagttgagcggttcccggctggccgcgcagcaacagatggaaggcctcctggcgccgcaccggcccaaggagcccgcgtggttcctggccaccgtcggcgtctcgcccgaccaccagggcaagggtctgggcagcgccgtcgtgctccccggagtggaggcggccgagcgcgccggggtgcccgccttcctggagacctccgcgccccgcaacctccccttctacgagcggctcggcttcaccgtcaccgccgacgtcgaggtgcccgaaggaccgcgcacctggtgcatgacccgcaagcccggtgcctga

SEQ ID NO: 33659 - DNA, 2925 bp, synthetic construct
  source 1..2925: mol_type = other DNA
atggccttaccagtgaccgccttgctcctgccgctggccttgctgctccacgccgccaggccgctcgagatccagaaccctgatcctgccgtgtaccagctgcgggatagcaagagcagcgacaagagcgtgtgtctgttcaccgacttcgacagccagaccaacgtgtcccagagcaaggactccgacgtgtacatcaccgataagaccgtgctggacatgcggagcatggacttcaagagcaactccgccgtggcctggtccaacaagtccgatttcgcctgcgccaacgccttcaacaacagcattatccccgaggacacattcttcccaagccccgagagcagcgactccaccgaccacgtgaagcccaaagagacagagaacaccaagcagcccagcaagagctgccacaagcccaaggccatcgtgcacaccgagaaagtgaacatgatgagcctgaccgtgctgggcctgcggatgctgttcgccaaaaccgtggccgtgaacttcctgctgaccgccaagctgttcttcctcagggccaagcgatctggatctggagcaacaaacttctcactactcaaacaagcaggtgacgtggaggagaatcccgggcctactagcatggccttaccagtgaccgccttgctcctgccgctggccttgctgctccacgccgccaggccgagctacgtgctgacacagcctccatccgtgtctgtggctccaggacagaccgccagaatcacatgcggcggcaacaacatcggcggcaagagcgtgcactggtatcagcagccacctggacaggctccagtggtggtggtgtacgacgacagcgatagacctagcggcatccccgagagattcagcggcagcaattccggcaataccgccacactgaccatcagcagagtggaagctggcgacgaggccgtgtactactgccaagtgtgggacagcagcagcgatcacgtggtgtttggcggcggaacaaagctgacagtgcttggcggaggcggaagtggaggcggaggatctggcggcggaggctctcaactccagctgcaagagtctggccctggcctggtcaagcctagcgaaacactgagcctgacctgtaccgtgtctggcggctctatcagctccagcagctatttctggggctggatcagacaacctcctggcaaaggactggaatggatcggctccatctactacagcggcatcacctactacaaccccagcctgaagtccagagtgaccatctccgtggacaccagcaagaaccagttctccctgaagctgagcagcgtgacagccgccgataccgccgtgtattattgtgccagacatgacggcgctgtggccggcctgtttgattattggggacagggcaccctggtcaccgtgtcatctgctacgcgtgaggacctgaagaacgtgttcccacctgaggtggccgtgttcgagcctagcgaggccgagatcagccacacccagaaagccaccctcgtgtgcctggctaccggcttctaccccgaccatgtggaactgtcttggtgggtcaacggcaaagaggtgcacagcggcgtgtctaccgacccccagccactgaaagaacagcccgccctgaacgacagccggtactgcctgagcagcagactgagagtgtccgccaccttctggcagaacccccggaaccacttcagatgccaggtgcagttctacggcctgagcgagaacgacgagtggacccaggacagagccaagcccgtgacccagatcgtgtctgccgaagcctggggcagagccgatgatgtgattaagatccactggcaggaaaagaagtccaacaccatcctgggcagccaggaaggcaacaccatgaagaccaacgacacctacatgaagttcagctggctgaccgtgcccgagaagtccctggacaaagaacacagatgcatcgtgcggcacgaaaacaacaagaacggcgtggaccaggaaatcatcttcccacccatcaagaccgatgtgattacaatggaccccaaggacaactgctccaaggacgccaacgataccctgctgctccagctgaccaacaccagcgcctactacatgtacttgttgctgctgctgaagtccgtggtgtacttcgccatcatcacatgctgcctgctgcggagaaccgccttctgctgcaacggcgagaagtctcgcgccaagagaagcggatctggcgtgaagcagaccctgaatttcgacctgctgaagctggctggcgacgtggaatccaacccaggcccttctagaggccatatgaccgagtacaagcccacggtgcgcctcgccacccgcgacgacgtccccagggccgtacgcaccctcgccgccgcgttcgccgactaccccgccacgcgccacaccgtcgatccggaccgccacatcgagcgggtcaccgagctgcaagaactcttcctcacgcgcgtcgggctcgacatcggcaaggtgtgggtcgcggacgacggcgccgcggtggcggtctggaccacgccggagagcgtcgaagcgggggcggtgttcgccgagatcggcccgcgcatggccgagttgagcggttcccggctggccgcgcagcaacagatggaaggcctcctggcgccgcaccggcccaaggagcccgcgtggttcctggccaccgtcggcgtctcgcccgaccaccagggcaagggtctgggcagcgccgtcgtgctccccggagtggaggcggccgagcgcgccggggtgcccgccttcctggagacctccgcgccccgcaacctccccttctacgagcggctcggcttcaccgtcaccgccgacgtcgaggtgcccgaaggaccgcgcacctggtgcatgacccgcaagcccggtgcctga

SEQ ID NO: 33660 - DNA, 2619 bp, synthetic construct
  source 1..2619: mol_type = other DNA
atggccttaccagtgaccgccttgctcctgccgctggccttgctgctccacgccgccaggccgctcgaggaggacctgaagaacgtgttcccacctgaggtggccgtgttcgagcctagcaaggccgagatcgcccacacccagaaagccaccctcgtgtgcctggctaccggcttctaccccgaccatgtggaactgtcttggtgggtcaacggcaaagaggtgcacagcggcgtgtgtaccgacccccagccactgaaagaacagcccgccctgaacgacagccggtactgcctgagcagcagactgagagtgtccgccaccttctggcagaacccccggaaccacttcagatgccaggtgcagttctacggcctgagcgagaacgacgagtggacccaggacagagccaagcccgtgacccagatcgtgtctgccgaagcctggggcagagccgattgcggcatcaccagcgccagctaccaccagggcgtgctgagcgccaccatcctgtacgagatcctgctgggcaaggccaccctgtacgccgtgctggtgtctgccctggtgctgatggctatggtcaagcggaaggacagccggggaagggccaagcgatctggatctggagcaacaaacttctcactactcaaacaagcaggtgacgtggaggagaatcccgggcctactagcatggccttaccagtgaccgccttgctcctgccgctggccttgctgctccacgccgccaggccgagctacgtgctgacacagcctccatccgtgtctgtggctccaggacagaccgccagaatcacatgcggcggcaacaacatcggcggcaagagcgtgcactggtatcagcagccacctggacaggctccagtggtggtggtgtacgacgacagcgatagacctagcggcatccccgagagattcagcggcagcaattccggcaataccgccacactgaccatcagcagagtggaagctggcgacgaggccgtgtactactgccaagtgtgggacagcagcagcgatcacgtggtgtttggcggcggaacaaagctgacagtgcttggcggaggcggaagtggaggcggaggatctggcggcggaggctctcaactccagctgcaagagtctggccctggcctggtcaagcctagcgaaacactgagcctgacctgtaccgtgtctggcggctctatcagctccagcagctatttctggggctggatcagacaacctcctggcaaaggactggaatggatcggctccatctactacagcggcatcacctactacaaccccagcctgaagtccagagtgaccatctccgtggacaccagcaagaaccagttctccctgaagctgagcagcgtgacagccgccgataccgccgtgtattattgtgccagacatgacggcgctgtggccggcctgtttgattattggggacagggcaccctggtcaccgtgtcatctgctacgcgtatccagaaccctgatcctgccgtgtaccagctgcgggatagcaagagcagcgacaagagcgtgtgtctgttcaccgacttcgacagccagaccaacgtgtcccagagcaaggactccgacgtgtacatcaccgataagtgcgtgctggacatgcggagcatggacttcaagagcaactccgccgtggcctggtccaacaagtccgatttcgcctgcgccaacgccttcaacaacagcattatccccgaggacacattcttcccaagcagcgacgtgccctgcgacgtgaagctggtggaaaagagcttcgagacagacaccaacctgaacttccagaacctgagcgtgatcggcttcagaatcctgctgctgaaagtggccggctttaacctgctgatgaccctgcggctgtggtccagccgcgccaagagaagcggatctggcgtgaagcagaccctgaatttcgacctgctgaagctggctggcgacgtggaatccaacccaggcccttctagaggccatatgaccgagtacaagcccacggtgcgcctcgccacccgcgacgacgtccccagggccgtacgcaccctcgccgccgcgttcgccgactaccccgccacgcgccacaccgtcgatccggaccgccacatcgagcgggtcaccgagctgcaagaactcttcctcacgcgcgtcgggctcgacatcggcaaggtgtgggtcgcggacgacggcgccgcggtggcggtctggaccacgccggagagcgtcgaagcgggggcggtgttcgccgagatcggcccgcgcatggccgagttgagcggttcccggctggccgcgcagcaacagatggaaggcctcctggcgccgcaccggcccaaggagcccgcgtggttcctggccaccgtcggcgtctcgcccgaccaccagggcaagggtctgggcagcgccgtcgtgctccccggagtggaggcggccgagcgcgccggggtgcccgccttcctggagacctccgcgccccgcaacctccccttctacgagcggctcggcttcaccgtcaccgccgacgtcgaggtgcccgaaggaccgcgcacctggtgcatgacccgcaagcccggtgcctga

SEQ ID NO: 33661 - DNA, 2619 bp, synthetic construct
  source 1..2619: mol_type = other DNA
atggccttaccagtgaccgccttgctcctgccgctggccttgctgctccacgccgccaggccgctcgagatccagaaccctgatcctgccgtgtaccagctgcgggatagcaagagcagcgacaagagcgtgtgtctgttcaccgacttcgacagccagaccaacgtgtcccagagcaaggactccgacgtgtacatcaccgataagtgcgtgctggacatgcggagcatggacttcaagagcaactccgccgtggcctggtccaacaagtccgatttcgcctgcgccaacgccttcaacaacagcattatccccgaggacacattcttcccaagcagcgacgtgccctgcgacgtgaagctggtggaaaagagcttcgagacagacaccaacctgaacttccagaacctgagcgtgatcggcttcagaatcctgctgctgaaagtggccggctttaacctgctgatgaccctgcggctgtggtccagcagggccaagcgatctggatctggagcaacaaacttctcactactcaaacaagcaggtgacgtggaggagaatcccgggcctactagcatggccttaccagtgaccgccttgctcctgccgctggccttgctgctccacgccgccaggccgagctacgtgctgacacagcctccatccgtgtctgtggctccaggacagaccgccagaatcacatgcggcggcaacaacatcggcggcaagagcgtgcactggtatcagcagccacctggacaggctccagtggtggtggtgtacgacgacagcgatagacctagcggcatccccgagagattcagcggcagcaattccggcaataccgccacactgaccatcagcagagtggaagctggcgacgaggccgtgtactactgccaagtgtgggacagcagcagcgatcacgtggtgtttggcggcggaacaaagctgacagtgcttggcggaggcggaagtggaggcggaggatctggcggcggaggctctcaactccagctgcaagagtctggccctggcctggtcaagcctagcgaaacactgagcctgacctgtaccgtgtctggcggctctatcagctccagcagctatttctggggctggatcagacaacctcctggcaaaggactggaatggatcggctccatctactacagcggcatcacctactacaaccccagcctgaagtccagagtgaccatctccgtggacaccagcaagaaccagttctccctgaagctgagcagcgtgacagccgccgataccgccgtgtattattgtgccagacatgacggcgctgtggccggcctgtttgattattggggacagggcaccctggtcaccgtgtcatctgctacgcgtgaggacctgaagaacgtgttcccacctgaggtggccgtgttcgagcctagcaaggccgagatcgcccacacccagaaagccaccctcgtgtgcctggctaccggcttctaccccgaccatgtggaactgtcttggtgggtcaacggcaaagaggtgcacagcggcgtgtgtaccgacccccagccactgaaagaacagcccgccctgaacgacagccggtactgcctgagcagcagactgagagtgtccgccaccttctggcagaacccccggaaccacttcagatgccaggtgcagttctacggcctgagcgagaacgacgagtggacccaggacagagccaagcccgtgacccagatcgtgtctgccgaagcctggggcagagccgattgcggcatcaccagcgccagctaccaccagggcgtgctgagcgccaccatcctgtacgagatcctgctgggcaaggccaccctgtacgccgtgctggtgtctgccctggtgctgatggctatggtcaagcggaaggacagccggggacgcgccaagagaagcggatctggcgtgaagcagaccctgaatttcgacctgctgaagctggctggcgacgtggaatccaacccaggcccttctagaggccatatgaccgagtacaagcccacggtgcgcctcgccacccgcgacgacgtccccagggccgtacgcaccctcgccgccgcgttcgccgactaccccgccacgcgccacaccgtcgatccggaccgccacatcgagcgggtcaccgagctgcaagaactcttcctcacgcgcgtcgggctcgacatcggcaaggtgtgggtcgcggacgacggcgccgcggtggcggtctggaccacgccggagagcgtcgaagcgggggcggtgttcgccgagatcggcccgcgcatggccgagttgagcggttcccggctggccgcgcagcaacagatggaaggcctcctggcgccgcaccggcccaaggagcccgcgtggttcctggccaccgtcggcgtctcgcccgaccaccagggcaagggtctgggcagcgccgtcgtgctccccggagtggaggcggccgagcgcgccggggtgcccgccttcctggagacctccgcgccccgcaacctccccttctacgagcggctcggcttcaccgtcaccgccgacgtcgaggtgcccgaaggaccgcgcacctggtgcatgacccgcaagcccggtgcctga

SEQ ID NO: 33662 - DNA, 2298 bp, synthetic construct
  source 1..2298: mol_type = other DNA
atggccttaccagtgaccgccttgctcctgccgctggccttgctgctccacgccgccaggccgctcgagcagagttttgggttgttggaccctaaattgtgctatctgttggacggaatcctgttcatttacggagtgatcctgaccgcattgttcctgcgggttaagttttccagatccgcagacgcacccgcttaccaacaagggcagaaccaactctacaatgaacttaatttggggcggagggaagagtacgacgttctggacaaaaggaggggacgagatcccgagatgggcggaaagcctcagcgaaggaagaatccgcaagaggggctttataacgaactccagaaagataaaatggcagaagcctatagtgagattgggatgaagggagaaaggaggaggggtaaaggtcacgatgggttgtaccaaggattgagcacagccactaaagatacctatgatgcgctccacatgcaggccctgccgccaagaagggccaagcgatctggatctggagcaacaaacttctcactactcaaacaagcaggtgacgtggaggagaatcccgggcctactagcatggccttaccagtgaccgccttgctcctgccgctggccttgctgctccacgccgccaggccgagctacgtgctgacacagcctccatccgtgtctgtggctccaggacagaccgccagaatcacatgcggcggcaacaacatcggcggcaagagcgtgcactggtatcagcagccacctggacaggctccagtggtggtggtgtacgacgacagcgatagacctagcggcatccccgagagattcagcggcagcaattccggcaataccgccacactgaccatcagcagagtggaagctggcgacgaggccgtgtactactgccaagtgtgggacagcagcagcgatcacgtggtgtttggcggcggaacaaagctgacagtgcttggcggaggcggaagtggaggcggaggatctggcggcggaggctctcaactccagctgcaagagtctggccctggcctggtcaagcctagcgaaacactgagcctgacctgtaccgtgtctggcggctctatcagctccagcagctatttctggggctggatcagacaacctcctggcaaaggactggaatggatcggctccatctactacagcggcatcacctactacaaccccagcctgaagtccagagtgaccatctccgtggacaccagcaagaaccagttctccctgaagctgagcagcgtgacagccgccgataccgccgtgtattattgtgccagacatgacggcgctgtggccggcctgtttgattattggggacagggcaccctggtcaccgtgtcatctgctacgcgtgagctgggagagcctcagctgtgctatatcctggacgccatcctgtttctgtacggcatcgtgctgaccctgctgtactgccggctgaagatccaagtgcggaaggccgccatcaccagctacgagaaatccgacggcgtgtacaccggcctgagcaccagaaatcaagagacatacgagacactgaagcacgaaaagcctccacaacgcgccaagagaagcggatctggcgtgaagcagaccctgaatttcgacctgctgaagctggctggcgacgtggaatccaacccaggcccttctagaggccatatgaccgagtacaagcccacggtgcgcctcgccacccgcgacgacgtccccagggccgtacgcaccctcgccgccgcgttcgccgactaccccgccacgcgccacaccgtcgatccggaccgccacatcgagcgggtcaccgagctgcaagaactcttcctcacgcgcgtcgggctcgacatcggcaaggtgtgggtcgcggacgacggcgccgcggtggcggtctggaccacgccggagagcgtcgaagcgggggcggtgttcgccgagatcggcccgcgcatggccgagttgagcggttcccggctggccgcgcagcaacagatggaaggcctcctggcgccgcaccggcccaaggagcccgcgtggttcctggccaccgtcggcgtctcgcccgaccaccagggcaagggtctgggcagcgccgtcgtgctccccggagtggaggcggccgagcgcgccggggtgcccgccttcctggagacctccgcgccccgcaacctccccttctacgagcggctcggcttcaccgtcaccgccgacgtcgaggtgcccgaaggaccgcgcacctggtgcatgacccgcaagcccggtgcctga

SEQ ID NO: 33663 - DNA, 2931 bp, synthetic construct; identical to SEQ ID NO: 33654
  source 1..2931: mol_type = other DNA

SEQ ID NO: 33664 - DNA, 2931 bp, synthetic construct; identical to SEQ ID NO: 33655
  source 1..2931: mol_type = other DNA

SEQ ID NO: 33665 - DNA, 2928 bp, synthetic construct
  source 1..2928: mol_type = other DNA
atggccttaccagtgaccgccttgctcctgccgctggccttgctgctccacgccgccaggccgctcgaggaggaggacctgaagaacgtgttcccacctgaggtggccgtgttcgagcctagcgaggccgagatcagccacacccagaaagccaccctcgtgtgcctggctaccggcttctaccccgaccatgtggaactgtcttggtgggtcaacggcaaagaggtgcacagcggcgtgtgtaccgacccccagccactgaaagaacagcccgccctgaacgacagccggtactgcctgagcagcagactgagagtgtccgccaccttctggcagaacccccggaaccacttcagatgccaggtgcagttctacggcctgagcgagaacgacgagtggacccaggacagagccaagcccgtgacccagatcgtgtctgccgaagcctggggcagagccgatgatgtgattaagatccactggcaggaaaagaagtccaacaccatcctgggcagccaggaaggcaacaccatgaagaccaacgacacctacatgaagttcagctggctgaccgtgcccgagaagtccctggacaaagaacacagatgcatcgtgcggcacgaaaacaacaagaacggcgtggaccaggaaatcatcttcccacccatcaagaccgatgtgattacaatggaccccaaggacaactgctccaaggacgccaacgataccctgctgctccagctgaccaacaccagcgcctactacatgtacttgttgctgctgctgaagtccgtggtgtacttcgccatcatcacatgctgcctgctgcggagaaccgccttctgctgcaacggcgagaagtctagggccaagcgatctggatctggagcaacaaacttctcactactcaaacaagcaggtgacgtggaggagaatcccgggcctactagcatggccttaccagtgaccgccttgctcctgccgctggccttgctgctccacgccgccaggccgagctacgtgctgacacagcctccatccgtgtctgtggctccaggacagaccgccagaatcacatgcggcggcaacaacatcggcggcaagagcgtgcactggtatcagcagccacctggacaggctccagtggtggtggtgtacgacgacagcgatagacctagcggcatccccgagagattcagcggcagcaattccggcaataccgccacactgaccatcagcagagtggaagctggcgacgaggccgtgtactactgccaagtgtgggacagcagcagcgatcacgtggtgtttggcggcggaacaaagctgacagtgcttggcggaggcggaagtggaggcggaggatctggcggcggaggctctcaactccagctgcaagagtctggccctggcctggtcaagcctagcgaaacactgagcctgacctgtaccgtgtctggcggctctatcagctccagcagctatttctggggctggatcagacaacctcctggcaaaggactggaatggatcggctccatctactacagcggcatcacctactacaaccccagcctgaagtccagagtgaccatctccgtggacaccagcaagaaccagttctccctgaagctgagcagcgtgacagccgccgataccgccgtgtattattgtgccagacatgacggcgctgtggccggcctgtttgattattggggacagggcaccctggtcaccgtgtcatctgctacgcgtatccagaaccctgatcctgccgtgtaccagctgcgggatagcaagagcagcgacaagagcgtgtgtctgttcaccgacttcgacagccagaccaacgtgtcccagagcaaggactccgacgtgtacatcaccgataagtgcgtgctggacatgcggagcatggacttcaagagcaactccgccgtggcctggtccaacaagtccgatttcgcctgcgccaacgccttcaacaacagcattatccccgaggacacattcttcccaagccccgagagcagcgactccaccgaccacgtgaagcccaaagagacagagaacaccaagcagcccagcaagagctgccacaagcccaaggccatcgtgcacaccgagaaagtgaacatgatgagcctgaccgtgctgggcctgcggatgctgttcgccaaaaccgtggccgtgaacttcctgctgaccgccaagctgttcttcctccgcgccaagagaagcggatctggcgtgaagcagaccctgaatttcgacctgctgaagctggctggcgacgtggaatccaacccaggcccttctagaggccatatgaccgagtacaagcccacggtgcgcctcgccacccgcgacgacgtccccagggccgtacgcaccctcgccgccgcgttcgccgactaccccgccacgcgccacaccgtcgatccggaccgccacatcgagcgggtcaccgagctgcaagaactcttcctcacgcgcgtcgggctcgacatcggcaaggtgtgggtcgcggacgacggcgccgcggtggcggtctggaccacgccggagagcgtcgaagcgggggcggtgttcgccgagatcggcccgcgcatggccgagttgagcggttcccggctggccgcgcagcaacagatggaaggcctcctggcgccgcaccggcccaaggagcccgcgtggttcctggccaccgtcggcgtctcgcccgaccaccagggcaagggtctgggcagcgccgtcgtgctccccggagtggaggcggccgagcgcgccggggtgcccgccttcctggagacctccgcgccccgcaacctccccttctacgagcggctcggcttcaccgtcaccgccgacgtcgaggtgcccgaaggaccgcgcacctggtgcatgacccgcaagcccggtgcctga

SEQ ID NO: 33666 - DNA, 2928 bp, synthetic construct
  source 1..2928: mol_type = other DNA
atggccttaccagtgaccgccttgctcctgccgctggccttgctgctccacgccgccaggccgctcgagatccagaaccctgatcctgccgtgtaccagctgcgggatagcaagagcagcgacaagagcgtgtgtctgttcaccgacttcgacagccagaccaacgtgtcccagagcaaggactccgacgtgtacatcaccgataagtgcgtgctggacatgcggagcatggacttcaagagcaactccgccgtggcctggtccaacaagtccgatttcgcctgcgccaacgccttcaacaacagcattatccccgaggacacattcttcccaagccccgagagcagcgactccaccgaccacgtgaagcccaaagagacagagaacaccaagcagcccagcaagagctgccacaagcccaaggccatcgtgcacaccgagaaagtgaacatgatgagcctgaccgtgctgggcctgcggatgctgttcgccaaaaccgtggccgtgaacttcctgctgaccgccaagctgttcttcctcagggccaagcgatctggatctggagcaacaaacttctcactactcaaacaagcaggtgacgtggaggagaatcccgggcctactagcatggccttaccagtgaccgccttgctcctgccgctggccttgctgctccacgccgccaggccgagctacgtgctgacacagcctccatccgtgtctgtggctccaggacagaccgccagaatcacatgcggcggcaacaacatcggcggcaagagcgtgcactggtatcagcagccacctggacaggctccagtggtggtggtgtacgacgacagcgatagacctagcggcatccccgagagattcagcggcagcaattccggcaataccgccacactgaccatcagcagagtggaagctggcgacgaggccgtgtactactgccaagtgtgggacagcagcagcgatcacgtggtgtttggcggcggaacaaagctgacagtgcttggcggaggcggaagtggaggcggaggatctggcggcggaggctctcaactccagctgcaagagtctggccctggcctggtcaagcctagcgaaacactgagcctgacctgtaccgtgtctggcggctctatcagctccagcagctatttctggggctggatcagacaacctcctggcaaaggactggaatggatcggctccatctactacagcggcatcacctactacaaccccagcctgaagtccagagtgaccatctccgtggacaccagcaagaaccagttctccctgaagctgagcagcgtgacagccgccgataccgccgtgtattattgtgccagacatgacggcgctgtggccggcctgtttgattattggggacagggcaccctggtcaccgtgtcatctgctacgcgtgaggaggacctgaagaacgtgttcccacctgaggtggccgtgttcgagcctagcgaggccgagatcagccacacccagaaagccaccctcgtgtgcctggctaccggcttctaccccgaccatgtggaactgtcttggtgggtcaacggcaaagaggtgcacagcggcgtgtgtaccgacccccagccactgaaagaacagcccgccctgaacgacagccggtactgcctgagcagcagactgagagtgtccgccaccttctggcagaacccccggaaccacttcagatgccaggtgcagttctacggcctgagcgagaacgacgagtggacccaggacagagccaagcccgtgacccagatcgtgtctgccgaagcctggggcagagccgatgatgtgattaagatccactggcaggaaaagaagtccaacaccatcctgggcagccaggaaggcaacaccatgaagaccaacgacacctacatgaagttcagctggctgaccgtgcccgagaagtccctggacaaagaacacagatgcatcgtgcggcacgaaaacaacaagaacggcgtggaccaggaaatcatcttcccacccatcaagaccgatgtgattacaatggaccccaaggacaactgctccaaggacgccaacgataccctgctgctccagctgaccaacaccagcgcctactacatgtacttgttgctgctgctgaagtccgtggtgtacttcgccatcatcacatgctgcctgctgcggagaaccgccttctgctgcaacggcgagaagtctcgcgccaagagaagcggatctggcgtgaagcagaccctgaatttcgacctgctgaagctggctggcgacgtggaatccaacccaggcccttctagaggccatatgaccgagtacaagcccacggtgcgcctcgccacccgcgacgacgtccccagggccgtacgcaccctcgccgccgcgttcgccgactaccccgccacgcgccacaccgtcgatccggaccgccacatcgagcgggtcaccgagctgcaagaactcttcctcacgcgcgtcgggctcgacatcggcaaggtgtgggtcgcggacgacggcgccgcggtggcggtctggaccacgccggagagcgtcgaagcgggggcggtgttcgccgagatcggcccgcgcatggccgagttgagcggttcccggctggccgcgcagcaacagatggaaggcctcctggcgccgcaccggcccaaggagcccgcgtggttcctggccaccgtcggcgtctcgcccgaccaccagggcaagggtctgggcagcgccgtcgtgctccccggagtggaggcggccgagcgcgccggggtgcccgccttcctggagacctccgcgccccgcaacctccccttctacgagcggctcggcttcaccgtcaccgccgacgtcgaggtgcccgaaggaccgcgcacctggtgcatgacccgcaagcccggtgcctga

SEQ ID NO: 33667 - DNA, 2619 bp, synthetic construct
  source 1..2619: mol_type = other DNA
atggccttaccagtgaccgccttgctcctgccgctggccttgctgctccacgccgccaggccgctcgaggaggacctgaagaacgtgttcccacctgaggtggccgtgttcgagcctagcgaggccgagatcagccacacccagaaagccaccctcgtgtgcctggctaccggcttctaccccgaccatgtggaactgtcttggtgggtcaacggcaaagaggtgcacagcggcgtgtctaccgacccccagccactgaaagaacagcccgccctgaacgacagccggtactgcctgagcagcagactgagagtgtccgccaccttctggcagaacccccggaaccacttcagatgccaggtgcagttctacggcctgagcgagaacgacgagtggacccaggacagagccaagcccgtgacccagatcgtgtctgccgaagcctggggcagagccgattgcggctttaccagcgagagctaccagcagggcgtgctgagcgccaccaacctgagcgtgatcggcttcagaatcctgctgctgaaagtggccggctttaacctgctgatgaccctgcggctgtggtccagcagggccaagcgatctggatctggagcaacaaacttctcactactcaaacaagcaggtgacgtggaggagaatcccgggcctactagcatggccttaccagtgaccgccttgctcctgccgctggccttgctgctccacgccgccaggccgagctacgtgctgacacagcctccatccgtgtctgtggctccaggacagaccgccagaatcacatgcggcggcaacaacatcggcggcaagagcgtgcactggtatcagcagccacctggacaggctccagtggtggtggtgtacgacgacagcgatagacctagcggcatccccgagagattcagcggcagcaattccggcaataccgccacactgaccatcagcagagtggaagctggcgacgaggccgtgtactactgccaagtgtgggacagcagcagcgatcacgtggtgtttggcggcggaacaaagctgacagtgcttggcggaggcggaagtggaggcggaggatctggcggcggaggctctcaactccagctgcaagagtctggccctggcctggtcaagcctagcgaaacactgagcctgacctgtaccgtgtctggcggctctatcagctccagcagctatttctggggctggatcagacaacctcctggcaaaggactggaatggatcggctccatctactacagcggcatcacctactacaaccccagcctgaagtccagagtgaccatctccgtggacaccagcaagaaccagttctccctgaagctgagcagcgtgacagccgccgataccgccgtgtattattgtgccagacatgacggcgctgtggccggcctgtttgattattggggacagggcaccctggtcaccgtgtcatctgctacgcgtatccagaaccctgatcctgccgtgtaccagctgcgggatagcaagagcagcgacaagagcgtgtgtctgttcaccgacttcgacagccagaccaacgtgtcccagagcaaggactccgacgtgtacatcaccgataagaccgtgctggacatgcggagcatggacttcaagagcaactccgccgtggcctggtccaacaagtccgatttcgcctgcgccaacgccttcaacaacagcattatccccgaggacacattcttcccaagccccgagagcagctgcgacgtgaagctggtggaaaagagcttcgagacagacaccaacctgaacttccagatcctgtacgagatcctgctgggcaaggccaccctgtacgccgtgctggtgtctgccctggtgctgatggctatggtcaagcggaaggacagccggggacgcgccaagagaagcggatctggcgtgaagcagaccctgaatttcgacctgctgaagctggctggcgacgtggaatccaacccaggcccttctagaggccatatgaccgagtacaagcccacggtgcgcctcgccacccgcgacgacgtccccagggccgtacgcaccctcgccgccgcgttcgccgactaccccgccacgcgccacaccgtcgatccggaccgccacatcgagcgggtcaccgagctgcaagaactcttcctcacgcgcgtcgggctcgacatcggcaaggtgtgggtcgcggacgacggcgccgcggtggcggtctggaccacgccggagagcgtcgaagcgggggcggtgttcgccgagatcggcccgcgcatggccgagttgagcggttcccggctggccgcgcagcaacagatggaaggcctcctggcgccgcaccggcccaaggagcccgcgtggttcctggccaccgtcggcgtctcgcccgaccaccagggcaagggtctgggcagcgccgtcgtgctccccggagtggaggcggccgagcgcgccggggtgcccgccttcctggagacctccgcgccccgcaacctccccttctacgagcggctcggcttcaccgtcaccgccgacgtcgaggtgcccgaaggaccgcgcacctggtgcatgacccgcaagcccggtgcctga

SEQ ID NO: 33668 - DNA, 2619 bp, synthetic construct
  source 1..2619: mol_type = other DNA
atggccttaccagtgaccgccttgctcctgccgctggccttgctgctccacgccgccaggccgctcgagatccagaaccctgatcctgccgtgtaccagctgcgggatagcaagagcagcgacaagagcgtgtgtctgttcaccgacttcgacagccagaccaacgtgtcccagagcaaggactccgacgtgtacatcaccgataagaccgtgctggacatgcggagcatggacttcaagagcaactccgccgtggcctggtccaacaagtccgatttcgcctgcgccaacgccttcaacaacagcattatccccgaggacacattcttcccaagccccgagagcagctgcgacgtgaagctggtggaaaagagcttcgagacagacaccaacctgaacttccagatcctgtacgagatcctgctgggcaaggccaccctgtacgccgtgctggtgtctgccctggtgctgatggctatggtcaagcggaaggacagccggggaagggccaagcgatctggatctggagcaacaaacttctcactactcaaacaagcaggtgacgtggaggagaatcccgggcctactagcatggccttaccagtgaccgccttgctcctgccgctggccttgctgctccacgccgccaggccgagctacgtgctgacacagcctccatccgtgtctgtggctccaggacagaccgccagaatcacatgcggcggcaacaacatcggcggcaagagcgtgcactggtatcagcagccacctggacaggctccagtggtggtggtgtacgacgacagcgatagacctagcggcatccccgagagattcagcggcagcaattccggcaataccgccacactgaccatcagcagagtggaagctggcgacgaggccgtgtactactgccaagtgtgggacagcagcagcgatcacgtggtgtttggcggcggaacaaagctgacagtgcttggcggaggcggaagtggaggcggaggatctggcggcggaggctctcaactccagctgcaagagtctggccctggcctggtcaagcctagcgaaacactgagcctgacctgtaccgtgtctggcggctctatcagctccagcagctatttctggggctggatcagacaacctcctggcaaaggactggaatggatcggctccatctactacagcggcatcacctactacaaccccagcctgaagtccagagtgaccatctccgtggacaccagcaagaaccagttctccctgaagctgagcagcgtgacagccgccgataccgccgtgtattattgtgccagacatgacggcgctgtggccggcctgtttgattattggggacagggcaccctggtcaccgtgtcatctgctacgcgtgaggacctgaagaacgtgttcccacctgaggtggccgtgttcgagcctagcgaggccgagatcagccacacccagaaagccaccctcgtgtgcctggctaccggcttctaccccgaccatgtggaactgtcttggtgggtcaacggcaaagaggtgcacagcggcgtgtctaccgacccccagccactgaaagaacagcccgccctgaacgacagccggtactgcctgagcagcagactgagagtgtccgccaccttctggcagaacccccggaaccacttcagatgccaggtgcagttctacggcctgagcgagaacgacgagtggacccaggacagagccaagcccgtgacccagatcgtgtctgccgaagcctggggcagagccgattgcggctttaccagcgagagctaccagcagggcgtgctgagcgccaccaacctgagcgtgatcggcttcagaatcctgctgctgaaagtggccggctttaacctgctgatgaccctgcggctgtggtccagccgcgccaagagaagcggatctggcgtgaagcagaccctgaatttcgacctgctgaagctggctggcgacgtggaatccaacccaggcccttctagaggccatatgaccgagtacaagcccacggtgcgcctcgccacccgcgacgacgtccccagggccgtacgcaccctcgccgccgcgttcgccgactaccccgccacgcgccacaccgtcgatccggaccgccacatcgagcgggtcaccgagctgcaagaactcttcctcacgcgcgtcgggctcgacatcggcaaggtgtgggtcgcggacgacggcgccgcggtggcggtctggaccacgccggagagcgtcgaagcgggggcggtgttcgccgagatcggcccgcgcatggccgagttgagcggttcccggctggccgcgcagcaacagatggaaggcctcctggcgccgcaccggcccaaggagcccgcgtggttcctggccaccgtcggcgtctcgcccgaccaccagggcaagggtctgggcagcgccgtcgtgctccccggagtggaggcggccgagcgcgccggggtgcccgccttcctggagacctccgcgccccgcaacctccccttctacgagcggctcggcttcaccgtcaccgccgacgtcgaggtgcccgaaggaccgcgcacctggtgcatgacccgcaagcccggtgcctga

SEQ ID NO: 33669 - DNA, 2619 bp, synthetic construct
  source 1..2619: mol_type = other DNA
atggccttaccagtgaccgccttgctcctgccgctggccttgctgctccacgccgccaggccgctcgaggaggacctgaagaacgtgttcccacctgaggtggccgtgttcgagcctagcgaggccgagatcagccacacccagaaagccaccctcgtgtgcctggctaccggcttctaccccgaccatgtggaactgtcttggtgggtcaacggcaaagaggtgcacagcggcgtgtgtaccgacccccagccactgaaagaacagcccgccctgaacgacagccggtactgcctgagcagcagactgagagtgtccgccaccttctggcagaacccccggaaccacttcagatgccaggtgcagttctacggcctgagcgagaacgacgagtggacccaggacagagccaagcccgtgacccagatcgtgtctgccgaagcctggggcagagccgattgcgacgtgaagctggtggaaaagagcttcgagacagacaccaacctgaacttccagaacctgagcgtgatcggcttcagaatcctgctgctgaaagtggccggctttaacctgctgatgaccctgcggctgtggtccagcagggccaagcgatctggatctggagcaacaaacttctcactactcaaacaagcaggtgacgtggaggagaatcccgggcctactagcatggccttaccagtgaccgccttgctcctgccgctggccttgctgctccacgccgccaggccgagctacgtgctgacacagcctccatccgtgtctgtggctccaggacagaccgccagaatcacatgcggcggcaacaacatcggcggcaagagcgtgcactggtatcagcagccacctggacaggctccagtggtggtggtgtacgacgacagcgatagacctagcggcatccccgagagattcagcggcagcaattccggcaataccgccacactgaccatcagcagagtggaagctggcgacgaggccgtgtactactgccaagtgtgggacagcagcagcgatcacgtggtgtttggcggcggaacaaagctgacagtgcttggcggaggcggaagtggaggcggaggatctggcggcggaggctctcaactccagctgcaagagtctggccctggcctggtcaagcctagcgaaacactgagcctgacctgtaccgtgtctggcggctctatcagctccagcagctatttctggggctggatcagacaacctcctggcaaaggactggaatggatcggctccatctactacagcggcatcacctactacaaccccagcctgaagtccagagtgaccatctccgtggacaccagcaagaaccagttctccctgaagctgagcagcgtgacagccgccgataccgccgtgtattattgtgccagacatgacggcgctgtggccggcctgtttgattattggggacagggcaccctggtcaccgtgtcatctgctacgcgtatccagaaccctgatcctgccgtgtaccagctgcgggatagcaagagcagcgacaagagcgtgtgtctgttcaccgacttcgacagccagaccaacgtgtcccagagcaaggactccgacgtgtacatcaccgataagtgcgtgctggacatgcggagcatggacttcaagagcaactccgccgtggcctggtccaacaagtccgatttcgcctgcgccaacgccttcaacaacagcattatccccgaggacacattcttcccaagccccgagagcagctgcggctttaccagcgagagctaccagcagggcgtgctgagcgccaccatcctgtacgagatcctgctgggcaaggccaccctgtacgccgtgctggtgtctgccctggtgctgatggctatggtcaagcggaaggacagccggggacgcgccaagagaagcggatctggcgtgaagcagaccctgaatttcgacctgctgaagctggctggcgacgtggaatccaacccaggcccttctagaggccatatgaccgagtacaagcccacggtgcgcctcgccacccgcgacgacgtccccagggccgtacgcaccctcgccgccgcgttcgccgactaccccgccacgcgccacaccgtcgatccggaccgccacatcgagcgggtcaccgagctgcaagaactcttcctcacgcgcgtcgggctcgacatcggcaaggtgtgggtcgcggacgacggcgccgcggtggcggtctggaccacgccggagagcgtcgaagcgggggcggtgttcgccgagatcggcccgcgcatggccgagttgagcggttcccggctggccgcgcagcaacagatggaaggcctcctggcgccgcaccggcccaaggagcccgcgtggttcctggccaccgtcggcgtctcgcccgaccaccagggcaagggtctgggcagcgccgtcgtgctccccggagtggaggcggccgagcgcgccggggtgcccgccttcctggagacctccgcgccccgcaacctccccttctacgagcggctcggcttcaccgtcaccgccgacgtcgaggtgcccgaaggaccgcgcacctggtgcatgacccgcaagcccggtgcctga

SEQ ID NO: 33670 - DNA, 2619 bp, synthetic construct
  source 1..2619: mol_type = other DNA
atggccttaccagtgaccgccttgctcctgccgctggccttgctgctccacgccgccaggccgctcgaggaggacctgaagaacgtgttcccacctgaggtggccgtgttcgagcctagcgaggccgagatcagccacacccagaaagccaccctcgtgtgcctggctaccggcttctaccccgaccatgtggaactgtcttggtgggtcaacggcaaagaggtgcacagcggcgtgtctaccgacccccagccactgaaagaacagcccgccctgaacgacagccggtactgcctgagcagcagactgagagtgtccgccaccttctggcagaacccccggaaccacttcagatgccaggtgcagttctacggcctgagcgagaacgacgagtggacccaggacagagccaagcccgtgacccagatcgtgtctgccgaagcctggggcagagccgattgcgacgtgaagctggtggaaaagagcttcgagacagacaccaacctgaacttccagaacctgagcgtgatcggcttcagaatcctgctgctgaaagtggccggctttaacctgctgatgaccctgcggctgtggtccagcagggccaagcgatctggatctggagcaacaaacttctcactactcaaacaagcaggtgacgtggaggagaatcccgggcctactagcatggccttaccagtgaccgccttgctcctgccgctggccttgctgctccacgccgccaggccgagctacgtgctgacacagcctccatccgtgtctgtggctccaggacagaccgccagaatcacatgcggcggcaacaacatcggcggcaagagcgtgcactggtatcagcagccacctggacaggctccagtggtggtggtgtacgacgacagcgatagacctagcggcatccccgagagattcagcggcagcaattccggcaataccgccacactgaccatcagcagagtggaagctggcgacgaggccgtgtactactgccaagtgtgggacagcagcagcgatcacgtggtgtttggcggcggaacaaagctgacagtgcttggcggaggcggaagtggaggcggaggatctggcggcggaggctctcaactccagctgcaagagtctggccctggcctggtcaagcctagcgaaacactgagcctgacctgtaccgtgtctggcggctctatcagctccagcagctatttctggggctggatcagacaacctcctggcaaaggactggaatggatcggctccatctactacagcggcatcacctactacaaccccagcctgaagtccagagtgaccatctccgtggacaccagcaagaaccagttctccctgaagctgagcagcgtgacagccgccgataccgccgtgtattattgtgccagacatgacggcgctgtggccggcctgtttgattattggggacagggcaccctggtcaccgtgtcatctgctacgcgtatccagaaccctgatcctgccgtgtaccagctgcgggatagcaagagcagcgacaagagcgtgtgtctgttcaccgacttcgacagccagaccaacgtgtcccagagcaaggactccgacgtgtacatcaccgataagaccgtgctggacatgcggagcatggacttcaagagcaactccgccgtggcctggtccaacaagtccgatttcgcctgcgccaacgccttcaacaacagcattatccccgaggacacattcttcccaagccccgagagcagctgcggctttaccagcgagagctaccagcagggcgtgctgagcgccaccatcctgtacgagatcctgctgggcaaggccaccctgtacgccgtgctggtgtctgccctggtgctgatggctatggtcaagcggaaggacagccggggacgcgccaagagaagcggatctggcgtgaagcagaccctgaatttcgacctgctgaagctggctggcgacgtggaatccaacccaggcccttctagaggccatatgaccgagtacaagcccacggtgcgcctcgccacccgcgacgacgtccccagggccgtacgcaccctcgccgccgcgttcgccgactaccccgccacgcgccacaccgtcgatccggaccgccacatcgagcgggtcaccgagctgcaagaactcttcctcacgcgcgtcgggctcgacatcggcaaggtgtgggtcgcggacgacggcgccgcggtggcggtctggaccacgccggagagcgtcgaagcgggggcggtgttcgccgagatcggcccgcgcatggccgagttgagcggttcccggctggccgcgcagcaacagatggaaggcctcctggcgccgcaccggcccaaggagcccgcgtggttcctggccaccgtcggcgtctcgcccgaccaccagggcaagggtctgggcagcgccgtcgtgctccccggagtggaggcggccgagcgcgccggggtgcccgccttcctggagacctccgcgccccgcaacctccccttctacgagcggctcggcttcaccgtcaccgccgacgtcgaggtgcccgaaggaccgcgcacctggtgcatgacccgcaagcccggtgcctga

SEQ ID NO: 33671 - DNA, 2928 bp, synthetic construct
  source 1..2928: mol_type = other DNA
atggccttaccagtgaccgccttgctcctgccgctggccttgctgctccacgccgccaggccgctcgaggaggaggacctgaagaacgtgttcccacctgaggtggccgtgttcgagcctagcgaggccgagatcagccacacccagaaagccaccctcgtgtgcctggctaccggcttctaccccgaccatgtggaactgtcttggtgggtcaacggcaaagaggtgcacagcggcgtgtctaccgacccccagccactgaaagaacagcccgccctgaacgacagccggtactgcctgagcagcagactgagagtgtccgccaccttctggcagaacccccggaaccacttcagatgccaggtgcagttctacggcctgagcgagaacgacgagtggacccaggacagagccaagcccgtgacccagatcgtgtctgccgaagcctggggcagagccgatgatgtgattaagatccactggcaggaaaagaagtccaacaccatcctgggcagccaggaaggcaacaccatgaagaccaacgacacctacatgaagttcagctggctgaccgtgcccgagaagtccctggacaaagaacacagatgcatcgtgcggcacgaaaacaacaagaacggcgtggaccaggaaatcatcttcccacccatcaagaccgatgtgattacaatggaccccaaggacaactgctccaaggacgccaacgataccctgctgctccagctgaccaacaccagcgcctactacatgtacttgttgctgctgctgaagtccgtggtgtacttcgccatcatcacatgctgcctgctgcggagaaccgccttctgctgcaacggcgagaagtctagggccaagcgatctggatctggagcaacaaacttctcactactcaaacaagcaggtgacgtggaggagaatcccgggcctactagcatggccttaccagtgaccgccttgctcctgccgctggccttgctgctccacgccgccaggccgagctacgtgctgacacagcctccatccgtgtctgtggctccaggacagaccgccagaatcacatgcggcggcaacaacatcggcggcaagagcgtgcactggtatcagcagccacctggacaggctccagtggtggtggtgtacgacgacagcgatagacctagcggcatccccgagagattcagcggcagcaattccggcaataccgccacactgaccatcagcagagtggaagctggcgacgaggccgtgtactactgccaagtgtgggacagcagcagcgatcacgtggtgtttggcggcggaacaaagctgacagtgcttggcggaggcggaagtggaggcggaggatctggcggcggaggctctcaactccagctgcaagagtctggccctggcctggtcaagcctagcgaaacactgagcctgacctgtaccgtgtctggcggctctatcagctccagcagctatttctggggctggatcagacaacctcctggcaaaggactggaatggatcggctccatctactacagcggcatcacctactacaaccccagcctgaagtccagagtgaccatctccgtggacaccagcaagaaccagttctccctgaagctgagcagcgtgacagccgccgataccgccgtgtattattgtgccagacatgacggcgctgtggccggcctgtttgattattggggacagggcaccctggtcaccgtgtcatctgctacgcgtatccagaaccctgatcctgccgtgtaccagctgcgggatagcaagagcagcgacaagagcgtgtgtctgttcaccgacttcgacagccagaccaacgtgtcccagagcaaggactccgacgtgtacatcaccgataagaccgtgctggacatgcggagcatggacttcaagagcaactccgccgtggcctggtccaacaagtccgatttcgcctgcgccaacgccttcaacaacagcattatccccgaggacacattcttcccaagccccgagagcagcgactccaccgaccacgtgaagcccaaagagacagagaacaccaagcagcccagcaagagctgccacaagcccaaggccatcgtgcacaccgagaaagtgaacatgatgagcctgaccgtgctgggcctgcggatgctgttcgccaaaaccgtggccgtgaacttcctgctgaccgccaagctgttcttcctccgcgccaagagaagcggatctggcgtgaagcagaccctgaatttcgacctgctgaagctggctggcgacgtggaatccaacccaggcccttctagaggccatatgaccgagtacaagcccacggtgcgcctcgccacccgcgacgacgtccccagggccgtacgcaccctcgccgccgcgttcgccgactaccccgccacgcgccacaccgtcgatccggaccgccacatcgagcgggtcaccgagctgcaagaactcttcctcacgcgcgtcgggctcgacatcggcaaggtgtgggtcgcggacgacggcgccgcggtggcggtctggaccacgccggagagcgtcgaagcgggggcggtgttcgccgagatcggcccgcgcatggccgagttgagcggttcccggctggccgcgcagcaacagatggaaggcctcctggcgccgcaccggcccaaggagcccgcgtggttcctggccaccgtcggcgtctcgcccgaccaccagggcaagggtctgggcagcgccgtcgtgctccccggagtggaggcggccgagcgcgccggggtgcccgccttcctggagacctccgcgccccgcaacctccccttctacgagcggctcggcttcaccgtcaccgccgacgtcgaggtgcccgaaggaccgcgcacctggtgcatgacccgcaagcccggtgcctga

SEQ ID NO: 33672 - DNA, 2619 bp, synthetic construct
  source 1..2619: mol_type = other DNA
atggccttaccagtgaccgccttgctcctgccgctggccttgctgctccacgccgccaggccgctcgaggaggacctgaagaacgtgttcccacctgaggtggccgtgttcgagcctagcgaggccgagatcagccacacccagaaagccaccctcgtgtgcctggctaccggcttctaccccgaccatgtggaactgtcttggtgggtcaacggcaaagaggtgcacagcggcgtgtgtaccgacccccagccactgaaagaacagcccgccctgaacgacagccggtactgcctgagcagcagactgagagtgtccgccaccttctggcagaacccccggaaccacttcagatgccaggtgcagttctacggcctgagcgagaacgacgagtggacccaggacagagccaagcccgtgacccagatcgtgtctgccgaagcctggggcagagccgattgcggctttaccagcgagagctaccagcagggcgtgctgagcgccaccaacctgagcgtgatcggcttcagaatcctgctgctgaaagtggccggctttaacctgctgatgaccctgcggctgtggtccagcagggccaagcgatctggatctggagcaacaaacttctcactactcaaacaagcaggtgacgtggaggagaatcccgggcctactagcatggccttaccagtgaccgccttgctcctgccgctggccttgctgctccacgccgccaggccgagctacgtgctgacacagcctccatccgtgtctgtggctccaggacagaccgccagaatcacatgcggcggcaacaacatcggcggcaagagcgtgcactggtatcagcagccacctggacaggctccagtggtggtggtgtacgacgacagcgatagacctagcggcatccccgagagattcagcggcagcaattccggcaataccgccacactgaccatcagcagagtggaagctggcgacgaggccgtgtactactgccaagtgtgggacagcagcagcgatcacgtggtgtttggcggcggaacaaagctgacagtgcttggcggaggcggaagtggaggcggaggatctggcggcggaggctctcaactccagctgcaagagtctggccctggcctggtcaagcctagcgaaacactgagcctgacctgtaccgtgtctggcggctctatcagctccagcagctatttctggggctggatcagacaacctcctggcaaaggactggaatggatcggctccatctactacagcggcatcacctactacaaccccagcctgaagtccagagtgaccatctccgtggacaccagcaagaaccagttctccctgaagctgagcagcgtgacagccgccgataccgccgtgtattattgtgccagacatgacggcgctgtggccggcctgtttgattattggggacagggcaccctggtcaccgtgtcatctgctacgcgtatccagaaccctgatcctgccgtgtaccagctgcgggatagcaagagcagcgacaagagcgtgtgtctgttcaccgacttcgacagccagaccaacgtgtcccagagcaaggactccgacgtgtacatcaccgataagtgcgtgctggacatgcggagcatggacttcaagagcaactccgccgtggcctggtccaacaagtccgatttcgcctgcgccaacgccttcaacaacagcattatccccgaggacacattcttcccaagccccgagagcagctgcgacgtgaagctggtggaaaagagcttcgagacagacaccaacctgaacttccagatcctgtacgagatcctgctgggcaaggccaccctgtacgccgtgctggtgtctgccctggtgctgatggctatggtcaagcggaaggacagccggggacgcgccaagagaagcggatctggcgtgaagcagaccctgaatttcgacctgctgaagctggctggcgacgtggaatccaacccaggcccttctagaggccatatgaccgagtacaagcccacggtgcgcctcgccacccgcgacgacgtccccagggccgtacgcaccctcgccgccgcgttcgccgactaccccgccacgcgccacaccgtcgatccggaccgccacatcgagcgggtcaccgagctgcaagaactcttcctcacgcgcgtcgggctcgacatcggcaaggtgtgggtcgcggacgacggcgccgcggtggcggtctggaccacgccggagagcgtcgaagcgggggcggtgttcgccgagatcggcccgcgcatggccgagttgagcggttcccggctggccgcgcagcaacagatggaaggcctcctggcgccgcaccggcccaaggagcccgcgtggttcctggccaccgtcggcgtctcgcccgaccaccagggcaagggtctgggcagcgccgtcgtgctccccggagtggaggcggccgagcgcgccggggtgcccgccttcctggagacctccgcgccccgcaacctccccttctacgagcggctcggcttcaccgtcaccgccgacgtcgaggtgcccgaaggaccgcgcacctggtgcatgacccgcaagcccggtgcctga

SEQ ID NO: 33673 - DNA, 2706 bp, synthetic construct
  source 1..2706: mol_type = other DNA
atggccttaccagtgaccgccttgctcctgccgctggccttgctgctccacgccgccaggccgctcgaggaggaggacctgaagaacgtgttcccacctgaggtggccgtgttcgagcctagcgaggccgagatcagccacacccagaaagccaccctcgtgtgcctggctaccggcttctaccccgaccatgtggaactgtcttggtgggtcaacggcaaagaggtgcacagcggcgtgtgtaccgacccccagccactgaaagaacagcccgccctgaacgacagccggtactgcctgagcagcagactgagagtgtccgccaccttctggcagaacccccggaaccacttcagatgccaggtgcagttctacggcctgagcgagaacgacgagtggacccaggacagagccaagcccgtgacccagatcgtgtctgccgaagcctggggcagagccgattgcggctttaccagcgagagctaccagcagggcgtgctgagcgccaccaacctgagcgtgatcggcttcagaatcctgctgctgaaagtggccggctttaacctgctgatgaccctgcggctgtggtccagcagggccaagcgatctggatctggagcaacaaacttctcactactcaaacaagcaggtgacgtggaggagaatcccgggcctactagcatggccttaccagtgaccgccttgctcctgccgctggccttgctgctccacgccgccaggccgagctacgtgctgacacagcctccatccgtgtctgtggctccaggacagaccgccagaatcacatgcggcggcaacaacatcggcggcaagagcgtgcactggtatcagcagccacctggacaggctccagtggtggtggtgtacgacgacagcgatagacctagcggcatccccgagagattcagcggcagcaattccggcaataccgccacactgaccatcagcagagtggaagctggcgacgaggccgtgtactactgccaagtgtgggacagcagcagcgatcacgtggtgtttggcggcggaacaaagctgacagtgcttggcggaggcggaagtggaggcggaggatctggcggcggaggctctcaactccagctgcaagagtctggccctggcctggtcaagcctagcgaaacactgagcctgacctgtaccgtgtctggcggctctatcagctccagcagctatttctggggctggatcagacaacctcctggcaaaggactggaatggatcggctccatctactacagcggcatcacctactacaaccccagcctgaagtccagagtgaccatctccgtggacaccagcaagaaccagttctccctgaagctgagcagcgtgacagccgccgataccgccgtgtattattgtgccagacatgacggcgctgtggccggcctgtttgattattggggacagggcaccctggtcaccgtgtcatctgctacgcgtggacagcctaaggccaatcctaccgtgacactgttccctccaagcagcgaagaactccaggccaacaaggccacacttgtgtgcctgatctccgacttctaccctggggctgtgacagtggcttggaaggccgatggatctcctgtgaaagccggcgtggaaaccaccaagccatccaagcagagcaacaacaaatacgccgccagctcctacctgagcctgacacctgagcagtggaagtcccacagatcctacagctgccaagtgacccacgaaggcagcaccgtggaaaagacagtggcccctacagagtgcagccccatcaagaccgatgtgattacaatggaccccaaggacaactgctccaaggacgccaacgataccctgctgctccagctgaccaacaccagcgcctactacatgtacttgttgctgctgctgaagtccgtggtgtacttcgccatcatcacatgctgcctgctgcggagaaccgccttctgctgcaacggcgagaagtctcgcgccaagagaagcggatctggcgtgaagcagaccctgaatttcgacctgctgaagctggctggcgacgtggaatccaacccaggcccttctagaggccatatgaccgagtacaagcccacggtgcgcctcgccacccgcgacgacgtccccagggccgtacgcaccctcgccgccgcgttcgccgactaccccgccacgcgccacaccgtcgatccggaccgccacatcgagcgggtcaccgagctgcaagaactcttcctcacgcgcgtcgggctcgacatcggcaaggtgtgggtcgcggacgacggcgccgcggtggcggtctggaccacgccggagagcgtcgaagcgggggcggtgttcgccgagatcggcccgcgcatggccgagttgagcggttcccggctggccgcgcagcaacagatggaaggcctcctggcgccgcaccggcccaaggagcccgcgtggttcctggccaccgtcggcgtctcgcccgaccaccagggcaagggtctgggcagcgccgtcgtgctccccggagtggaggcggccgagcgcgccggggtgcccgccttcctggagacctccgcgccccgcaacctccccttctacgagcggctcggcttcaccgtcaccgccgacgtcgaggtgcccgaaggaccgcgcacctggtgcatgacccgcaagcccggtgcctga

SEQ ID NO: 33674 - DNA, 2706 bp, synthetic construct
  source 1..2706: mol_type = other DNA
atggccttaccagtgaccgccttgctcctgccgctggccttgctgctccacgccgccaggccgctcgagggacagcctaaggccaatcctaccgtgacactgttccctccaagcagcgaagaactccaggccaacaaggccacacttgtgtgcctgatctccgacttctaccctggggctgtgacagtggcttggaaggccgatggatctcctgtgaaagccggcgtggaaaccaccaagccatccaagcagagcaacaacaaatacgccgccagctcctacctgagcctgacacctgagcagtggaagtcccacagatcctacagctgccaagtgacccacgaaggcagcaccgtggaaaagacagtggcccctacagagtgcagccccatcaagaccgatgtgattacaatggaccccaaggacaactgctccaaggacgccaacgataccctgctgctccagctgaccaacaccagcgcctactacatgtacttgttgctgctgctgaagtccgtggtgtacttcgccatcatcacatgctgcctgctgcggagaaccgccttctgctgcaacggcgagaagtctagggccaagcgatctggatctggagcaacaaacttctcactactcaaacaagcaggtgacgtggaggagaatcccgggcctactagcatggccttaccagtgaccgccttgctcctgccgctggccttgctgctccacgccgccaggccgagctacgtgctgacacagcctccatccgtgtctgtggctccaggacagaccgccagaatcacatgcggcggcaacaacatcggcggcaagagcgtgcactggtatcagcagccacctggacaggctccagtggtggtggtgtacgacgacagcgatagacctagcggcatccccgagagattcagcggcagcaattccggcaataccgccacactgaccatcagcagagtggaagctggcgacgaggccgtgtactactgccaagtgtgggacagcagcagcgatcacgtggtgtttggcggcggaacaaagctgacagtgcttggcggaggcggaagtggaggcggaggatctggcggcggaggctctcaactccagctgcaagagtctggccctggcctggtcaagcctagcgaaacactgagcctgacctgtaccgtgtctggcggctctatcagctccagcagctatttctggggctggatcagacaacctcctggcaaaggactggaatggatcggctccatctactacagcggcatcacctactacaaccccagcctgaagtccagagtgaccatctccgtggacaccagcaagaaccagttctccctgaagctgagcagcgtgacagccgccgataccgccgtgtattattgtgccagacatgacggcgctgtggccggcctgtttgattattggggacagggcaccctggtcaccgtgtcatctgctacgcgtgaggaggacctgaagaacgtgttcccacctgaggtggccgtgttcgagcctagcgaggccgagatcagccacacccagaaagccaccctcgtgtgcctggctaccggcttctaccccgaccatgtggaactgtcttggtgggtcaacggcaaagaggtgcacagcggcgtgtgtaccgacccccagccactgaaagaacagcccgccctgaacgacagccggtactgcctgagcagcagactgagagtgtccgccaccttctggcagaacccccggaaccacttcagatgccaggtgcagttctacggcctgagcgagaacgacgagtggacccaggacagagccaagcccgtgacccagatcgtgtctgccgaagcctggggcagagccgattgcggctttaccagcgagagctaccagcagggcgtgctgagcgccaccaacctgagcgtgatcggcttcagaatcctgctgctgaaagtggccggctttaacctgctgatgaccctgcggctgtggtccagccgcgccaagagaagcggatctggcgtgaagcagaccctgaatttcgacctgctgaagctggctggcgacgtggaatccaacccaggcccttctagaggccatatgaccgagtacaagcccacggtgcgcctcgccacccgcgacgacgtccccagggccgtacgcaccctcgccgccgcgttcgccgactaccccgccacgcgccacaccgtcgatccggaccgccacatcgagcgggtcaccgagctgcaagaactcttcctcacgcgcgtcgggctcgacatcggcaaggtgtgggtcgcggacgacggcgccgcggtggcggtctggaccacgccggagagcgtcgaagcgggggcggtgttcgccgagatcggcccgcgcatggccgagttgagcggttcccggctggccgcgcagcaacagatggaaggcctcctggcgccgcaccggcccaaggagcccgcgtggttcctggccaccgtcggcgtctcgcccgaccaccagggcaagggtctgggcagcgccgtcgtgctccccggagtggaggcggccgagcgcgccggggtgcccgccttcctggagacctccgcgccccgcaacctccccttctacgagcggctcggcttcaccgtcaccgccgacgtcgaggtgcccgaaggaccgcgcacctggtgcatgacccgcaagcccggtgcctga

SEQ ID NO: 33675 - DNA, 2697 bp, synthetic construct
  source 1..2697: mol_type = other DNA
atggccttaccagtgaccgccttgctcctgccgctggccttgctgctccacgccgccaggccgctcgaggaggcctctacaaagggaccctccgtgtttcctctggctcccagcagcaagtctacaagcggaggaacagccgctctgggctgcctggtcaaggattactttcccgagcctgtgaccgtgtcctggaatagcggagcactgacaagcggcgtgcacacctttccagccgtgctgcaaagcagcggcctgtactctctgagcagcgtggtcacagtgcctagctctagcctgggcacccagacctacatctgcaatgtgaaccacaagcctagcaacaccaaggtggacaagagagtggaacccaagagctgtcccatcaagaccgatgtgattacaatggaccccaaggacaactgctccaaggacgccaacgataccctgctgctccagctgaccaacaccagcgcctactacatgtacttgttgctgctgctgaagtccgtggtgtacttcgccatcatcacatgctgcctgctgcggagaaccgccttctgctgcaacggcgagaagtctagggccaagcgatctggatctggagcaacaaacttctcactactcaaacaagcaggtgacgtggaggagaatcccgggcctactagcatggccttaccagtgaccgccttgctcctgccgctggccttgctgctccacgccgccaggccgagctacgtgctgacacagcctccatccgtgtctgtggctccaggacagaccgccagaatcacatgcggcggcaacaacatcggcggcaagagcgtgcactggtatcagcagccacctggacaggctccagtggtggtggtgtacgacgacagcgatagacctagcggcatccccgagagattcagcggcagcaattccggcaataccgccacactgaccatcagcagagtggaagctggcgacgaggccgtgtactactgccaagtgtgggacagcagcagcgatcacgtggtgtttggcggcggaacaaagctgacagtgcttggcggaggcggaagtggaggcggaggatctggcggcggaggctctcaactccagctgcaagagtctggccctggcctggtcaagcctagcgaaacactgagcctgacctgtaccgtgtctggcggctctatcagctccagcagctatttctggggctggatcagacaacctcctggcaaaggactggaatggatcggctccatctactacagcggcatcacctactacaaccccagcctgaagtccagagtgaccatctccgtggacaccagcaagaaccagttctccctgaagctgagcagcgtgacagccgccgataccgccgtgtattattgtgccagacatgacggcgctgtggccggcctgtttgattattggggacagggcaccctggtcaccgtgtcatctgctacgcgtggacagcctaaggccaatcctaccgtgacactgttccctccaagcagcgaagaactccaggccaacaaggccacacttgtgtgcctgatctccgacttctaccctggggctgtgacagtggcttggaaggccgatggatctcctgtgaaagccggcgtggaaaccaccaagccatccaagcagagcaacaacaaatacgccgccagctcctacctgagcctgacacctgagcagtggaagtcccacagatcctacagctgccaagtgacccacgaaggcagcaccgtggaaaagacagtggcccctacagagtgcagcgaagtgaaaaccgactccaccgaccacgtgaagcccaaagagacagagaacaccaagcagcccagcaagagctgccacaagcccaaggccatcgtgcacaccgagaaagtgaacatgatgagcctgaccgtgctgggcctgcggatgctgttcgccaaaaccgtggccgtgaacttcctgctgaccgccaagctgttcttcctccgcgccaagagaagcggatctggcgtgaagcagaccctgaatttcgacctgctgaagctggctggcgacgtggaatccaacccaggcccttctagaggccatatgaccgagtacaagcccacggtgcgcctcgccacccgcgacgacgtccccagggccgtacgcaccctcgccgccgcgttcgccgactaccccgccacgcgccacaccgtcgatccggaccgccacatcgagcgggtcaccgagctgcaagaactcttcctcacgcgcgtcgggctcgacatcggcaaggtgtgggtcgcggacgacggcgccgcggtggcggtctggaccacgccggagagcgtcgaagcgggggcggtgttcgccgagatcggcccgcgcatggccgagttgagcggttcccggctggccgcgcagcaacagatggaaggcctcctggcgccgcaccggcccaaggagcccgcgtggttcctggccaccgtcggcgtctcgcccgaccaccagggcaagggtctgggcagcgccgtcgtgctccccggagtggaggcggccgagcgcgccggggtgcccgccttcctggagacctccgcgccccgcaacctccccttctacgagcggctcggcttcaccgtcaccgccgacgtcgaggtgcccgaaggaccgcgcacctggtgcatgacccgcaagcccggtgcctga

SEQ ID NO: 33676 - DNA, 2631 bp, synthetic construct
  source 1..2631: mol_type = other DNA
atggccttaccagtgaccgccttgctcctgccgctggccttgctgctccacgccgccaggccgctcgaggaggcctctacaaagggaccctccgtgtttcctctggctcccagcagcaagtctacaagcggaggaacagccgctctgggctgcctggtcaaggattactttcccgagcctgtgaccgtgtcctggaatagcggagcactgacaagcggcgtgcacacctttccagccgtgctgcaaagcagcggcctgtactctctgagcagcgtggtcacagtgcctagctctagcctgggcacccagacctacatctgcaatgtgaaccacaagcctagcaacaccaaggtggacaagagagtggaacccaagagctgtggcagagccgattgcggctttaccagcgagagctaccagcagggcgtgctgagcgccaccatcctgtacgagatcctgctgggcaaggccaccctgtacgccgtgctggtgtctgccctggtgctgatggctatggtcaagcggaaggacagccggggaagggccaagcgatctggatctggagcaacaaacttctcactactcaaacaagcaggtgacgtggaggagaatcccgggcctactagcatggccttaccagtgaccgccttgctcctgccgctggccttgctgctccacgccgccaggccgagctacgtgctgacacagcctccatccgtgtctgtggctccaggacagaccgccagaatcacatgcggcggcaacaacatcggcggcaagagcgtgcactggtatcagcagccacctggacaggctccagtggtggtggtgtacgacgacagcgatagacctagcggcatccccgagagattcagcggcagcaattccggcaataccgccacactgaccatcagcagagtggaagctggcgacgaggccgtgtactactgccaagtgtgggacagcagcagcgatcacgtggtgtttggcggcggaacaaagctgacagtgcttggcggaggcggaagtggaggcggaggatctggcggcggaggctctcaactccagctgcaagagtctggccctggcctggtcaagcctagcgaaacactgagcctgacctgtaccgtgtctggcggctctatcagctccagcagctatttctggggctggatcagacaacctcctggcaaaggactggaatggatcggctccatctactacagcggcatcacctactacaaccccagcctgaagtccagagtgaccatctccgtggacaccagcaagaaccagttctccctgaagctgagcagcgtgacagccgccgataccgccgtgtattattgtgccagacatgacggcgctgtggccggcctgtttgattattggggacagggcaccctggtcaccgtgtcatctgctacgcgtggacagcctaaggccaatcctaccgtgacactgttccctccaagcagcgaagaactccaggccaacaaggccacacttgtgtgcctgatctccgacttctaccctggggctgtgacagtggcttggaaggccgatggatctcctgtgaaagccggcgtggaaaccaccaagccatccaagcagagcaacaacaaatacgccgccagctcctacctgagcctgacacctgagcagtggaagtcccacagatcctacagctgccaagtgacccacgaaggcagcaccgtggaaaagacagtggcccctacagagtgcagcatccccgaggacacattcttcccaagccccgagagcagctgcgacgtgaagctggtggaaaagagcttcgagacagacaccaacctgaacttccagaacctgagcgtgatcggcttcagaatcctgctgctgaaagtggccggctttaacctgctgatgaccctgcggctgtggtccagccgcgccaagagaagcggatctggcgtgaagcagaccctgaatttcgacctgctgaagctggctggcgacgtggaatccaacccaggcccttctagaggccatatgaccgagtacaagcccacggtgcgcctcgccacccgcgacgacgtccccagggccgtacgcaccctcgccgccgcgttcgccgactaccccgccacgcgccacaccgtcgatccggaccgccacatcgagcgggtcaccgagctgcaagaactcttcctcacgcgcgtcgggctcgacatcggcaaggtgtgggtcgcggacgacggcgccgcggtggcggtctggaccacgccggagagcgtcgaagcgggggcggtgttcgccgagatcggcccgcgcatggccgagttgagcggttcccggctggccgcgcagcaacagatggaaggcctcctggcgccgcaccggcccaaggagcccgcgtggttcctggccaccgtcggcgtctcgcccgaccaccagggcaagggtctgggcagcgccgtcgtgctccccggagtggaggcggccgagcgcgccggggtgcccgccttcctggagacctccgcgccccgcaacctccccttctacgagcggctcggcttcaccgtcaccgccgacgtcgaggtgcccgaaggaccgcgcacctggtgcatgacccgcaagcccggtgcctga

SEQ ID NO: 33677 - DNA, 2631 bp, synthetic construct
  source 1..2631: mol_type = other DNA
atggccttaccagtgaccgccttgctcctgccgctggccttgctgctccacgccgccaggccgctcgaggaggcctctacaaagggaccctccgtgtttcctctggctcccagcagcaagtctacaagcggaggaacagccgctctgggctgcctggtcaaggattactttcccgagcctgtgaccgtgtcctggaatagcggagcactgacaagcggcgtgcacacctttccagccgtgctgcaaagcagcggcctgtactctctgagcagcgtggtcacagtgcctagctctagcctgggcacccagacctacatctgcaatgtgaaccacaagcctagcaacaccaaggtggacaagagagtggaacccaagagctgtatccccgaggacacattcttcccaagccccgagagcagctgcgacgtgaagctggtggaaaagagcttcgagacagacaccaacctgaacttccagaacctgagcgtgatcggcttcagaatcctgctgctgaaagtggccggctttaacctgctgatgaccctgcggctgtggtccagcagggccaagcgatctggatctggagcaacaaacttctcactactcaaacaagcaggtgacgtggaggagaatcccgggcctactagcatggccttaccagtgaccgccttgctcctgccgctggccttgctgctccacgccgccaggccgagctacgtgctgacacagcctccatccgtgtctgtggctccaggacagaccgccagaatcacatgcggcggcaacaacatcggcggcaagagcgtgcactggtatcagcagccacctggacaggctccagtggtggtggtgtacgacgacagcgatagacctagcggcatccccgagagattcagcggcagcaattccggcaataccgccacactgaccatcagcagagtggaagctggcgacgaggccgtgtactactgccaagtgtgggacagcagcagcgatcacgtggtgtttggcggcggaacaaagctgacagtgcttggcggaggcggaagtggaggcggaggatctggcggcggaggctctcaactccagctgcaagagtctggccctggcctggtcaagcctagcgaaacactgagcctgacctgtaccgtgtctggcggctctatcagctccagcagctatttctggggctggatcagacaacctcctggcaaaggactggaatggatcggctccatctactacagcggcatcacctactacaaccccagcctgaagtccagagtgaccatctccgtggacaccagcaagaaccagttctccctgaagctgagcagcgtgacagccgccgataccgccgtgtattattgtgccagacatgacggcgctgtggccggcctgtttgattattggggacagggcaccctggtcaccgtgtcatctgctacgcgtggacagcctaaggccaatcctaccgtgacactgttccctccaagcagcgaagaactccaggccaacaaggccacacttgtgtgcctgatctccgacttctaccctggggctgtgacagtggcttggaaggccgatggatctcctgtgaaagccggcgtggaaaccaccaagccatccaagcagagcaacaacaaatacgccgccagctcctacctgagcctgacacctgagcagtggaagtcccacagatcctacagctgccaagtgacccacgaaggcagcaccgtggaaaagacagtggcccctacagagtgcagcggcagagccgattgcggctttaccagcgagagctaccagcagggcgtgctgagcgccaccatcctgtacgagatcctgctgggcaaggccaccctgtacgccgtgctggtgtctgccctggtgctgatggctatggtcaagcggaaggacagccggggacgcgccaagagaagcggatctggcgtgaagcagaccctgaatttcgacctgctgaagctggctggcgacgtggaatccaacccaggcccttctagaggccatatgaccgagtacaagcccacggtgcgcctcgccacccgcgacgacgtccccagggccgtacgcaccctcgccgccgcgttcgccgactaccccgccacgcgccacaccgtcgatccggaccgccacatcgagcgggtcaccgagctgcaagaactcttcctcacgcgcgtcgggctcgacatcggcaaggtgtgggtcgcggacgacggcgccgcggtggcggtctggaccacgccggagagcgtcgaagcgggggcggtgttcgccgagatcggcccgcgcatggccgagttgagcggttcccggctggccgcgcagcaacagatggaaggcctcctggcgccgcaccggcccaaggagcccgcgtggttcctggccaccgtcggcgtctcgcccgaccaccagggcaagggtctgggcagcgccgtcgtgctccccggagtggaggcggccgagcgcgccggggtgcccgccttcctggagacctccgcgccccgcaacctccccttctacgagcggctcggcttcaccgtcaccgccgacgtcgaggtgcccgaaggaccgcgcacctggtgcatgacccgcaagcccggtgcctga

SEQ ID NO: 33678 - DNA, 1869 bp, synthetic construct
  source 1..1869: mol_type = other DNA
atggccttaccagtgaccgccttgctcctgccgctggccttgctgctccacgccgccaggccgagctacgtgctgacacagcctccatccgtgtctgtggctccaggacagaccgccagaatcacatgcggcggcaacaacatcggcggcaagagcgtgcactggtatcagcagccacctggacaggctccagtggtggtggtgtacgacgacagcgatagacctagcggcatccccgagagattcagcggcagcaattccggcaataccgccacactgaccatcagcagagtggaagctggcgacgaggccgtgtactactgccaagtgtgggacagcagcagcgatcacgtggtgtttggcggcggaacaaagctgacagtgcttctcgaggacctgaagaacgtgttcccacctgaggtggccgtgttcgagcctagcgaggccgagatcagccacacccagaaagccaccctcgtgtgcctggctaccggcttctaccccgaccatgtggaactgtcttggtgggtcaacggcaaagaggtgcacagcggcgtgtgtaccgacccccagccactgaaagaacagcccgccctgaacgacagccggtactgcctgagcagcagactgagagtgtccgccaccttctggcagaacccccggaaccacttcagatgccaggtgcagttctacggcctgagcgagaacgacgagtggacccaggacagagccaagcccgtgacccagatcgtgtctgccgaagcctggggcagagccgatagcggctttaccagcgagagctaccagcagggcgtgctgagcgccaccatcctgtacgagatcctgctgggcaaggccaccctgtacgccgtgctggtgtctgccctggtgctgatggctatggtcaagcggaaggacagccggggaagggccaagcgatctggatctggagcaacaaacttctcactactcaaacaagcaggtgacgtggaggagaatcccgggcctactagtatggactggatttggcgcatccttttccttgtcggcgctgctaccggcgcgcattccttcgaacaactccagctgcaagagtctggccctggcctggtcaagcctagcgaaacactgagcctgacctgtaccgtgtctggcggctctatcagctccagcagctatttctggggctggatcagacaacctcctggcaaaggactggaatggatcggctccatctactacagcggcatcacctactacaaccccagcctgaagtccagagtgaccatctccgtggacaccagcaagaaccagttctccctgaagctgagcagcgtgacagccgccgataccgccgtgtattattgtgccagacatgacggcgctgtggccggcctgtttgattattggggacagggcaccctggtcaccgtgtcatctgctacgcgtatccagaaccctgatcctgccgtgtaccagctgcgggatagcaagagcagcgacaagagcgtgtgtctgttcaccgacttcgacagccagaccaacgtgtcccagagcaaggactccgacgtgtacatcaccgataagtgcgtgctggacatgcggagcatggacttcaagagcaactccgccgtggcctggtccaacaagtccgatttcgcctgcgccaacgccttcaacaacagcattatccccgaggacacattcttcccaagccccgagagcagcagcgacgtgaagctggtggaaaagagcttcgagacagacaccaacctgaacttccagaacctgagcgtgatcggcttcagaatcctgctgctgaaagtggccggctttaacctgctgatgaccctgcggctgtggtccagc

SEQ ID NO: 33679 - DNA, 2709 bp, synthetic construct
  source 1..2709: mol_type = other DNA
atggccttaccagtgaccgccttgctcctgccgctggccttgctgctccacgccgccaggccggaggttcagctgcttgagtctggcggaggactggttcaacctggcggaagcctgagactgtcttgtgccgcctctggcagaaccttcagcatgggctggtatagacaggcccctggcaagggcctcgaatttgtgtctgccatcacatacagcggcggcagcccttactacgccgattctgtgaagggcagattcaccatcagccgggacaacagcaagaacaccgtgtacctccagatgaacagcctgagagccgaggacaccgccgtgtactactgtgccgccaatccaacctacggcagcgactggaatgccgagaattggggccagggcacactggtcacagtgtctagtggtaccggcggaggcggatctggcggcggaggtagcggtggcggaggatctgaattcagctacgtgctgacacagcctccatccgtgtctgtggctccaggacagaccgccagaatcacatgcggcggcaacaacatcggcggcaagagcgtgcactggtatcagcagccacctggacaggctccagtggtggtggtgtacgacgacagcgatagacctagcggcatccccgagagattcagcggcagcaattccggcaataccgccacactgaccatcagcagagtggaagctggcgacgaggccgtgtactactgccaagtgtgggacagcagcagcgatcacgtggtgtttggcggcggaacaaagctgacagtgcttctcgagatccagaaccctgatcctgccgtgtaccagctgcgggatagcaagagcagcgacaagagcgtgtgtctgttcaccgacttcgacagccagaccaacgtgtcccagagcaaggactccgacgtgtacatcaccgataagtgcgtgctggacatgcggagcatggacttcaagagcaactccgccgtggcctggtccaacaagtccgatttcgcctgcgccaacgccttcaacaacagcattatccccgaggacacattcttcccaagcagcgacgtgccctgcgacgtgaagctggtggaaaagagcttcgagacagacaccaacctgaacttccagaacctgagcgtgatcggcttcagaatcctgctgctgaaagtggccggctttaacctgctgatgaccctgcggctgtggtccagccgcgccaagagaagcggatctggcgtgaagcagaccctgaatttcgacctgctgaagctggctggcgacgtggaatccaacccaggccctactagtaccatggactggatttggcgcatccttttccttgtcggcgctgctaccggcacccattccgggcccgaagtgcaactggttgaatccggtggcggcctggtgcaacccggcggatctctcagacttagctgtgccgcctccggcagaaccttcacaatgggatggtacaggcaggctccagggaaagagagagagttcgtcgccgccatctctctgtctcccacactggcctactacgccgactctgtgaaaggccggttcaccatctccagagataatagcaagaacaccgtggtgctgcaaatgaactctctgagagccgaggatacagccctgtactattgtgccgctgaccggaagtccgtgatgagcatcagacccgattactggggacagggcacactggtcacagtgtctagtggatccggcggcggaggatctggcggaggcggatctgggggcggaggctctttcgaacaactccagctgcaagagtctggccctggcctggtcaagcctagcgaaacactgagcctgacctgtaccgtgtctggcggctctatcagctccagcagctatttctggggctggatcagacaacctcctggcaaaggactggaatggatcggctccatctactacagcggcatcacctactacaaccccagcctgaagtccagagtgaccatctccgtggacaccagcaagaaccagttctccctgaagctgagcagcgtgacagccgccgataccgccgtgtattattgtgccagacatgacggcgctgtggccggcctgtttgattattggggacagggcaccctggtcaccgtgtcatctgctacgcgtgaggacctgaagaacgtgttcccacctgaggtggccgtgttcgagcctagcaaggccgagatcgcccacacccagaaagccaccctcgtgtgcctggctaccggcttctaccccgaccatgtggaactgtcttggtgggtcaacggcaaagaggtgcacagcggcgtgtgtaccgacccccagccactgaaagaacagcccgccctgaacgacagccggtactgcctgagcagcagactgagagtgtccgccaccttctggcagaacccccggaaccacttcagatgccaggtgcagttctacggcctgagcgagaacgacgagtggacccaggacagagccaagcccgtgacccagatcgtgtctgccgaagcctggggcagagccgattgcggcatcaccagcgccagctaccaccagggcgtgctgagcgccaccatcctgtacgagatcctgctgggcaaggccaccctgtacgccgtgctggtgtctgccctggtgctgatggctatggtcaagcggaaggacagccggggataa

SEQ ID NO: 33680 - DNA, 2709 bp, synthetic construct
  source 1..2709: mol_type = other DNA
atggccttaccagtgaccgccttgctcctgccgctggccttgctgctccacgccgccaggccggaagtgcagctggttgaatctggcggaggactggttcaggctggcggatctctgagactgtcttgtgccgccagcggcagaacctttagcatgggctggtttagacaggcccctggcaaagagagagagttcgtcgccgccatcacatactctggcggcagcccttactacgccgactctgtgaagggcagattcaccatcagccgggacaacgccaagaacaccgtgtacctccagatgaacagcctgaagcctgaggacaccgccgtgtactactgcgccgccaatccaacatacggcagcgactggaacgccgagaattggggccagggaacccaagtgacagtgtctagcggtaccggcggaggcggatctggcggcggaggtagcggtggcggaggatctgaattcagctacgtgctgacacagcctccatccgtgtctgtggctccaggacagaccgccagaatcacatgcggcggcaacaacatcggcggcaagagcgtgcactggtatcagcagccacctggacaggctccagtggtggtggtgtacgacgacagcgatagacctagcggcatccccgagagattcagcggcagcaattccggcaataccgccacactgaccatcagcagagtggaagctggcgacgaggccgtgtactactgccaagtgtgggacagcagcagcgatcacgtggtgtttggcggcggaacaaagctgacagtgcttctcgagatccagaaccctgatcctgccgtgtaccagctgcgggatagcaagagcagcgacaagagcgtgtgtctgttcaccgacttcgacagccagaccaacgtgtcccagagcaaggactccgacgtgtacatcaccgataagtgcgtgctggacatgcggagcatggacttcaagagcaactccgccgtggcctggtccaacaagtccgatttcgcctgcgccaacgccttcaacaacagcattatccccgaggacacattcttcccaagcagcgacgtgccctgcgacgtgaagctggtggaaaagagcttcgagacagacaccaacctgaacttccagaacctgagcgtgatcggcttcagaatcctgctgctgaaagtggccggctttaacctgctgatgaccctgcggctgtggtccagccgcgccaagagaagcggatctggcgtgaagcagaccctgaatttcgacctgctgaagctggctggcgacgtggaatccaacccaggccctactagtaccatggactggatttggcgcatccttttccttgtcggcgctgctaccggcgcccattccgggcccgaagtgcaactggttgaatccggtggcggcctggtgcaacccggcggatctctcagacttagctgtgccgcctccggcagaaccttcacaatgggatggtacaggcaggctccagggaaagagagagagttcgtcgccgccatctctctgtctcccacactggcctactacgccgactctgtgaaaggccggttcaccatctccagagataatagcaagaacaccgtggtgctgcaaatgaactctctgagagccgaggatacagccctgtactattgtgccgctgaccggaagtccgtgatgagcatcagacccgattactggggacagggcacactggtcacagtgtctagtggatccggcggcggaggatctggcggaggcggatctgggggcggaggctctttcgaacaactccagctgcaagagtctggccctggcctggtcaagcctagcgaaacactgagcctgacctgtaccgtgtctggcggctctatcagctccagcagctatttctggggctggatcagacaacctcctggcaaaggactggaatggatcggctccatctactacagcggcatcacctactacaaccccagcctgaagtccagagtgaccatctccgtggacaccagcaagaaccagttctccctgaagctgagcagcgtgacagccgccgataccgccgtgtattattgtgccagacatgacggcgctgtggccggcctgtttgattattggggacagggcaccctggtcaccgtgtcatctgctacgcgtgaggacctgaagaacgtgttcccacctgaggtggccgtgttcgagcctagcaaggccgagatcgcccacacccagaaagccaccctcgtgtgcctggctaccggcttctaccccgaccatgtggaactgtcttggtgggtcaacggcaaagaggtgcacagcggcgtgtgtaccgacccccagccactgaaagaacagcccgccctgaacgacagccggtactgcctgagcagcagactgagagtgtccgccaccttctggcagaacccccggaaccacttcagatgccaggtgcagttctacggcctgagcgagaacgacgagtggacccaggacagagccaagcccgtgacccagatcgtgtctgccgaagcctggggcagagccgattgcggcatcaccagcgccagctaccaccagggcgtgctgagcgccaccatcctgtacgagatcctgctgggcaaggccaccctgtacgccgtgctggtgtctgccctggtgctgatggctatggtcaagcggaaggacagccggggataa

SEQ ID NO: 33681 - DNA, 2700 bp, synthetic construct
  source 1..2700: mol_type = other DNA
atggccttaccagtgaccgccttgctcctgccgctggccttgctgctccacgccgccaggccggaagtgcagctggttgaatctggcggaggactggttcaggctggcggatctctgagactgtcttgtgccgccagcggcagaacctttagcatgggctggtttagacaggcccctggcaaagagagagagttcgtcgccgccatcacatactctggcggcagcccttactacgccgactctgtgaagggcagattcaccatcagccgggacaacgccaagaacaccgtgtacctccagatgaacagcctgaagcctgaggacaccgccgtgtactactgcgccgccaatccaacatacggcagcgactggaacgccgagaattggggccagggaacccaagtgacagtgtctagcggtaccggcggaggcggatctggcggcggaggtagcggtggcggaggatctgaattcagctacgtgctgacacagcctccatccgtgtctgtggctccaggacagaccgccagaatcacatgcggcggcaacaacatcggcggcaagagcgtgcactggtatcagcagccacctggacaggctccagtggtggtggtgtacgacgacagcgatagacctagcggcatccccgagagattcagcggcagcaattccggcaataccgccacactgaccatcagcagagtggaagctggcgacgaggccgtgtactactgccaagtgtgggacagcagcagcgatcacgtggtgtttggcggcggaacaaagctgacagtgcttctcgaggacctgaagaacgtgttcccacctgaggtggccgtgttcgagcctagcgaggccgagatcagccacacccagaaagccaccctcgtgtgcctggctaccggcttctaccccgaccatgtggaactgtcttggtgggtcaacggcaaagaggtgcacagcggcgtgtgtaccgacccccagccactgaaagaacagcccgccctgaacgacagccggtactgcctgagcagcagactgagagtgtccgccaccttctggcagaacccccggaaccacttcagatgccaggtgcagttctacggcctgagcgagaacgacgagtggacccaggacagagccaagcccgtgacccagatcgtgtctgccgaagcctggggcagagccgattgcggctttaccagcgagagctaccagcagggcgtgctgagcgccaccatcctgtacgagatcctgctgggcaaggccaccctgtacgccgtgctggtgtctgccctggtgctgatggctatggtcaagcggaaggacagccggggaagggccaagcgatctggatctggagcaacaaacttctcactactcaaacaagcaggtgacgtggaggagaatcccgggcctactagtgccaccatggactggatttggcgcatccttttccttgtcggcgctgctaccggcgcccattccgggcccgaagtgcaactggttgaatccggtggcggcctggtgcaagcaggcggatctctcagacttagctgtgccgcctccggcagaaccttcacaatgggatggtttaggcaggctccagggaaagagagagagttcgtcgccgccatctctctgtctcccacactggcctactacgccgactctgtgaaaggccggttcaccatctccagagataatgccaagaacaccgtggtgctgcaaatgaactctctgaaacccgaggatacagccctgtactattgtgccgctgaccggaagtccgtgatgagcatcagacccgattactggggacagggcacacaagtcacagtgtcctctggatccggcggcggaggatctggcggaggcggatctgggggcggaggctctttcgaacaactccagctgcaagagtctggccctggcctggtcaagcctagcgaaacactgagcctgacctgtaccgtgtctggcggctctatcagctccagcagctatttctggggctggatcagacaacctcctggcaaaggactggaatggatcggctccatctactacagcggcatcacctactacaaccccagcctgaagtccagagtgaccatctccgtggacaccagcaagaaccagttctccctgaagctgagcagcgtgacagccgccgataccgccgtgtattattgtgccagacatgacggcgctgtggccggcctgtttgattattggggacagggcaccctggtcaccgtgtcatctgctacgcgtatccagaaccctgatcctgccgtgtaccagctgcgggatagcaagagcagcgacaagagcgtgtgtctgttcaccgacttcgacagccagaccaacgtgtcccagagcaaggactccgacgtgtacatcaccgataagtgcgtgctggacatgcggagcatggacttcaagagcaactccgccgtggcctggtccaacaagtccgatttcgcctgcgccaacgccttcaacaacagcattatccccgaggacacattcttcccaagccccgagagcagctgcgacgtgaagctggtggaaaagagcttcgagacagacaccaacctgaacttccagaacctgagcgtgatcggcttcagaatcctgctgctgaaagtggccggctttaacctgctgatgaccctgcggctgtggtccagctaa

SEQ ID NO: 33682 - DNA, 2313 bp, synthetic construct
  source 1..2313: mol_type = other DNA
atggccttaccagtgaccgccttgctcctgccgctggccttgctgctccacgccgccaggccggaagtgcagctggttgaatctggcggaggactggttcagcctggcggatctctgagactgagctgtgaagccagcggcttcgccagcgacgattacatcatcggctggttcagacaggcccctggcaaagagagagagggcgtcagctgcatcagctctaagtacgccaacaccgtgtacaccgacagcgtgaagggcagattcagactgagcagaggcaccgccaagaataccgtgtacctccagatgagcgccctgaagcctgaggataccgccgtgtactactgcgctatggacagccgcagagtgacatgccctgagatcagcaccatgcaccggaacttcgattcttggggccagggcacactggtcacagtgtcatctggtaccggcggaggcggatctggcggcggaggtagcggtggcggaggatctgaattcagctacgtgctgacacagcctccatccgtgtctgtggctccaggacagaccgccagaatcacatgcggcggcaacaacatcggcggcaagagcgtgcactggtatcagcagccacctggacaggctccagtggtggtggtgtacgacgacagcgatagacctagcggcatccccgagagattcagcggcagcaattccggcaataccgccacactgaccatcagcagagtggaagctggcgacgaggccgtgtactactgccaagtgtgggacagcagcagcgatcacgtggtgtttggcggcggaacaaagctgacagtgcttctcgaggacctgaagaacgtgttcccacctgaggtggccgtgttcgagcctagcaaggccgagatcgcccacacccagaaagccaccctcgtgtgcctggctaccggcttctaccccgaccatgtggaactgtcttggtgggtcaacggcaaagaggtgcacagcggcgtgtgtaccgacccccagccactgaaagaacagcccgccctgaacgacagccggtactgcctgagcagcagactgagagtgtccgccaccttctggcagaacccccggaaccacttcagatgccaggtgcagttctacggcctgagcgagaacgacgagtggacccaggacagagccaagcccgtgacccagatcgtgtctgccgaagcctggggcagagccgattgcggcatcaccagcgccagctaccaccagggcgtgctgagcgccaccatcctgtacgagatcctgctgggcaaggccaccctgtacgccgtgctggtgtctgccctggtgctgatggctatggtcaagcggaaggacagccggggaagggccaagcgatctggatctggagcaacaaacttctcactactcaaacaagcaggtgacgtggaggagaatcccgggcctactagtatggactggatttggcgcatccttttccttgtcggcgctgctaccggcgcgcattccttcgaacaactccagctgcaagagtctggccctggcctggtcaagcctagcgaaacactgagcctgacctgtaccgtgtctggcggctctatcagctccagcagctatttctggggctggatcagacaacctcctggcaaaggactggaatggatcggctccatctactacagcggcatcacctactacaaccccagcctgaagtccagagtgaccatctccgtggacaccagcaagaaccagttctccctgaagctgagcagcgtgacagccgccgataccgccgtgtattattgtgccagacatgacggcgctgtggccggcctgtttgattattggggacagggcaccctggtcaccgtgtcatctgctacgcgtatccagaaccctgatcctgccgtgtaccagctgcgggatagcaagagcagcgacaagagcgtgtgtctgttcaccgacttcgacagccagaccaacgtgtcccagagcaaggactccgacgtgtacatcaccgataagtgcgtgctggacatgcggagcatggacttcaagagcaactccgccgtggcctggtccaacaagtccgatttcgcctgcgccaacgccttcaacaacagcattatccccgaggacacattcttcccaagcagcgacgtgccctgcgacgtgaagctggtggaaaagagcttcgagacagacaccaacctgaacttccagaacctgagcgtgatcggcttcagaatcctgctgctgaaagtggccggctttaacctgctgatgaccctgcggctgtggtccagctaa

SEQ ID NO: 33683 - DNA, 2286 bp, synthetic construct
  source 1..2286: mol_type = other DNA
atggccttaccagtgaccgccttgctcctgccgctggccttgctgctccacgccgccaggccgagctacgtgctgacacagcctccatccgtgtctgtggctccaggacagaccgccagaatcacatgcggcggcaacaacatcggcggcaagagcgtgcactggtatcagcagccacctggacaggctccagtggtggtggtgtacgacgacagcgatagacctagcggcatccccgagagattcagcggcagcaattccggcaataccgccacactgaccatcagcagagtggaagctggcgacgaggccgtgtactactgccaagtgtgggacagcagcagcgatcacgtggtgtttggcggcggaacaaagctgacagtgcttctcgaggacctgaagaacgtgttcccacctgaggtggccgtgttcgagcctagcgaggccgagatcagccacacccagaaagccaccctcgtgtgcctggctaccggcttctaccccgaccatgtggaactgtcttggtgggtcaacggcaaagaggtgcacagcggcgtgtgtaccgacccccagccactgaaagaacagcccgccctgaacgacagccggtactgcctgagcagcagactgagagtgtccgccaccttctggcagaacccccggaaccacttcagatgccaggtgcagttctacggcctgagcgagaacgacgagtggacccaggacagagccaagcccgtgacccagatcgtgtctgccgaagcctggggcagagccgattgcggctttaccagcgagagctaccagcagggcgtgctgagcgccaccatcctgtacgagatcctgctgggcaaggccaccctgtacgccgtgctggtgtctgccctggtgctgatggctatggtcaagcggaaggacagccggggaagggccaagcgatctggatctggagcaacaaacttctcactactcaaacaagcaggtgacgtggaggagaatcccgggcctactagtaccatggactggatttggcgcatccttttccttgtcggcgctgctaccggcgcccattccgggcccgaagtgcaactggttgaatccggtggcggcctggtgcaacccggcggatctctcagacttagctgtgccgcctccggcagaaccttcacaatgggatggtacaggcaggctccagggaaagagagagagttcgtcgccgccatctctctgtctcccacactggcctactacgccgactctgtgaaaggccggttcaccatctccagagataatagcaagaacaccgtggtgctgcaaatgaactctctgagagccgaggatacagccctgtactattgtgccgctgaccggaagtccgtgatgagcatcagacccgattactggggacagggcacactggtcacagtgtctagtggatccggcggcggaggatctggcggaggcggatctgggggcggaggctctttcgaacaactccagctgcaagagtctggccctggcctggtcaagcctagcgaaacactgagcctgacctgtaccgtgtctggcggctctatcagctccagcagctatttctggggctggatcagacaacctcctggcaaaggactggaatggatcggctccatctactacagcggcatcacctactacaaccccagcctgaagtccagagtgaccatctccgtggacaccagcaagaaccagttctccctgaagctgagcagcgtgacagccgccgataccgccgtgtattattgtgccagacatgacggcgctgtggccggcctgtttgattattggggacagggcaccctggtcaccgtgtcatctgctacgcgtatccagaaccctgatcctgccgtgtaccagctgcgggatagcaagagcagcgacaagagcgtgtgtctgttcaccgacttcgacagccagaccaacgtgtcccagagcaaggactccgacgtgtacatcaccgataagtgcgtgctggacatgcggagcatggacttcaagagcaactccgccgtggcctggtccaacaagtccgatttcgcctgcgccaacgccttcaacaacagcattatccccgaggacacattcttcccaagccccgagagcagctgcgacgtgaagctggtggaaaagagcttcgagacagacaccaacctgaacttccagaacctgagcgtgatcggcttcagaatcctgctgctgaaagtggccggctttaacctgctgatgaccctgcggctgtggtccagctaa

SEQ ID NO: 33684 - DNA, 2304 bp, synthetic construct
  source 1..2304: mol_type = other DNA
atggccttaccagtgaccgccttgctcctgccgctggccttgctgctccacgccgccaggccgagctacgtgctgacacagcctccatccgtgtctgtggctccaggacagaccgccagaatcacatgcggcggcaacaacatcggcggcaagagcgtgcactggtatcagcagccacctggacaggctccagtggtggtggtgtacgacgacagcgatagacctagcggcatccccgagagattcagcggcagcaattccggcaataccgccacactgaccatcagcagagtggaagctggcgacgaggccgtgtactactgccaagtgtgggacagcagcagcgatcacgtggtgtttggcggcggaacaaagctgacagtgcttctcgaggacctgaagaacgtgttcccacctgaggtggccgtgttcgagcctagcgaggccgagatcagccacacccagaaagccaccctcgtgtgcctggctaccggcttctaccccgaccatgtggaactgtcttggtgggtcaacggcaaagaggtgcacagcggcgtgtgtaccgacccccagccactgaaagaacagcccgccctgaacgacagccggtactgcctgagcagcagactgagagtgtccgccaccttctggcagaacccccggaaccacttcagatgccaggtgcagttctacggcctgagcgagaacgacgagtggacccaggacagagccaagcccgtgacccagatcgtgtctgccgaagcctggggcagagccgattgcggctttaccagcgagagctaccagcagggcgtgctgagcgccaccatcctgtacgagatcctgctgggcaaggccaccctgtacgccgtgctggtgtctgccctggtgctgatggctatggtcaagcggaaggacagccggggaagggccaagcgatctggatctggagcaacaaacttctcactactcaaacaagcaggtgacgtggaggagaatcccgggcctactagtaccatggactggatttggcgcatccttttccttgtcggcgctgctaccggcgcccattccgggccccaggtgcagctggttgaatctggcggaggactggttcagcctggcggatctctgagactgtcttgtgccgccagcggcaacatcaacagcagaaactgcatgggctggttcagacaggcccctggcaagggaagagaaggcgtggcagctatcggccaagtgaccggcagaacctactacgtggacagcgtgaagggcagattcaccatcagcctggacaacagcaagaacaccctgtacctccagatgaacagcctgagagccgaggacaccgccgtgtactattgtgctgctgcccctggctgtctgctgtctgcacttagaagcgccgactacagaaactggggccagggcacactggtcaccgtttcttctggatccggcggcggaggatctggcggaggcggatctgggggcggaggctctttcgaacaactccagctgcaagagtctggccctggcctggtcaagcctagcgaaacactgagcctgacctgtaccgtgtctggcggctctatcagctccagcagctatttctggggctggatcagacaacctcctggcaaaggactggaatggatcggctccatctactacagcggcatcacctactacaaccccagcctgaagtccagagtgaccatctccgtggacaccagcaagaaccagttctccctgaagctgagcagcgtgacagccgccgataccgccgtgtattattgtgccagacatgacggcgctgtggccggcctgtttgattattggggacagggcaccctggtcaccgtgtcatctgctacgcgtatccagaaccctgatcctgccgtgtaccagctgcgggatagcaagagcagcgacaagagcgtgtgtctgttcaccgacttcgacagccagaccaacgtgtcccagagcaaggactccgacgtgtacatcaccgataagtgcgtgctggacatgcggagcatggacttcaagagcaactccgccgtggcctggtccaacaagtccgatttcgcctgcgccaacgccttcaacaacagcattatccccgaggacacattcttcccaagccccgagagcagctgcgacgtgaagctggtggaaaagagcttcgagacagacaccaacctgaacttccagaacctgagcgtgatcggcttcagaatcctgctgctgaaagtggccggctttaacctgctgatgaccctgcggctgtggtccagc

SEQ ID NO: 33685 - DNA, 2307 bp, synthetic construct
  source 1..2307: mol_type = other DNA
atggccttaccagtgaccgccttgctcctgccgctggccttgctgctccacgccgccaggccgagctacgtgctgacacagcctccatccgtgtctgtggctccaggacagaccgccagaatcacatgcggcggcaacaacatcggcggcaagagcgtgcactggtatcagcagccacctggacaggctccagtggtggtggtgtacgacgacagcgatagacctagcggcatccccgagagattcagcggcagcaattccggcaataccgccacactgaccatcagcagagtggaagctggcgacgaggccgtgtactactgccaagtgtgggacagcagcagcgatcacgtggtgtttggcggcggaacaaagctgacagtgcttctcgaggacctgaagaacgtgttcccacctgaggtggccgtgttcgagcctagcgaggccgagatcagccacacccagaaagccaccctcgtgtgcctggctaccggcttctaccccgaccatgtggaactgtcttggtgggtcaacggcaaagaggtgcacagcggcgtgtgtaccgacccccagccactgaaagaacagcccgccctgaacgacagccggtactgcctgagcagcagactgagagtgtccgccaccttctggcagaacccccggaaccacttcagatgccaggtgcagttctacggcctgagcgagaacgacgagtggacccaggacagagccaagcccgtgacccagatcgtgtctgccgaagcctggggcagagccgattgcggctttaccagcgagagctaccagcagggcgtgctgagcgccaccatcctgtacgagatcctgctgggcaaggccaccctgtacgccgtgctggtgtctgccctggtgctgatggctatggtcaagcggaaggacagccggggaagggccaagcgatctggatctggagcaacaaacttctcactactcaaacaagcaggtgacgtggaggagaatcccgggcctactagtaccatggactggatttggcgcatccttttccttgtcggcgctgctaccggcgcccattccgggccccaggtgcagctggttgaatctggcggaggatctgttcaggctggcggctctctgagactgtcttgtggcgcttccggcaacatcagcagcagaaactgcatgggctggttcagacaggcccctggcaaagagagagaaggcgttgccgccatcggacaagtgaccggcagatcctactacgtggacagcgtgaagggcagattcaccatcagcctggacaacgccaagaacaccctgtacctccagatgaacacactgaagcccgaggacaccgccatgtactactgtgctgctgcccctggctgtctgctgtctgcacttagaagcgccgactacagaaactggggccagggaacccaagtgacagtgtctagtggatccggcggcggaggatctggcggaggcggatctgggggcggaggctctttcgaacaactccagctgcaagagtctggccctggcctggtcaagcctagcgaaacactgagcctgacctgtaccgtgtctggcggctctatcagctccagcagctatttctggggctggatcagacaacctcctggcaaaggactggaatggatcggctccatctactacagcggcatcacctactacaaccccagcctgaagtccagagtgaccatctccgtggacaccagcaagaaccagttctccctgaagctgagcagcgtgacagccgccgataccgccgtgtattattgtgccagacatgacggcgctgtggccggcctgtttgattattggggacagggcaccctggtcaccgtgtcatctgctacgcgtatccagaaccctgatcctgccgtgtaccagctgcgggatagcaagagcagcgacaagagcgtgtgtctgttcaccgacttcgacagccagaccaacgtgtcccagagcaaggactccgacgtgtacatcaccgataagtgcgtgctggacatgcggagcatggacttcaagagcaactccgccgtggcctggtccaacaagtccgatttcgcctgcgccaacgccttcaacaacagcattatccccgaggacacattcttcccaagccccgagagcagctgcgacgtgaagctggtggaaaagagcttcgagacagacaccaacctgaacttccagaacctgagcgtgatcggcttcagaatcctgctgctgaaagtggccggctttaacctgctgatgaccctgcggctgtggtccagctaa

SEQ ID NO: 33686 - DNA, 2730 bp, synthetic construct
  source 1..2730: mol_type = other DNA
atggccttaccagtgaccgccttgctcctgccgctggccttgctgctccacgccgccaggccggaagtgcagctggttgaatctggcggaggactggttcaggctggcggatctctgagactgtcttgtgccgccagcggcagaacctttagcatgggctggtttagacaggcccctggcaaagagagagagttcgtcgccgccatcacatactctggcggcagcccttactacgccgactctgtgaagggcagattcaccatcagccgggacaacgccaagaacaccgtgtacctccagatgaacagcctgaagcctgaggacaccgccgtgtactactgcgccgccaatccaacatacggcagcgactggaacgccgagaattggggccagggaacccaagtgacagtgtctagcggtaccggcggaggcggatctggcggcggaggtagcggtggcggaggatctgaattcagctacgtgctgacacagcctccatccgtgtctgtggctccaggacagaccgccagaatcacatgcggcggcaacaacatcggcggcaagagcgtgcactggtatcagcagccacctggacaggctccagtggtggtggtgtacgacgacagcgatagacctagcggcatccccgagagattcagcggcagcaattccggcaataccgccacactgaccatcagcagagtggaagctggcgacgaggccgtgtactactgccaagtgtgggacagcagcagcgatcacgtggtgtttggcggcggaacaaagctgacagtgcttctcgagatccagaaccctgatcctgccgtgtaccagctgcgggatagcaagagcagcgacaagagcgtgtgtctgttcaccgacttcgacagccagaccaacgtgtcccagagcaaggactccgacgtgtacatcaccgataagtgcgtgctggacatgcggagcatggacttcaagagcaactccgccgtggcctggtccaacaagtccgatttcgcctgcgccaacgccttcaacaacagcattatccccgaggacacattcttcccaagcagcgacgtgccctgcgacgtgaagctggtggaaaagagcttcgagacagacaccaacctgaacttccagaacctgagcgtgatcggcttcagaatcctgctgctgaaagtggccggctttaacctgctgatgaccctgcggctgtggtccagccgcgccaagagaagcggatctggcgtgaagcagaccctgaatttcgacctgctgaagctggctggcgacgtggaatccaacccaggccctactagtaccatggactggatttggcgcatccttttccttgtcggcgctgctaccggcgcccattccgggccccaggtgcagctggttgaatctggcggaggatctgttcaggctggcggctctctgagactgtcttgtggcgcttccggcaacatcagcagcagaaactgcatgggctggttcagacaggcccctggcaaagagagagaaggcgttgccgccatcggacaagtgaccggcagatcctactacgtggacagcgtgaagggcagattcaccatcagcctggacaacgccaagaacaccctgtacctccagatgaacacactgaagcccgaggacaccgccatgtactactgtgctgctgcccctggctgtctgctgtctgcacttagaagcgccgactacagaaactggggccagggaacccaagtgacagtgtctagtggatccggcggcggaggatctggcggaggcggatctgggggcggaggctctttcgaacaactccagctgcaagagtctggccctggcctggtcaagcctagcgaaacactgagcctgacctgtaccgtgtctggcggctctatcagctccagcagctatttctggggctggatcagacaacctcctggcaaaggactggaatggatcggctccatctactacagcggcatcacctactacaaccccagcctgaagtccagagtgaccatctccgtggacaccagcaagaaccagttctccctgaagctgagcagcgtgacagccgccgataccgccgtgtattattgtgccagacatgacggcgctgtggccggcctgtttgattattggggacagggcaccctggtcaccgtgtcatctgctacgcgtgaggacctgaagaacgtgttcccacctgaggtggccgtgttcgagcctagcaaggccgagatcgcccacacccagaaagccaccctcgtgtgcctggctaccggcttctaccccgaccatgtggaactgtcttggtgggtcaacggcaaagaggtgcacagcggcgtgtgtaccgacccccagccactgaaagaacagcccgccctgaacgacagccggtactgcctgagcagcagactgagagtgtccgccaccttctggcagaacccccggaaccacttcagatgccaggtgcagttctacggcctgagcgagaacgacgagtggacccaggacagagccaagcccgtgacccagatcgtgtctgccgaagcctggggcagagccgattgcggcatcaccagcgccagctaccaccagggcgtgctgagcgccaccatcctgtacgagatcctgctgggcaaggccaccctgtacgccgtgctggtgtctgccctggtgctgatggctatggtcaagcggaaggacagccggggataa

SEQ ID NO: 33687 - DNA, 2721 bp, synthetic construct
  source 1..2721: mol_type = other DNA
atggccttaccagtgaccgccttgctcctgccgctggccttgctgctccacgccgccaggccgcaggtgcagctggttgaatctggcggaggatctgttcaggctggcggctctctgagactgtcttgtggcgcttccggcaacatcagcagcagaaactgcatgggctggttcagacaggcccctggcaaagagagagaaggcgttgccgccatcggacaagtgaccggcagatcctactacgtggacagcgtgaagggcagattcaccatcagcctggacaacgccaagaacaccctgtacctccagatgaacacactgaagcccgaggacaccgccatgtactactgtgctgctgcccctggctgtctgctgtctgcacttagaagcgccgactacagaaactggggccagggaacccaagtgacagtgtctagtggtaccggcggaggcggatctggcggcggaggtagcggtggcggaggatctgaattcagctacgtgctgacacagcctccatccgtgtctgtggctccaggacagaccgccagaatcacatgcggcggcaacaacatcggcggcaagagcgtgcactggtatcagcagccacctggacaggctccagtggtggtggtgtacgacgacagcgatagacctagcggcatccccgagagattcagcggcagcaattccggcaataccgccacactgaccatcagcagagtggaagctggcgacgaggccgtgtactactgccaagtgtgggacagcagcagcgatcacgtggtgtttggcggcggaacaaagctgacagtgcttctcgaggacctgaagaacgtgttcccacctgaggtggccgtgttcgagcctagcgaggccgagatcagccacacccagaaagccaccctcgtgtgcctggctaccggcttctaccccgaccatgtggaactgtcttggtgggtcaacggcaaagaggtgcacagcggcgtgtgtaccgacccccagccactgaaagaacagcccgccctgaacgacagccggtactgcctgagcagcagactgagagtgtccgccaccttctggcagaacccccggaaccacttcagatgccaggtgcagttctacggcctgagcgagaacgacgagtggacccaggacagagccaagcccgtgacccagatcgtgtctgccgaagcctggggcagagccgattgcggctttaccagcgagagctaccagcagggcgtgctgagcgccaccatcctgtacgagatcctgctgggcaaggccaccctgtacgccgtgctggtgtctgccctggtgctgatggctatggtcaagcggaaggacagccggggaagggccaagcgatctggatctggagcaacaaacttctcactactcaaacaagcaggtgacgtggaggagaatcccgggcctactagtgccaccatggactggatttggcgcatccttttccttgtcggcgctgctaccggcgcccattccgggcccgaagtgcaactggttgaatccggtggcggcctggtgcaagcaggcggatctctcagacttagctgtgccgcctccggcagaaccttcacaatgggatggtttaggcaggctccagggaaagagagagagttcgtcgccgccatctctctgtctcccacactggcctactacgccgactctgtgaaaggccggttcaccatctccagagataatgccaagaacaccgtggtgctgcaaatgaactctctgaaacccgaggatacagccctgtactattgtgccgctgaccggaagtccgtgatgagcatcagacccgattactggggacagggcacacaagtcacagtgtcctctggatccggcggcggaggatctggcggaggcggatctgggggcggaggctctttcgaacaactccagctgcaagagtctggccctggcctggtcaagcctagcgaaacactgagcctgacctgtaccgtgtctggcggctctatcagctccagcagctatttctggggctggatcagacaacctcctggcaaaggactggaatggatcggctccatctactacagcggcatcacctactacaaccccagcctgaagtccagagtgaccatctccgtggacaccagcaagaaccagttctccctgaagctgagcagcgtgacagccgccgataccgccgtgtattattgtgccagacatgacggcgctgtggccggcctgtttgattattggggacagggcaccctggtcaccgtgtcatctgctacgcgtatccagaaccctgatcctgccgtgtaccagctgcgggatagcaagagcagcgacaagagcgtgtgtctgttcaccgacttcgacagccagaccaacgtgtcccagagcaaggactccgacgtgtacatcaccgataagtgcgtgctggacatgcggagcatggacttcaagagcaactccgccgtggcctggtccaacaagtccgatttcgcctgcgccaacgccttcaacaacagcattatccccgaggacacattcttcccaagccccgagagcagctgcgacgtgaagctggtggaaaagagcttcgagacagacaccaacctgaacttccagaacctgagcgtgatcggcttcagaatcctgctgctgaaagtggccggctttaacctgctgatgaccctgcggctgtggtccagctaa

SEQ ID NO: 33688 - DNA, 2310 bp, synthetic construct
  source 1..2310: mol_type = other DNA
atggccttaccagtgaccgccttgctcctgccgctggccttgctgctccacgccgccaggccgcaggtgcagctggttgaatctggcggaggatctgttcaggctggcggctctctgagactgtcttgtggcgcttccggcaacatcagcagcagaaactgcatgggctggttcagacaggcccctggcaaagagagagaaggcgttgccgccatcggacaagtgaccggcagatcctactacgtggacagcgtgaagggcagattcaccatcagcctggacaacgccaagaacaccctgtacctccagatgaacacactgaagcccgaggacaccgccatgtactactgtgctgctgcccctggctgtctgctgtctgcacttagaagcgccgactacagaaactggggccagggaacccaagtgacagtgtctagtggtaccggcggaggcggatctggcggcggaggtagcggtggcggaggatctgaattcagctacgtgctgacacagcctccatccgtgtctgtggctccaggacagaccgccagaatcacatgcggcggcaacaacatcggcggcaagagcgtgcactggtatcagcagccacctggacaggctccagtggtggtggtgtacgacgacagcgatagacctagcggcatccccgagagattcagcggcagcaattccggcaataccgccacactgaccatcagcagagtggaagctggcgacgaggccgtgtactactgccaagtgtgggacagcagcagcgatcacgtggtgtttggcggcggaacaaagctgacagtgcttctcgaggacctgaagaacgtgttcccacctgaggtggccgtgttcgagcctagcgaggccgagatcagccacacccagaaagccaccctcgtgtgcctggctaccggcttctaccccgaccatgtggaactgtcttggtgggtcaacggcaaagaggtgcacagcggcgtgtgtaccgacccccagccactgaaagaacagcccgccctgaacgacagccggtactgcctgagcagcagactgagagtgtccgccaccttctggcagaacccccggaaccacttcagatgccaggtgcagttctacggcctgagcgagaacgacgagtggacccaggacagagccaagcccgtgacccagatcgtgtctgccgaagcctggggcagagccgattgcggctttaccagcgagagctaccagcagggcgtgctgagcgccaccatcctgtacgagatcctgctgggcaaggccaccctgtacgccgtgctggtgtctgccctggtgctgatggctatggtcaagcggaaggacagccggggaagggccaagcgatctggatctggagcaacaaacttctcactactcaaacaagcaggtgacgtggaggagaatcccgggcctactagtgccaccatggactggatttggcgcatccttttccttgtcggcgctgctaccggcgcccattccttcgaacaactccagctgcaagagtctggccctggcctggtcaagcctagcgaaacactgagcctgacctgtaccgtgtctggcggctctatcagctccagcagctatttctggggctggatcagacaacctcctggcaaaggactggaatggatcggctccatctactacagcggcatcacctactacaaccccagcctgaagtccagagtgaccatctccgtggacaccagcaagaaccagttctccctgaagctgagcagcgtgacagccgccgataccgccgtgtattattgtgccagacatgacggcgctgtggccggcctgtttgattattggggacagggcaccctggtcaccgtgtcatctgctacgcgtatccagaaccctgatcctgccgtgtaccagctgcgggatagcaagagcagcgacaagagcgtgtgtctgttcaccgacttcgacagccagaccaacgtgtcccagagcaaggactccgacgtgtacatcaccgataagtgcgtgctggacatgcggagcatggacttcaagagcaactccgccgtggcctggtccaacaagtccgatttcgcctgcgccaacgccttcaacaacagcattatccccgaggacacattcttcccaagccccgagagcagctgcgacgtgaagctggtggaaaagagcttcgagacagacaccaacctgaacttccagaacctgagcgtgatcggcttcagaatcctgctgctgaaagtggccggctttaacctgctgatgaccctgcggctgtggtccagctaa

SEQ ID NO: 33689 - DNA, 2310 bp, synthetic construct
  source 1..2310: mol_type = other DNA
atggccttaccagtgaccgccttgctcctgccgctggccttgctgctccacgccgccaggccgcaagttcagctggtggaaagcggtggtggcgttgtgcaacctggtggaagtctgaggctgagctgtgccgcttctggcctgagctttagcacctacactgtggcctggttcaggcaggctcccggaaagggtcttgaaggcgtggccgccattccttacaccagccagcacatggtgtacacagacagcgtcagaggccggttcaccatcagcagagacaactccaagaatacgctctatctccagatgaactctctgcgcgccgaagatacagccgtgtattactgcgccaccgacagacggcctggcacctctatgctggctatcaacggctacaacagatggggacagggaaccaccgtgaccgtgtcatctggtaccggcggaggcggatctggcggcggaggtagcggtggcggaggatctgaattcagctacgtgctgacacagcctccatccgtgtctgtggctccaggacagaccgccagaatcacatgcggcggcaacaacatcggcggcaagagcgtgcactggtatcagcagccacctggacaggctccagtggtggtggtgtacgacgacagcgatagacctagcggcatccccgagagattcagcggcagcaattccggcaataccgccacactgaccatcagcagagtggaagctggcgacgaggccgtgtactactgccaagtgtgggacagcagcagcgatcacgtggtgtttggcggcggaacaaagctgacagtgcttctcgaggacctgaagaacgtgttcccacctgaggtggccgtgttcgagcctagcgaggccgagatcagccacacccagaaagccaccctcgtgtgcctggctaccggcttctaccccgaccatgtggaactgtcttggtgggtcaacggcaaagaggtgcacagcggcgtgtgtaccgacccccagccactgaaagaacagcccgccctgaacgacagccggtactgcctgagcagcagactgagagtgtccgccaccttctggcagaacccccggaaccacttcagatgccaggtgcagttctacggcctgagcgagaacgacgagtggacccaggacagagccaagcccgtgacccagatcgtgtctgccgaagcctggggcagagccgattgcggctttaccagcgagagctaccagcagggcgtgctgagcgccaccatcctgtacgagatcctgctgggcaaggccaccctgtacgccgtgctggtgtctgccctggtgctgatggctatggtcaagcggaaggacagccggggaagggccaagcgatctggatctggagcaacaaacttctcactactcaaacaagcaggtgacgtggaggagaatcccgggcctactagtgccaccatggactggatttggcgcatccttttccttgtcggcgctgctaccggcgcccattccttcgaacaactccagctgcaagagtctggccctggcctggtcaagcctagcgaaacactgagcctgacctgtaccgtgtctggcggctctatcagctccagcagctatttctggggctggatcagacaacctcctggcaaaggactggaatggatcggctccatctactacagcggcatcacctactacaaccccagcctgaagtccagagtgaccatctccgtggacaccagcaagaaccagttctccctgaagctgagcagcgtgacagccgccgataccgccgtgtattattgtgccagacatgacggcgctgtggccggcctgtttgattattggggacagggcaccctggtcaccgtgtcatctgctacgcgtatccagaaccctgatcctgccgtgtaccagctgcgggatagcaagagcagcgacaagagcgtgtgtctgttcaccgacttcgacagccagaccaacgtgtcccagagcaaggactccgacgtgtacatcaccgataagtgcgtgctggacatgcggagcatggacttcaagagcaactccgccgtggcctggtccaacaagtccgatttcgcctgcgccaacgccttcaacaacagcattatccccgaggacacattcttcccaagccccgagagcagctgcgacgtgaagctggtggaaaagagcttcgagacagacaccaacctgaacttccagaacctgagcgtgatcggcttcagaatcctgctgctgaaagtggccggctttaacctgctgatgaccctgcggctgtggtccagctaa

SEQ ID NO: 33690 - DNA, 2307 bp, synthetic construct
  source 1..2307: mol_type = other DNA
atggccttaccagtgaccgccttgctcctgccgctggccttgctgctccacgccgccaggccgagctacgtgctgacacagcctccatccgtgtctgtggctccaggacagaccgccagaatcacatgcggcggcaacaacatcggcggcaagagcgtgcactggtatcagcagccacctggacaggctccagtggtggtggtgtacgacgacagcgatagacctagcggcatccccgagagattcagcggcagcaattccggcaataccgccacactgaccatcagcagagtggaagctggcgacgaggccgtgtactactgccaagtgtgggacagcagcagcgatcacgtggtgtttggcggcggaacaaagctgacagtgcttctcgaggacctgaagaacgtgttcccacctgaggtggccgtgttcgagcctagcgaggccgagatcagccacacccagaaagccaccctcgtgtgcctggctaccggcttctaccccgaccatgtggaactgtcttggtgggtcaacggcaaagaggtgcacagcggcgtgtgtaccgacccccagccactgaaagaacagcccgccctgaacgacagccggtactgcctgagcagcagactgagagtgtccgccaccttctggcagaacccccggaaccacttcagatgccaggtgcagttctacggcctgagcgagaacgacgagtggacccaggacagagccaagcccgtgacccagatcgtgtctgccgaagcctggggcagagccgattgcggctttaccagcgagagctaccagcagggcgtgctgagcgccaccatcctgtacgagatcctgctgggcaaggccaccctgtacgccgtgctggtgtctgccctggtgctgatggctatggtcaagcggaaggacagccggggaagggccaagcgatctggatctggagcaacaaacttctcactactcaaacaagcaggtgacgtggaggagaatcccgggcctactagtaccatggactggatttggcgcatccttttccttgtcggcgctgctaccggcgcccattccgggccccaagttcagctggtggaaagcggtggtggcgttgtgcaacctggtggaagtctgaggctgagctgtgccgcttctggcctgagctttagcacctacactgtggcctggttcaggcaggctcccggaaagggtcttgaaggcgtggccgccattccttacaccagccagcacatggtgtacacagacagcgtcagaggccggttcaccatcagcagagacaactccaagaatacgctctatctccagatgaactctctgcgcgccgaagatacagccgtgtattactgcgccaccgacagacggcctggcacctctatgctggctatcaacggctacaacagatggggacagggaaccaccgtgaccgtgtcatctggatccggcggcggaggatctggcggaggcggatctgggggcggaggctctttcgaacaactccagctgcaagagtctggccctggcctggtcaagcctagcgaaacactgagcctgacctgtaccgtgtctggcggctctatcagctccagcagctatttctggggctggatcagacaacctcctggcaaaggactggaatggatcggctccatctactacagcggcatcacctactacaaccccagcctgaagtccagagtgaccatctccgtggacaccagcaagaaccagttctccctgaagctgagcagcgtgacagccgccgataccgccgtgtattattgtgccagacatgacggcgctgtggccggcctgtttgattattggggacagggcaccctggtcaccgtgtcatctgctacgcgtatccagaaccctgatcctgccgtgtaccagctgcgggatagcaagagcagcgacaagagcgtgtgtctgttcaccgacttcgacagccagaccaacgtgtcccagagcaaggactccgacgtgtacatcaccgataagtgcgtgctggacatgcggagcatggacttcaagagcaactccgccgtggcctggtccaacaagtccgatttcgcctgcgccaacgccttcaacaacagcattatccccgaggacacattcttcccaagccccgagagcagctgcgacgtgaagctggtggaaaagagcttcgagacagacaccaacctgaacttccagaacctgagcgtgatcggcttcagaatcctgctgctgaaagtggccggctttaacctgctgatgaccctgcggctgtggtccagctaa

SEQ ID NO: 33691 - DNA, 2313 bp, synthetic construct
  source 1..2313: mol_type = other DNA
atggccttaccagtgaccgccttgctcctgccgctggccttgctgctccacgccgccaggccgagctacgtgctgacacagcctccatccgtgtctgtggctccaggacagaccgccagaatcacatgcggcggcaacaacatcggcggcaagagcgtgcactggtatcagcagccacctggacaggctccagtggtggtggtgtacgacgacagcgatagacctagcggcatccccgagagattcagcggcagcaattccggcaataccgccacactgaccatcagcagagtggaagctggcgacgaggccgtgtactactgccaagtgtgggacagcagcagcgatcacgtggtgtttggcggcggaacaaagctgacagtgcttctcgaggacctgaagaacgtgttcccacctgaggtggccgtgttcgagcctagcgaggccgagatcagccacacccagaaagccaccctcgtgtgcctggctaccggcttctaccccgaccatgtggaactgtcttggtgggtcaacggcaaagaggtgcacagcggcgtgtgtaccgacccccagccactgaaagaacagcccgccctgaacgacagccggtactgcctgagcagcagactgagagtgtccgccaccttctggcagaacccccggaaccacttcagatgccaggtgcagttctacggcctgagcgagaacgacgagtggacccaggacagagccaagcccgtgacccagatcgtgtctgccgaagcctggggcagagccgattgcggctttaccagcgagagctaccagcagggcgtgctgagcgccaccatcctgtacgagatcctgctgggcaaggccaccctgtacgccgtgctggtgtctgccctggtgctgatggctatggtcaagcggaaggacagccggggaagggccaagcgatctggatctggagcaacaaacttctcactactcaaacaagcaggtgacgtggaggagaatcccgggcctactagtaccatggactggatttggcgcatccttttccttgtcggcgctgctaccggcgcccattccgggcccgaggtgcagctggttgaatctggcggaggatctgttcaggctggcggctctctgagactgtcttgtgccgccagcggctacacctacagcatcaactgcatgggctggttcagacaggcccctggcaaagagagagaaggcgttgccgccatctctaccggcggaggcagaaccgattaccgggattctgtgaagggcagattcaccatcagccaggacaacgccaagaacaccgtgtacctccagatgaacagcctgaagcctgaggacaccgccatgtactactgtgccggcaagaccacctatcctggctacggatgtggcctgggcagaagcgcctacaattattggggccagggcacccaagtgaccgtgtcatctggatccggcggcggaggatctggcggaggcggatctgggggcggaggctctttcgaacaactccagctgcaagagtctggccctggcctggtcaagcctagcgaaacactgagcctgacctgtaccgtgtctggcggctctatcagctccagcagctatttctggggctggatcagacaacctcctggcaaaggactggaatggatcggctccatctactacagcggcatcacctactacaaccccagcctgaagtccagagtgaccatctccgtggacaccagcaagaaccagttctccctgaagctgagcagcgtgacagccgccgataccgccgtgtattattgtgccagacatgacggcgctgtggccggcctgtttgattattggggacagggcaccctggtcaccgtgtcatctgctacgcgtatccagaaccctgatcctgccgtgtaccagctgcgggatagcaagagcagcgacaagagcgtgtgtctgttcaccgacttcgacagccagaccaacgtgtcccagagcaaggactccgacgtgtacatcaccgataagtgcgtgctggacatgcggagcatggacttcaagagcaactccgccgtggcctggtccaacaagtccgatttcgcctgcgccaacgccttcaacaacagcattatccccgaggacacattcttcccaagccccgagagcagctgcgacgtgaagctggtggaaaagagcttcgagacagacaccaacctgaacttccagaacctgagcgtgatcggcttcagaatcctgctgctgaaagtggccggctttaacctgctgatgaccctgcggctgtggtccagctaa

SEQ ID NO: 33692 - DNA, 1869 bp, synthetic construct
  source 1..1869: mol_type = other DNA
atggccttaccagtgaccgccttgctcctgccgctggccttgctgctccacgccgccaggccgagctacgtgctgacacagcctccatccgtgtctgtggctccaggacagaccgccagaatcacatgcggcggcaacaacatcggcggcaagagcgtgcactggtatcagcagccacctggacaggctccagtggtggtggtgtacgacgacagcgatagacctagcggcatccccgagagattcagcggcagcaattccggcaataccgccacactgaccatcagcagagtggaagctggcgacgaggccgtgtactactgccaagtgtgggacagcagcagcgatcacgtggtgtttggcggcggaacaaagctgacagtgcttctcgaggacctgaagcacgtgttcccacctgaggtggccgtgttcgagcctagcgacgccgagatctggcacacccagaaagccaccctcgtgtgcctggctaccggcttctaccccgaccatgtggaactgtcttggtgggtcaacggcaaagaggtgcacagcggcgtgtctaccgacccccagccactgaaagaacagcccgccctgaacgacagccggtactgcctgagcagcagactgagagtgtccgccaccttctggcagaacccccggaaccacttcagatgccaggtgcagttctacggcctgagcgagaacgacgagtggacccaggacagagccaagcccgtgacccagatcgtgtctgccgaagcctggggcagagccgattgcggctttaccagcgagagctaccagcagggcgtgctgagcgccaccatcctgtacgagatcctgctgggcaaggccaccctgtacgccgtgctggtgtctgccctggtgctgatggctatggtcaagcggaaggacagccggggaagggccaagcgatctggatctggagcaacaaacttctcactactcaaacaagcaggtgacgtggaggagaatcccgggcctactagtatggactggatttggcgcatccttttccttgtcggcgctgctaccggcgcgcattccttcgaacaactccagctgcaagagtctggccctggcctggtcaagcctagcgaaacactgagcctgacctgtaccgtgtctggcggctctatcagctccagcagctatttctggggctggatcagacaacctcctggcaaaggactggaatggatcggctccatctactacagcggcatcacctactacaaccccagcctgaagtccagagtgaccatctccgtggacaccagcaagaaccagttctccctgaagctgagcagcgtgacagccgccgataccgccgtgtattattgtgccagacatgacggcgctgtggccggcctgtttgattattggggacagggcaccctggtcaccgtgtcatctgctacgcgtatccagaaccctgatcctgccgtgtaccagctgcgggatagcaagagcagcgacaagagcgtgtgtctgttcaccgacttcgacagccagaccaacgtgtcccagagcaaggactccgacgtgtacatcaccgataagaccgtgctggacatgcggagcatggacttcaagagcaactccgccgtggcctggtccagcaagtccgatttcgcctgcgccaacgccttcaacaacagcattatccccgaggacacattcttcccaagccccgagatggcctgcgacgtgaagctggtggaaaagagcttcgagacagacaccaacctgaacttccagaacctgctcgtgatctggctgagaatcctgctgctgaaagtggccggctttaacctgctgatgaccctgcggctgtggtccagc

SEQ ID NO: 33693 - DNA, 1869 bp, synthetic construct
  source 1..1869: mol_type = other DNA
atggccttaccagtgaccgccttgctcctgccgctggccttgctgctccacgccgccaggccgagctacgtgctgacacagcctccatccgtgtctgtggctccaggacagaccgccagaatcacatgcggcggcaacaacatcggcggcaagagcgtgcactggtatcagcagccacctggacaggctccagtggtggtggtgtacgacgacagcgatagacctagcggcatccccgagagattcagcggcagcaattccggcaataccgccacactgaccatcagcagagtggaagctggcgacgaggccgtgtactactgccaagtgtgggacagcagcagcgatcacgtggtgtttggcggcggaacaaagctgacagtgcttctcgaggacctgaagcacgtgttcccacctgaggtggccgtgttcgagcctagcgacgccgagatctggcacacccagaaagccaccctcgtgtgcctggctaccggcttctaccccgaccatgtggaactgtcttggtgggtcaacggcaaagaggtgcacagcggcgtgtctaccgacccccagccactgaaagaacagcccgccctgaacgacagccggtactgcctgagcagcagactgagagtgtccgccaccttctggcagaacccccggaaccacttcagatgccaggtgcagttctacggcctgagcgagaacgacgagtggacccaggacagagccaagcccgtgacccagatcgtgtctgccgaagcctggggcagagccgattgcggctttaccagcgagagctaccagcagggcgtgctgagcgccaccatcctgtacgagatcctgctgggcaaggccaccctgtacgccgtgctggtgtctgccctggtgctgatggctatggtcaagcggaaggacagccggggaagggccaagcgatctggatctggagcaacaaacttctcactactcaaacaagcaggtgacgtggaggagaatcccgggcctactagtatggactggatttggcgcatccttttccttgtcggcgctgctaccggcgcgcattccttcgaacaactccagctgcaagagtctggccctggcctggtcaagcctagcgaaacactgagcctgacctgtaccgtgtctggcggctctatcagctccagcagctatttctggggctggatcagacaacctcctggcaaaggactggaatggatcggctccatctactacagcggcatcacctactacaaccccagcctgaagtccagagtgaccatctccgtggacaccagcaagaaccagttctccctgaagctgagcagcgtgacagccgccgataccgccgtgtattattgtgccagacatgacggcgctgtggccggcctgtttgattattggggacagggcaccctggtcaccgtgtcatctgctacgcgtatccagaaccctgatcctgccgtgtaccagctgcgggatagcaagagcagcgacaagagcgtgtgtctgttcaccgacttcgacagccagaccaacgtgtcccagagcaaggactccgacgtgtacatcaccgataagaccgtgctggacatgcggagcatggacttcaagagcaactccgccgtggcctggtccaccaagtccgatttcgcctgcgccaacgccttcaacaacagcattatccccgaggacacattcttcccaagccccgaggtggtgtgcgacgtgaagctggtggaaaagagcttcgagacagacaccaacctgaacttccagaacctggtggtgatcggcgccagaatcctgctgctgaaagtggccggctttaacctgctgatgaccctgcggctgtggtccagc

SEQ ID NO: 33694 - DNA, 1869 bp, synthetic construct
  source 1..1869: mol_type = other DNA
atggccttaccagtgaccgccttgctcctgccgctggccttgctgctccacgccgccaggccgagctacgtgctgacacagcctccatccgtgtctgtggctccaggacagaccgccagaatcacatgcggcggcaacaacatcggcggcaagagcgtgcactggtatcagcagccacctggacaggctccagtggtggtggtgtacgacgacagcgatagacctagcggcatccccgagagattcagcggcagcaattccggcaataccgccacactgaccatcagcagagtggaagctggcgacgaggccgtgtactactgccaagtgtgggacagcagcagcgatcacgtggtgtttggcggcggaacaaagctgacagtgcttctcgaggacctgaagaacgtgttcccacctgaggtggccgtgttcgagcctagcaaggccgagatcagcagaacccagaaagccaccctcgtgtgcctggctaccggcttctaccctcctcatgtggaactgtcttggtgggtcaacggcaaagaggtgcacgacggcgtgtgtaccgacccccagccactgaaagaacagcccgccctgaacgacagccggtactgcctgagcagcagactgagagtgtccgccaccttctggcagaacccccggaaccacttcagatgccaggtgcagttctacggcctgagcgagaacgacgagtggacccaggacagagccaagcccgtgacccagatcgtgtctgccgaagcctggggcagagccgattgcggctttaccagcgagagctaccagcagggcgtgctgagcgccaccatcctgtacgagatcctgctgggcaaggccaccctgtacgccgtgctggtgtctgccctggtgctgatggctatggtcaagcggaaggacagccggggaagggccaagcgatctggatctggagcaacaaacttctcactactcaaacaagcaggtgacgtggaggagaatcccgggcctactagtatggactggatttggcgcatccttttccttgtcggcgctgctaccggcgcgcattccttcgaacaactccagctgcaagagtctggccctggcctggtcaagcctagcgaaacactgagcctgacctgtaccgtgtctggcggctctatcagctccagcagctatttctggggctggatcagacaacctcctggcaaaggactggaatggatcggctccatctactacagcggcatcacctactacaaccccagcctgaagtccagagtgaccatctccgtggacaccagcaagaaccagttctccctgaagctgagcagcgtgacagccgccgataccgccgtgtattattgtgccagacatgacggcgctgtggccggcctgtttgattattggggacagggcaccctggtcaccgtgtcatctgctacgcgtatccagaaccctgatcctgccgtgtaccagctgcgggatagcaagagcagcgacaagttcgtgtgtctgttcaccgacttcgacagccagatcaacgtgtcccagagcaaggactccgacgtgtacatcaccgataagtgcgtgctggacatgcggagcatggacttcaagagcaactccgccgtggcctggtccaacaagtccgatttcacctgcgccaacgccttcaacaacagcattatccccgaggacacattcttcccaagccccgagagcagctgcgacgtgaagctggtggaaaagagcttcgagacagacaccaacctgaacttccagaacctgagcgtgatcggcttcagaatcctgctgctgaaagtggccggctttaacctgctgatgaccctgcggctgtggtccagc

SEQ ID NO: 33695 - DNA, 2295 bp, synthetic construct
  source 1..2295: mol_type = other DNA
atggccttaccagtgaccgccttgctcctgccgctggccttgctgctccacgccgccaggccgagctacgtgctgacacagcctccatccgtgtctgtggctccaggacagaccgccagaatcacatgcggcggcaacaacatcggcggcaagagcgtgcactggtatcagcagccacctggacaggctccagtggtggtggtgtacgacgacagcgatagacctagcggcatccccgagagattcagcggcagcaattccggcaataccgccacactgaccatcagcagagtggaagctggcgacgaggccgtgtactactgccaagtgtgggacagcagcagcgatcacgtggtgtttggcggcggaacaaagctgacagtgcttctcgaggacctgaagaacgtgttcccacctgaggtggccgtgttcgagcctagcgaggccgagatcagccacacccagaaagccaccctcgtgtgcctggctaccggcttctaccccgaccatgtggaactgtcttggtgggtcaacggcaaagaggtgcacagcggcgtgtgtaccgacccccagccactgaaagaacagcccgccctgaacgacagccggtactgcctgagcagcagactgagagtgtccgccaccttctggcagaacccccggaaccacttcagatgccaggtgcagttctacggcctgagcgagaacgacgagtggacccaggacagagccaagcccgtgacccagatcgtgtctgccgaagcctggggcagagccgattgcggctttaccagcgagagctaccagcagggcgtgctgagcgccaccatcctgtacgagatcctgctgggcaaggccaccctgtacgccgtgctggtgtctgccctggtgctgatggctatggtcaagcggaaggacagccggggaagggccaagcgatctggatctggagcaacaaacttctcactactcaaacaagcaggtgacgtggaggagaatcccgggcctactagtaccatggactggatttggcgcatccttttccttgtcggcgctgctaccggcgcccattccgggccccaggtgcagctccaagaaagcggacccggactggttaagccctctcagaccctgtctctgacctgcacagttagcggagccagcattaccacaggcgagtattattggaattggtttcggcagccaccaggcaaggggcttgagtggatgggtgctattgctgcctctggcagcaccacctactctcccagctttgagagcagaacctccatcagccgggacacctccaaaaaccagttctctctgaagctgtcctccgtgaccgctgctgacaccgccgtctattattgtggccggtctttcggcgtggcagctgtgaccacaggacagaacagaggccagggaacacttgtgaccgtgtcctctggatccggcggcggaggatctggcggaggcggatctgggggcggaggctctttcgaacaactccagctgcaagagtctggccctggcctggtcaagcctagcgaaacactgagcctgacctgtaccgtgtctggcggctctatcagctccagcagctatttctggggctggatcagacaacctcctggcaaaggactggaatggatcggctccatctactacagcggcatcacctactacaaccccagcctgaagtccagagtgaccatctccgtggacaccagcaagaaccagttctccctgaagctgagcagcgtgacagccgccgataccgccgtgtattattgtgccagacatgacggcgctgtggccggcctgtttgattattggggacagggcaccctggtcaccgtgtcatctgctacgcgtatccagaaccctgatcctgccgtgtaccagctgcgggatagcaagagcagcgacaagagcgtgtgtctgttcaccgacttcgacagccagaccaacgtgtcccagagcaaggactccgacgtgtacatcaccgataagtgcgtgctggacatgcggagcatggacttcaagagcaactccgccgtggcctggtccaacaagtccgatttcgcctgcgccaacgccttcaacaacagcattatccccgaggacacattcttcccaagccccgagagcagctgcgacgtgaagctggtggaaaagagcttcgagacagacaccaacctgaacttccagaacctgagcgtgatcggcttcagaatcctgctgctgaaagtggccggctttaacctgctgatgaccctgcggctgtggtccagc

SEQ ID NO: 33696 - DNA, 2718 bp, synthetic construct
  source 1..2718: mol_type = other DNA
atggccttaccagtgaccgccttgctcctgccgctggccttgctgctccacgccgccaggccgcaggttcagctgcaagagtctggccctggcctggtcaagcctagccaaacactgagcctgacctgtaccgtgtctggcggctctatcaccaccggcgagttctactggaactggttcagacagcctcctggcaaaggactggaatggatgggagccattgccgccagcggcagcacaacatacagccctagcttcgagagccggaccagcatcagcagagacaccagcaagaatcagttcagcctgaagctgagcagcgtgacagccgccgatacagccgtgtattactgcggcagatcctttggagtggccgccgtgacaaccggccagaatagaggacagggcaccctggtcacagtgtctagcggtaccggcggaggcggatctggcggcggaggtagcggtggcggaggatctgaattcagctacgtgctgacacagcctccatccgtgtctgtggctccaggacagaccgccagaatcacatgcggcggcaacaacatcggcggcaagagcgtgcactggtatcagcagccacctggacaggctccagtggtggtggtgtacgacgacagcgatagacctagcggcatccccgagagattcagcggcagcaattccggcaataccgccacactgaccatcagcagagtggaagctggcgacgaggccgtgtactactgccaagtgtgggacagcagcagcgatcacgtggtgtttggcggcggaacaaagctgacagtgcttctcgagatccagaaccctgatcctgccgtgtaccagctgcgggatagcaagagcagcgacaagagcgtgtgtctgttcaccgacttcgacagccagaccaacgtgtcccagagcaaggactccgacgtgtacatcaccgataagtgcgtgctggacatgcggagcatggacttcaagagcaactccgccgtggcctggtccaacaagtccgatttcgcctgcgccaacgccttcaacaacagcattatccccgaggacacattcttcccaagcagcgacgtgccctgcgacgtgaagctggtggaaaagagcttcgagacagacaccaacctgaacttccagaacctgagcgtgatcggcttcagaatcctgctgctgaaagtggccggctttaacctgctgatgaccctgcggctgtggtccagccgcgccaagagaagcggatctggcgtgaagcagaccctgaatttcgacctgctgaagctggctggcgacgtggaatccaacccaggccctactagtaccatggactggatttggcgcatccttttccttgtcggcgctgctaccggcgcccattccgggcccgaagtgcaactggttgaatccggtggcggcctggtgcaacccggcggatctctcagacttagctgtgccgcctccggcagaaccttcacaatgggatggtacaggcaggctccagggaaagagagagagttcgtcgccgccatctctctgtctcccacactggcctactacgccgactctgtgaaaggccggttcaccatctccagagataatagcaagaacaccgtggtgctgcaaatgaactctctgagagccgaggatacagccctgtactattgtgccgctgaccggaagtccgtgatgagcatcagacccgattactggggacagggcacactggtcacagtgtctagtggatccggcggcggaggatctggcggaggcggatctgggggcggaggctctttcgaacaactccagctgcaagagtctggccctggcctggtcaagcctagcgaaacactgagcctgacctgtaccgtgtctggcggctctatcagctccagcagctatttctggggctggatcagacaacctcctggcaaaggactggaatggatcggctccatctactacagcggcatcacctactacaaccccagcctgaagtccagagtgaccatctccgtggacaccagcaagaaccagttctccctgaagctgagcagcgtgacagccgccgataccgccgtgtattattgtgccagacatgacggcgctgtggccggcctgtttgattattggggacagggcaccctggtcaccgtgtcatctgctacgcgtgaggacctgaagaacgtgttcccacctgaggtggccgtgttcgagcctagcaaggccgagatcgcccacacccagaaagccaccctcgtgtgcctggctaccggcttctaccccgaccatgtggaactgtcttggtgggtcaacggcaaagaggtgcacagcggcgtgtgtaccgacccccagccactgaaagaacagcccgccctgaacgacagccggtactgcctgagcagcagactgagagtgtccgccaccttctggcagaacccccggaaccacttcagatgccaggtgcagttctacggcctgagcgagaacgacgagtggacccaggacagagccaagcccgtgacccagatcgtgtctgccgaagcctggggcagagccgattgcggcatcaccagcgccagctaccaccagggcgtgctgagcgccaccatcctgtacgagatcctgctgggcaaggccaccctgtacgccgtgctggtgtctgccctggtgctgatggctatggtcaagcggaaggacagccgggga

SEQ ID NO: 33697 - DNA, 2307 bp, synthetic construct
  source 1..2307: mol_type = other DNA
atggccttaccagtgaccgccttgctcctgccgctggccttgctgctccacgccgccaggccgcaggttcagctgcaagagtctggccctggcctggtcaagcctagccaaacactgagcctgacctgtaccgtgtctggcggctctatcaccaccggcgagttctactggaactggttcagacagcctcctggcaaaggactggaatggatgggagccattgccgccagcggcagcacaacatacagccctagcttcgagagccggaccagcatcagcagagacaccagcaagaatcagttcagcctgaagctgagcagcgtgacagccgccgatacagccgtgtattactgcggcagatcctttggagtggccgccgtgacaaccggccagaatagaggacagggcaccctggtcacagtgtctagcggtaccggcggaggcggatctggcggcggaggtagcggtggcggaggatctgaattcagctacgtgctgacacagcctccatccgtgtctgtggctccaggacagaccgccagaatcacatgcggcggcaacaacatcggcggcaagagcgtgcactggtatcagcagccacctggacaggctccagtggtggtggtgtacgacgacagcgatagacctagcggcatccccgagagattcagcggcagcaattccggcaataccgccacactgaccatcagcagagtggaagctggcgacgaggccgtgtactactgccaagtgtgggacagcagcagcgatcacgtggtgtttggcggcggaacaaagctgacagtgcttctcgagatccagaaccctgatcctgccgtgtaccagctgcgggatagcaagagcagcgacaagagcgtgtgtctgttcaccgacttcgacagccagaccaacgtgtcccagagcaaggactccgacgtgtacatcaccgataagtgcgtgctggacatgcggagcatggacttcaagagcaactccgccgtggcctggtccaacaagtccgatttcgcctgcgccaacgccttcaacaacagcattatccccgaggacacattcttcccaagcagcgacgtgccctgcgacgtgaagctggtggaaaagagcttcgagacagacaccaacctgaacttccagaacctgagcgtgatcggcttcagaatcctgctgctgaaagtggccggctttaacctgctgatgaccctgcggctgtggtccagccgcgccaagagaagcggatctggcgtgaagcagaccctgaatttcgacctgctgaagctggctggcgacgtggaatccaacccaggccctactagtaccatggactggatttggcgcatccttttccttgtcggcgctgctaccggcgcccattccttcgaacaactccagctgcaagagtctggccctggcctggtcaagcctagcgaaacactgagcctgacctgtaccgtgtctggcggctctatcagctccagcagctatttctggggctggatcagacaacctcctggcaaaggactggaatggatcggctccatctactacagcggcatcacctactacaaccccagcctgaagtccagagtgaccatctccgtggacaccagcaagaaccagttctccctgaagctgagcagcgtgacagccgccgataccgccgtgtattattgtgccagacatgacggcgctgtggccggcctgtttgattattggggacagggcaccctggtcaccgtgtcatctgctacgcgtgaggacctgaagaacgtgttcccacctgaggtggccgtgttcgagcctagcaaggccgagatcgcccacacccagaaagccaccctcgtgtgcctggctaccggcttctaccccgaccatgtggaactgtcttggtgggtcaacggcaaagaggtgcacagcggcgtgtgtaccgacccccagccactgaaagaacagcccgccctgaacgacagccggtactgcctgagcagcagactgagagtgtccgccaccttctggcagaacccccggaaccacttcagatgccaggtgcagttctacggcctgagcgagaacgacgagtggacccaggacagagccaagcccgtgacccagatcgtgtctgccgaagcctggggcagagccgattgcggcatcaccagcgccagctaccaccagggcgtgctgagcgccaccatcctgtacgagatcctgctgggcaaggccaccctgtacgccgtgctggtgtctgccctggtgctgatggctatggtcaagcggaaggacagccgggga

SEQ ID NO: 33698 - DNA, 2706 bp, synthetic construct
  source 1..2706: mol_type = other DNA
atggccttaccagtgaccgccttgctcctgccgctggccttgctgctccacgccgccaggccggaagtgcagctggttgaatctggcggaggactggttcaggctggcggatctctgagactgtcttgtgccgccagcggcagaacctttagcatgggctggtttagacaggcccctggcaaagagagagagttcgtcgccgccatcacatactctggcggcagcccttactacgccgactctgtgaagggcagattcaccatcagccgggacaacgccaagaacaccgtgtacctccagatgaacagcctgaagcctgaggacaccgccgtgtactactgcgccgccaatccaacatacggcagcgactggaacgccgagaattggggccagggaacccaagtgacagtgtctagcggtaccggcggaggcggatctggcggcggaggtagcggtggcggaggatctgaattcagctacgtgctgacacagcctccatccgtgtctgtggctccaggacagaccgccagaatcacatgcggcggcaacaacatcggcggcaagagcgtgcactggtatcagcagccacctggacaggctccagtggtggtggtgtacgacgacagcgatagacctagcggcatccccgagagattcagcggcagcaattccggcaataccgccacactgaccatcagcagagtggaagctggcgacgaggccgtgtactactgccaagtgtgggacagcagcagcgatcacgtggtgtttggcggcggaacaaagctgacagtgcttctcgaggacctgaagaacgtgttcccacctgaggtggccgtgttcgagcctagcgaggccgagatcagccacacccagaaagccaccctcgtgtgcctggctaccggcttctaccccgaccatgtggaactgtcttggtgggtcaacggcaaagaggtgcacagcggcgtgtgtaccgacccccagccactgaaagaacagcccgccctgaacgacagccggtactgcctgagcagcagactgagagtgtccgccaccttctggcagaacccccggaaccacttcagatgccaggtgcagttctacggcctgagcgagaacgacgagtggacccaggacagagccaagcccgtgacccagatcgtgtctgccgaagcctggggcagagccgattgcggctttaccagcgagagctaccagcagggcgtgctgagcgccaccatcctgtacgagatcctgctgggcaaggccaccctgtacgccgtgctggtgtctgccctggtgctgatggctatggtcaagcggaaggacagccggggaagggccaagcgatctggatctggagcaacaaacttctcactactcaaacaagcaggtgacgtggaggagaatcccgggcctactagtaccatggactggatttggcgcatccttttccttgtcggcgctgctaccggcgcccattccgggccccaggtgcagctccaagaaagcggacccggactggttaagccctctcagaccctgtctctgacctgcacagttagcggagccagcattaccacaggcgagtattattggaattggtttcggcagccaccaggcaaggggcttgagtggatgggtgctattgctgcctctggcagcaccacctactctcccagctttgagagcagaacctccatcagccgggacacctccaaaaaccagttctctctgaagctgtcctccgtgaccgctgctgacaccgccgtctattattgtggccggtctttcggcgtggcagctgtgaccacaggacagaacagaggccagggaacacttgtgaccgtgtcctctggatccggcggcggaggatctggcggaggcggatctgggggcggaggctctttcgaacaactccagctgcaagagtctggccctggcctggtcaagcctagcgaaacactgagcctgacctgtaccgtgtctggcggctctatcagctccagcagctatttctggggctggatcagacaacctcctggcaaaggactggaatggatcggctccatctactacagcggcatcacctactacaaccccagcctgaagtccagagtgaccatctccgtggacaccagcaagaaccagttctccctgaagctgagcagcgtgacagccgccgataccgccgtgtattattgtgccagacatgacggcgctgtggccggcctgtttgattattggggacagggcaccctggtcaccgtgtcatctgctacgcgtatccagaaccctgatcctgccgtgtaccagctgcgggatagcaagagcagcgacaagagcgtgtgtctgttcaccgacttcgacagccagaccaacgtgtcccagagcaaggactccgacgtgtacatcaccgataagtgcgtgctggacatgcggagcatggacttcaagagcaactccgccgtggcctggtccaacaagtccgatttcgcctgcgccaacgccttcaacaacagcattatccccgaggacacattcttcccaagccccgagagcagctgcgacgtgaagctggtggaaaagagcttcgagacagacaccaacctgaacttccagaacctgagcgtgatcggcttcagaatcctgctgctgaaagtggccggctttaacctgctgatgaccctgcggctgtggtccagc

SEQ ID NO: 33699 - DNA, 2727 bp, synthetic construct
  source 1..2727: mol_type = other DNA
atggccttaccagtgaccgccttgctcctgccgctggccttgctgctccacgccgccaggccggaagtgcagctggttgaatctggcggaggactggttcaggctggcggatctctgagactgtcttgtgccgccagcggcagaacctttagcatgggctggtttagacaggcccctggcaaagagagagagttcgtcgccgccatcacatactctggcggcagcccttactacgccgactctgtgaagggcagattcaccatcagccgggacaacgccaagaacaccgtgtacctccagatgaacagcctgaagcctgaggacaccgccgtgtactactgcgccgccaatccaacatacggcagcgactggaacgccgagaattggggccagggaacccaagtgacagtgtctagcggtaccggcggaggcggatctggcggcggaggtagcggtggcggaggatctgaattcagctacgtgctgacacagcctccatccgtgtctgtggctccaggacagaccgccagaatcacatgcggcggcaacaacatcggcggcaagagcgtgcactggtatcagcagccacctggacaggctccagtggtggtggtgtacgacgacagcgatagacctagcggcatccccgagagattcagcggcagcaattccggcaataccgccacactgaccatcagcagagtggaagctggcgacgaggccgtgtactactgccaagtgtgggacagcagcagcgatcacgtggtgtttggcggcggaacaaagctgacagtgcttctcgagatccagaaccctgatcctgccgtgtaccagctgcgggatagcaagagcagcgacaagagcgtgtgtctgttcaccgacttcgacagccagaccaacgtgtcccagagcaaggactccgacgtgtacatcaccgataagtgcgtgctggacatgcggagcatggacttcaagagcaactccgccgtggcctggtccaacaagtccgatttcgcctgcgccaacgccttcaacaacagcattatccccgaggacacattcttcccaagcagcgacgtgccctgcgacgtgaagctggtggaaaagagcttcgagacagacaccaacctgaacttccagaacctgagcgtgatcggcttcagaatcctgctgctgaaagtggccggctttaacctgctgatgaccctgcggctgtggtccagccgcgccaagagaagcggatctggcgtgaagcagaccctgaatttcgacctgctgaagctggctggcgacgtggaatccaacccaggccctactagtaccatggactggatttggcgcatccttttccttgtcggcgctgctaccggcgcccattccgggccccaggtgcagctggttgaatctggcggaggactggttcagcctggcggatctctgagactgtcttgtgccgccagcggcaacatcaacagcagaaactgcatgggctggttcagacaggcccctggcaagggaagagaaggcgtggcagctatcggccaagtgaccggcagaacctactacgtggacagcgtgaagggcagattcaccatcagcctggacaacagcaagaacaccctgtacctccagatgaacagcctgagagccgaggacaccgccgtgtactattgtgctgctgcccctggctgtctgctgtctgcacttagaagcgccgactacagaaactggggccagggcacactggtcaccgtttcttctggatccggcggcggaggatctggcggaggcggatctgggggcggaggctctttcgaacaactccagctgcaagagtctggccctggcctggtcaagcctagcgaaacactgagcctgacctgtaccgtgtctggcggctctatcagctccagcagctatttctggggctggatcagacaacctcctggcaaaggactggaatggatcggctccatctactacagcggcatcacctactacaaccccagcctgaagtccagagtgaccatctccgtggacaccagcaagaaccagttctccctgaagctgagcagcgtgacagccgccgataccgccgtgtattattgtgccagacatgacggcgctgtggccggcctgtttgattattggggacagggcaccctggtcaccgtgtcatctgctacgcgtgaggacctgaagaacgtgttcccacctgaggtggccgtgttcgagcctagcaaggccgagatcgcccacacccagaaagccaccctcgtgtgcctggctaccggcttctaccccgaccatgtggaactgtcttggtgggtcaacggcaaagaggtgcacagcggcgtgtgtaccgacccccagccactgaaagaacagcccgccctgaacgacagccggtactgcctgagcagcagactgagagtgtccgccaccttctggcagaacccccggaaccacttcagatgccaggtgcagttctacggcctgagcgagaacgacgagtggacccaggacagagccaagcccgtgacccagatcgtgtctgccgaagcctggggcagagccgattgcggcatcaccagcgccagctaccaccagggcgtgctgagcgccaccatcctgtacgagatcctgctgggcaaggccaccctgtacgccgtgctggtgtctgccctggtgctgatggctatggtcaagcggaaggacagccgggga

SEQ ID NO: 33700 - DNA, 2715 bp, synthetic construct
  source 1..2715: mol_type = other DNA
atggccttaccagtgaccgccttgctcctgccgctggccttgctgctccacgccgccaggccggaagtgcagctggttgaatctggcggaggactggttcaggctggcggatctctgagactgtcttgtgccgccagcggcagaacctttagcatgggctggtttagacaggcccctggcaaagagagagagttcgtcgccgccatcacatactctggcggcagcccttactacgccgactctgtgaagggcagattcaccatcagccgggacaacgccaagaacaccgtgtacctccagatgaacagcctgaagcctgaggacaccgccgtgtactactgcgccgccaatccaacatacggcagcgactggaacgccgagaattggggccagggaacccaagtgacagtgtctagcggtaccggcggaggcggatctggcggcggaggtagcggtggcggaggatctgaattcagctacgtgctgacacagcctccatccgtgtctgtggctccaggacagaccgccagaatcacatgcggcggcaacaacatcggcggcaagagcgtgcactggtatcagcagccacctggacaggctccagtggtggtggtgtacgacgacagcgatagacctagcggcatccccgagagattcagcggcagcaattccggcaataccgccacactgaccatcagcagagtggaagctggcgacgaggccgtgtactactgccaagtgtgggacagcagcagcgatcacgtggtgtttggcggcggaacaaagctgacagtgcttctcgaggacctgaagaacgtgttcccacctgaggtggccgtgttcgagcctagcgaggccgagatcagccacacccagaaagccaccctcgtgtgcctggctaccggcttctaccccgaccatgtggaactgtcttggtgggtcaacggcaaagaggtgcacagcggcgtgtgtaccgacccccagccactgaaagaacagcccgccctgaacgacagccggtactgcctgagcagcagactgagagtgtccgccaccttctggcagaacccccggaaccacttcagatgccaggtgcagttctacggcctgagcgagaacgacgagtggacccaggacagagccaagcccgtgacccagatcgtgtctgccgaagcctggggcagagccgattgcggctttaccagcgagagctaccagcagggcgtgctgagcgccaccatcctgtacgagatcctgctgggcaaggccaccctgtacgccgtgctggtgtctgccctggtgctgatggctatggtcaagcggaaggacagccggggaagggccaagcgatctggatctggagcaacaaacttctcactactcaaacaagcaggtgacgtggaggagaatcccgggcctactagtaccatggactggatttggcgcatccttttccttgtcggcgctgctaccggcgcccattccgggccccaggtgcagctggttgaatctggcggaggactggttcagcctggcggatctctgagactgtcttgtgccgccagcggcaacatcaacagcagaaactgcatgggctggttcagacaggcccctggcaagggaagagaaggcgtggcagctatcggccaagtgaccggcagaacctactacgtggacagcgtgaagggcagattcaccatcagcctggacaacagcaagaacaccctgtacctccagatgaacagcctgagagccgaggacaccgccgtgtactattgtgctgctgcccctggctgtctgctgtctgcacttagaagcgccgactacagaaactggggccagggcacactggtcaccgtttcttctggatccggcggcggaggatctggcggaggcggatctgggggcggaggctctttcgaacaactccagctgcaagagtctggccctggcctggtcaagcctagcgaaacactgagcctgacctgtaccgtgtctggcggctctatcagctccagcagctatttctggggctggatcagacaacctcctggcaaaggactggaatggatcggctccatctactacagcggcatcacctactacaaccccagcctgaagtccagagtgaccatctccgtggacaccagcaagaaccagttctccctgaagctgagcagcgtgacagccgccgataccgccgtgtattattgtgccagacatgacggcgctgtggccggcctgtttgattattggggacagggcaccctggtcaccgtgtcatctgctacgcgtatccagaaccctgatcctgccgtgtaccagctgcgggatagcaagagcagcgacaagagcgtgtgtctgttcaccgacttcgacagccagaccaacgtgtcccagagcaaggactccgacgtgtacatcaccgataagtgcgtgctggacatgcggagcatggacttcaagagcaactccgccgtggcctggtccaacaagtccgatttcgcctgcgccaacgccttcaacaacagcattatccccgaggacacattcttcccaagccccgagagcagctgcgacgtgaagctggtggaaaagagcttcgagacagacaccaacctgaacttccagaacctgagcgtgatcggcttcagaatcctgctgctgaaagtggccggctttaacctgctgatgaccctgcggctgtggtccagc

SEQ ID NO: 33701 - DNA, 2715 bp, synthetic construct
  source 1..2715: mol_type = other DNA
atggccttaccagtgaccgccttgctcctgccgctggccttgctgctccacgccgccaggccggaagtgcaactggttgaatccggtggcggcctggtgcaagcaggcggatctctcagacttagctgtgccgcctccggcagaaccttcacaatgggatggtttaggcaggctccagggaaagagagagagttcgtcgccgccatctctctgtctcccacactggcctactacgccgactctgtgaaaggccggttcaccatctccagagataatgccaagaacaccgtggtgctgcaaatgaactctctgaaacccgaggatacagccctgtactattgtgccgctgaccggaagtccgtgatgagcatcagacccgattactggggacagggcacacaagtcacagtgtcctctggtaccggcggaggcggatctggcggcggaggtagcggtggcggaggatctgaattcagctacgtgctgacacagcctccatccgtgtctgtggctccaggacagaccgccagaatcacatgcggcggcaacaacatcggcggcaagagcgtgcactggtatcagcagccacctggacaggctccagtggtggtggtgtacgacgacagcgatagacctagcggcatccccgagagattcagcggcagcaattccggcaataccgccacactgaccatcagcagagtggaagctggcgacgaggccgtgtactactgccaagtgtgggacagcagcagcgatcacgtggtgtttggcggcggaacaaagctgacagtgcttctcgaggacctgaagaacgtgttcccacctgaggtggccgtgttcgagcctagcgaggccgagatcagccacacccagaaagccaccctcgtgtgcctggctaccggcttctaccccgaccatgtggaactgtcttggtgggtcaacggcaaagaggtgcacagcggcgtgtgtaccgacccccagccactgaaagaacagcccgccctgaacgacagccggtactgcctgagcagcagactgagagtgtccgccaccttctggcagaacccccggaaccacttcagatgccaggtgcagttctacggcctgagcgagaacgacgagtggacccaggacagagccaagcccgtgacccagatcgtgtctgccgaagcctggggcagagccgattgcggctttaccagcgagagctaccagcagggcgtgctgagcgccaccatcctgtacgagatcctgctgggcaaggccaccctgtacgccgtgctggtgtctgccctggtgctgatggctatggtcaagcggaaggacagccggggaagggccaagcgatctggatctggagcaacaaacttctcactactcaaacaagcaggtgacgtggaggagaatcccgggcctactagtaccatggactggatttggcgcatccttttccttgtcggcgctgctaccggcgcccattccgggccccaggtgcagctggttgaatctggcggaggactggttcagcctggcggatctctgagactgtcttgtgccgccagcggcaacatcaacagcagaaactgcatgggctggttcagacaggcccctggcaagggaagagaaggcgtggcagctatcggccaagtgaccggcagaacctactacgtggacagcgtgaagggcagattcaccatcagcctggacaacagcaagaacaccctgtacctccagatgaacagcctgagagccgaggacaccgccgtgtactattgtgctgctgcccctggctgtctgctgtctgcacttagaagcgccgactacagaaactggggccagggcacactggtcaccgtttcttctggatccggcggcggaggatctggcggaggcggatctgggggcggaggctctttcgaacaactccagctgcaagagtctggccctggcctggtcaagcctagcgaaacactgagcctgacctgtaccgtgtctggcggctctatcagctccagcagctatttctggggctggatcagacaacctcctggcaaaggactggaatggatcggctccatctactacagcggcatcacctactacaaccccagcctgaagtccagagtgaccatctccgtggacaccagcaagaaccagttctccctgaagctgagcagcgtgacagccgccgataccgccgtgtattattgtgccagacatgacggcgctgtggccggcctgtttgattattggggacagggcaccctggtcaccgtgtcatctgctacgcgtatccagaaccctgatcctgccgtgtaccagctgcgggatagcaagagcagcgacaagagcgtgtgtctgttcaccgacttcgacagccagaccaacgtgtcccagagcaaggactccgacgtgtacatcaccgataagtgcgtgctggacatgcggagcatggacttcaagagcaactccgccgtggcctggtccaacaagtccgatttcgcctgcgccaacgccttcaacaacagcattatccccgaggacacattcttcccaagccccgagagcagctgcgacgtgaagctggtggaaaagagcttcgagacagacaccaacctgaacttccagaacctgagcgtgatcggcttcagaatcctgctgctgaaagtggccggctttaacctgctgatgaccctgcggctgtggtccagc

SEQ ID NO: 33702 - DNA, 2727 bp, synthetic construct
  source 1..2727: mol_type = other DNA
atggccttaccagtgaccgccttgctcctgccgctggccttgctgctccacgccgccaggccgcaggttcagctgcaagagtctggccctggcctggtcaagcctagccaaacactgagcctgacctgtaccgtgtctggcggctctatcaccaccggcgagttctactggaactggttcagacagcctcctggcaaaggactggaatggatgggagccattgccgccagcggcagcacaacatacagccctagcttcgagagccggaccagcatcagcagagacaccagcaagaatcagttcagcctgaagctgagcagcgtgacagccgccgatacagccgtgtattactgcggcagatcctttggagtggccgccgtgacaaccggccagaatagaggacagggcaccctggtcacagtgtctagcggtaccggcggaggcggatctggcggcggaggtagcggtggcggaggatctgaattcagctacgtgctgacacagcctccatccgtgtctgtggctccaggacagaccgccagaatcacatgcggcggcaacaacatcggcggcaagagcgtgcactggtatcagcagccacctggacaggctccagtggtggtggtgtacgacgacagcgatagacctagcggcatccccgagagattcagcggcagcaattccggcaataccgccacactgaccatcagcagagtggaagctggcgacgaggccgtgtactactgccaagtgtgggacagcagcagcgatcacgtggtgtttggcggcggaacaaagctgacagtgcttctcgaggacctgaagaacgtgttcccacctgaggtggccgtgttcgagcctagcgaggccgagatcagccacacccagaaagccaccctcgtgtgcctggctaccggcttctaccccgaccatgtggaactgtcttggtgggtcaacggcaaagaggtgcacagcggcgtgtgtaccgacccccagccactgaaagaacagcccgccctgaacgacagccggtactgcctgagcagcagactgagagtgtccgccaccttctggcagaacccccggaaccacttcagatgccaggtgcagttctacggcctgagcgagaacgacgagtggacccaggacagagccaagcccgtgacccagatcgtgtctgccgaagcctggggcagagccgattgcggctttaccagcgagagctaccagcagggcgtgctgagcgccaccatcctgtacgagatcctgctgggcaaggccaccctgtacgccgtgctggtgtctgccctggtgctgatggctatggtcaagcggaaggacagccggggaagggccaagcgatctggatctggagcaacaaacttctcactactcaaacaagcaggtgacgtggaggagaatcccgggcctactagtaccatggactggatttggcgcatccttttccttgtcggcgctgctaccggcgcccattccgggccccaggtgcagctggttgaatctggcggaggactggttcagcctggcggatctctgagactgtcttgtgccgccagcggcaacatcaacagcagaaactgcatgggctggttcagacaggcccctggcaagggaagagaaggcgtggcagctatcggccaagtgaccggcagaacctactacgtggacagcgtgaagggcagattcaccatcagcctggacaacagcaagaacaccctgtacctccagatgaacagcctgagagccgaggacaccgccgtgtactattgtgctgctgcccctggctgtctgctgtctgcacttagaagcgccgactacagaaactggggccagggcacactggtcaccgtttcttctggatccggcggcggaggatctggcggaggcggatctgggggcggaggctctttcgaacaactccagctgcaagagtctggccctggcctggtcaagcctagcgaaacactgagcctgacctgtaccgtgtctggcggctctatcagctccagcagctatttctggggctggatcagacaacctcctggcaaaggactggaatggatcggctccatctactacagcggcatcacctactacaaccccagcctgaagtccagagtgaccatctccgtggacaccagcaagaaccagttctccctgaagctgagcagcgtgacagccgccgataccgccgtgtattattgtgccagacatgacggcgctgtggccggcctgtttgattattggggacagggcaccctggtcaccgtgtcatctgctacgcgtatccagaaccctgatcctgccgtgtaccagctgcgggatagcaagagcagcgacaagagcgtgtgtctgttcaccgacttcgacagccagaccaacgtgtcccagagcaaggactccgacgtgtacatcaccgataagtgcgtgctggacatgcggagcatggacttcaagagcaactccgccgtggcctggtccaacaagtccgatttcgcctgcgccaacgccttcaacaacagcattatccccgaggacacattcttcccaagccccgagagcagctgcgacgtgaagctggtggaaaagagcttcgagacagacaccaacctgaacttccagaacctgagcgtgatcggcttcagaatcctgctgctgaaagtggccggctttaacctgctgatgaccctgcggctgtggtccagc

SEQ ID NO: 33703 - DNA, 1461 bp, synthetic construct
  source 1..1461: mol_type = other DNA
atggccttaccagtgaccgccttgctcctgccgctggccttgctgctccacgccgccaggccggacatccagatgacacagagccctagcagcctgtctgccagcgtgggagacagagtgaccatcacatgcaaggccagcgaccacatcaacaactggctggcctggtatcagcagaagcctggacaggcccctaagctgctgatctacggcgctaccacactggaaacaggcgtgcccagcagattttctggcagcggctctggcaccgactacaccctgacaatatccagcctccagcctgaggacttcgccacctactactgtcagcagagctggaacaccccttggacattcggccagggcaccaagctggaaatcaagagaggcggaggcggaagtggaggcggaggatctggcggcggaggctctcaagttcagcttcaacagcctggcgctgagctggtcaaacctggcgcttctgtgaagatgagctgcaaagccagcggctacgccttcagcagctactggatcaactggatgaagcagaaacccggccagggactcgaatggatcggccaaatctatcccggcgacggcgacaccaactacaacggcaagttcaagggcagagccacactgaccgccgatacctctagcagcacagcctacatgcagctgagcagcctgaccagcgaagatagcgccgtgtacttctgtgcccggtccatcacaacagtcgtgggctgcgctatggactattggggccagggaacaagcgtgaccgtgtctagtacgcgtaaaattgaagttatgtatcctcctccttacctagacaatgagaagagcaatggaaccattatccatgtgaaagggaaacacctttgtccaagtcccctatttcccggaccttctaagcccttttgggtgctggtggtggttgggggagtcctggcttgctatagcttgctagtaacagtggcctttattattttctgggtgaggagtaagaggagcaggctcctgcacagtgactacatgaacatgactccacgccgccccggacccacccgcaagcattaccagccctatgccccaccacgcgacttcgcagcctatcgctccagagtgaagttcagcaggagcgcagacgcccccgcgtaccagcagggccagaaccagctctataacgagctcaatctaggacgaagagaggagtacgatgttttggacaagagacgtggccgggaccctgagatggggggaaagccgagaaggaagaaccctcaggaaggcctgtacaatgaactgcagaaagataagatggcggaggcctacagtgagattgggatgaaaggcgagcgccggaggggcaaggggcacgatggcctttaccagggtctcagtacagccaccaaggacacctacgacgcccttcacatgcaggccctgccccctcgc

SEQ ID NO: 33704 - DNA, 1479 bp, synthetic construct
  source 1..1479: mol_type = other DNA
atggccttaccagtgaccgccttgctcctgccgctggccttgctgctccacgccgccaggccggacatccagatgacacagagccctagcagcctgtctgccagcgtgggagacagagtgaccatcacatgcaaggccagcgaccacatcaacaactggctggcctggtatcagcagaagcctggacaggcccctaagctgctgatctacggcgctaccacactggaaacaggcgtgcccagcagattttctggcagcggctctggcaccgactacaccctgacaatatccagcctccagcctgaggacttcgccacctactactgtcagcagagctggaacaccccttggacattcggccagggcaccaagctggaaatcaagagaggcggaggcggaagtggaggcggaggatctggcggcggaggctctcaagttcagcttcaacagcctggcgctgagctggtcaaacctggcgcttctgtgaagatgagctgcaaagccagcggctacgccttcagcagctactggatcaactggatgaagcagaaacccggccagggactcgaatggatcggccaaatctatcccggcgacggcgacaccaactacaacggcaagttcaagggcagagccacactgaccgccgatacctctagcagcacagcctacatgcagctgagcagcctgaccagcgaagatagcgccgtgtacttctgtgcccggtccatcacaacagtcgtgggctgcgctatggactattggggccagggaacaagcgtgaccgtgtctagtacgcgtgcgaagcccaccacgacgccagcgccgcgaccaccaacaccggcgcccaccatcgcgtcgcagcccctgtccctgcgcccagaggcgtgccggccagcggcggggggcgcagtgcacacgagggggctggacttcgcctgtgacatctacatctgggcgcccttggccgggacttgtggggtccttctcctgtcactggttatcaccctttactgcaaacggggcagaaagaaactcctgtatatattcaaacaaccatttatgagaccagtacaaactactcaagaggaagatggctgtagctgccgatttccagaagaagaagaaggaggatgtgaactgagagtgaagttcagcaggagcgcagacgcccccgcgtaccagcagggccagaaccagctctataacgagctgaatctaggacgaagagaggagtacgatgttttggacaagagacgtggccgggaccctgagatggggggaaagccgagaaggaagaaccctcaggaaggcctgtacaatgaactgcagaaagataagatggcggaggcctacagtgagattgggatgaaaggcgagcgccggaggggcaaggggcacgatggcctttaccagggtctcagtacagccaccaaggacacctacgacgcccttcacatgcaggccctgccccctcgc

SEQ ID NO: 33705 - DNA, 1479 bp, synthetic construct
  source 1..1479: mol_type = other DNA
atggccttaccagtgaccgccttgctcctgccgctggccttgctgctccacgccgccaggccgcaagttcagcttcaacagcctggcgctgagctggtcaaacctggcgcttctgtgaagatgagctgcaaagccagcggctacgccttcagcagctactggatcaactggatgaagcagaaacccggccagggactcgaatggatcggccaaatctatcccggcgacggcgacaccaactacaacggcaagttcaagggcagagccacactgaccgccgatacctctagcagcacagcctacatgcagctgagcagcctgaccagcgaagatagcgccgtgtacttctgtgcccggtccatcacaacagtcgtgggctgcgctatggactattggggccagggaacaagcgtgaccgtgtctagtggcggaggcggaagtggaggcggaggatctggcggcggaggctctgacatccagatgacacagagccctagcagcctgtctgccagcgtgggagacagagtgaccatcacatgcaaggccagcgaccacatcaacaactggctggcctggtatcagcagaagcctggacaggcccctaagctgctgatctacggcgctaccacactggaaacaggcgtgcccagcagattttctggcagcggctctggcaccgactacaccctgacaatatccagcctccagcctgaggacttcgccacctactactgtcagcagagctggaacaccccttggacattcggccagggcaccaagctggaaatcaagagaacgcgtgcgaagcccaccacgacgccagcgccgcgaccaccaacaccggcgcccaccatcgcgtcgcagcccctgtccctgcgcccagaggcgtgccggccagcggcggggggcgcagtgcacacgagggggctggacttcgcctgtgacatctacatctgggcgcccttggccgggacttgtggggtccttctcctgtcactggttatcaccctttactgcaaacggggcagaaagaaactcctgtatatattcaaacaaccatttatgagaccagtacaaactactcaagaggaagatggctgtagctgccgatttccagaagaagaagaaggaggatgtgaactgagagtgaagttcagcaggagcgcagacgcccccgcgtaccagcagggccagaaccagctctataacgagctgaatctaggacgaagagaggagtacgatgttttggacaagagacgtggccgggaccctgagatggggggaaagccgagaaggaagaaccctcaggaaggcctgtacaatgaactgcagaaagataagatggcggaggcctacagtgagattgggatgaaaggcgagcgccggaggggcaaggggcacgatggcctttaccagggtctcagtacagccaccaaggacacctacgacgcccttcacatgcaggccctgccccctcgc

SEQ ID NO: 33706 - DNA, 1878 bp, synthetic construct
  source 1..1878: mol_type = other DNA
atggccttaccagtgaccgccttgctcctgccgctggccttgctgctccacgccgccaggccggacatccagatgacacagagccctagcagcctgtctgccagcgtgggagacagagtgaccatcacatgcaaggccagcgaccacatcaacaactggctggcctggtatcagcagaagcctggacaggcccctaagctgctgatctacggcgctaccacactggaaacaggcgtgcccagcagattttctggcagcggctctggcaccgactacaccctgacaatatccagcctccagcctgaggacttcgccacctactactgtcagcagagctggaacaccccttggacattcggccagggcaccaagctggaaatcaagagactcgagatccagaaccctgatcctgccgtgtaccagctgcgggatagcaagagcagcgacaagagcgtgtgtctgttcaccgacttcgacagccagaccaacgtgtcccagagcaaggactccgacgtgtacatcaccgataagtgcgtgctggacatgcggagcatggacttcaagagcaactccgccgtggcctggtccaacaagtccgatttcgcctgcgccaacgccttcaacaacagcattatccccgaggacacattcttcccaagcagcgacgtgccctgcgacgtgaagctggtggaaaagagcttcgagacagacaccaacctgaacttccagaacctgagcgtgatcggcttcagaatcctgctgctgaaagtggccggctttaacctgctgatgaccctgcggctgtggtccagccgcgccaagagaagcggatctggcgtgaagcagaccctgaatttcgacctgctgaagctggctggcgacgtggaatccaacccaggccctactagtatggactggatttggcgcatccttttccttgtcggcgctgctaccggcgcgcattccttcgaacaagttcagcttcaacagcctggcgctgagctggtcaaacctggcgcttctgtgaagatgagctgcaaagccagcggctacgccttcagcagctactggatcaactggatgaagcagaaacccggccagggactcgaatggatcggccaaatctatcccggcgacggcgacaccaactacaacggcaagttcaagggcagagccacactgaccgccgatacctctagcagcacagcctacatgcagctgagcagcctgaccagcgaagatagcgccgtgtacttctgtgcccggtccatcacaacagtcgtgggctgcgctatggactattggggccagggaacaagcgtgaccgtgtctagtacgcgtgaggacctgaagaacgtgttcccacctgaggtggccgtgttcgagcctagcaaggccgagatcgcccacacccagaaagccaccctcgtgtgcctggctaccggcttctaccccgaccatgtggaactgtcttggtgggtcaacggcaaagaggtgcacagcggcgtgtgtaccgacccccagccactgaaagaacagcccgccctgaacgacagccggtactgcctgagcagcagactgagagtgtccgccaccttctggcagaacccccggaaccacttcagatgccaggtgcagttctacggcctgagcgagaacgacgagtggacccaggacagagccaagcccgtgacccagatcgtgtctgccgaagcctggggcagagccgattgcggcatcaccagcgccagctaccaccagggcgtgctgagcgccaccatcctgtacgagatcctgctgggcaaggccaccctgtacgccgtgctggtgtctgccctggtgctgatggctatggtcaagcggaaggacagccgggga

SEQ ID NO: 33707 - DNA, 1866 bp, synthetic construct
  source 1..1866: mol_type = other DNA
atggccttaccagtgaccgccttgctcctgccgctggccttgctgctccacgccgccaggccggacatccagatgacacagagccctagcagcctgtctgccagcgtgggagacagagtgaccatcacatgcaaggccagcgaccacatcaacaactggctggcctggtatcagcagaagcctggacaggcccctaagctgctgatctacggcgctaccacactggaaacaggcgtgcccagcagattttctggcagcggctctggcaccgactacaccctgacaatatccagcctccagcctgaggacttcgccacctactactgtcagcagagctggaacaccccttggacattcggccagggcaccaagctggaaatcaagagactcgaggacctgaagaacgtgttcccacctgaggtggccgtgttcgagcctagcaaggccgagatcgcccacacccagaaagccaccctcgtgtgcctggctaccggcttctaccccgaccatgtggaactgtcttggtgggtcaacggcaaagaggtgcacagcggcgtgtgtaccgacccccagccactgaaagaacagcccgccctgaacgacagccggtactgcctgagcagcagactgagagtgtccgccaccttctggcagaacccccggaaccacttcagatgccaggtgcagttctacggcctgagcgagaacgacgagtggacccaggacagagccaagcccgtgacccagatcgtgtctgccgaagcctggggcagagccgattgcggcatcaccagcgccagctaccaccagggcgtgctgagcgccaccatcctgtacgagatcctgctgggcaaggccaccctgtacgccgtgctggtgtctgccctggtgctgatggctatggtcaagcggaaggacagccggggaagggccaagcgatctggatctggagcaacaaacttctcactactcaaacaagcaggtgacgtggaggagaatcccgggcctactagtatggactggatttggcgcatccttttccttgtcggcgctgctaccggcgcgcattccttcgaacaagttcagcttcaacagcctggcgctgagctggtcaaacctggcgcttctgtgaagatgagctgcaaagccagcggctacgccttcagcagctactggatcaactggatgaagcagaaacccggccagggactcgaatggatcggccaaatctatcccggcgacggcgacaccaactacaacggcaagttcaagggcagagccacactgaccgccgatacctctagcagcacagcctacatgcagctgagcagcctgaccagcgaagatagcgccgtgtacttctgtgcccggtccatcacaacagtcgtgggctgcgctatggactattggggccagggaacaagcgtgaccgtgtctagtacgcgtatccagaaccctgatcctgccgtgtaccagctgcgggatagcaagagcagcgacaagagcgtgtgtctgttcaccgacttcgacagccagaccaacgtgtcccagagcaaggactccgacgtgtacatcaccgataagtgcgtgctggacatgcggagcatggacttcaagagcaactccgccgtggcctggtccaacaagtccgatttcgcctgcgccaacgccttcaacaacagcattatccccgaggacacattcttcccaagcagcgacgtgccctgcgacgtgaagctggtggaaaagagcttcgagacagacaccaacctgaacttccagaacctgagcgtgatcggcttcagaatcctgctgctgaaagtggccggctttaacctgctgatgaccctgcggctgtggtccagc

SEQ ID NO: 33708 - DNA, 1866 bp, synthetic construct; identical to SEQ ID NO: 3252
  source 1..1866: mol_type = other DNA

SEQ ID NO: 33709 - DNA, 1878 bp, synthetic construct; identical to SEQ ID NO: 3254
  source 1..1878: mol_type = other DNA

SEQ ID NO: 33710 - DNA, 1914 bp, synthetic construct
  source 1..1914: mol_type = other DNA
atggccttaccagtgaccgccttgctcctgccgctggccttgctgctccacgccgccaggccgctcgaggaggacctgaagaacgtgttcccacctgaggtggccgtgttcgagcctagcaaggccgagatcgcccacacccagaaagccaccctcgtgtgcctggctaccggcttctaccccgaccatgtggaactgtcttggtgggtcaacggcaaagaggtgcacagcggcgtgtgtaccgacccccagccactgaaagaacagcccgccctgaacgacagccggtactgcctgagcagcagactgagagtgtccgccaccttctggcagaacccccggaaccacttcagatgccaggtgcagttctacggcctgagcgagaacgacgagtggacccaggacagagccaagcccgtgacccagatcgtgtctgccgaagcctggggcagagccgattgcggcatcaccagcgccagctaccaccagggcgtgctgagcgccaccatcctgtacgagatcctgctgggcaaggccaccctgtacgccgtgctggtgtctgccctggtgctgatggctatggtcaagcggaaggacagccggggaagggccaagcgatctggatctggagcaacaaacttctcactactcaaacaagcaggtgacgtggaggagaatcccgggcctactagcatggccttaccagtgaccgccttgctcctgccgctggccttgctgctccacgccgccaggccggacatccagatgacacagagccctagcagcctgtctgccagcgtgggagacagagtgaccatcacatgcaaggccagcgaccacatcaacaactggctggcctggtatcagcagaagcctggacaggcccctaagctgctgatctacggcgctaccacactggaaacaggcgtgcccagcagattttctggcagcggctctggcaccgactacaccctgacaatatccagcctccagcctgaggacttcgccacctactactgtcagcagagctggaacaccccttggacattcggccagggcaccaagctggaaatcaagagaggcggaggcggaagtggaggcggaggatctggcggcggaggctctcaagttcagcttcaacagcctggcgctgagctggtcaaacctggcgcttctgtgaagatgagctgcaaagccagcggctacgccttcagcagctactggatcaactggatgaagcagaaacccggccagggactcgaatggatcggccaaatctatcccggcgacggcgacaccaactacaacggcaagttcaagggcagagccacactgaccgccgatacctctagcagcacagcctacatgcagctgagcagcctgaccagcgaagatagcgccgtgtacttctgtgcccggtccatcacaacagtcgtgggctgcgctatggactattggggccagggaacaagcgtgaccgtgtctagtacgcgtatccagaaccctgatcctgccgtgtaccagctgcgggatagcaagagcagcgacaagagcgtgtgtctgttcaccgacttcgacagccagaccaacgtgtcccagagcaaggactccgacgtgtacatcaccgataagtgcgtgctggacatgcggagcatggacttcaagagcaactccgccgtggcctggtccaacaagtccgatttcgcctgcgccaacgccttcaacaacagcattatccccgaggacacattcttcccaagcagcgacgtgccctgcgacgtgaagctggtggaaaagagcttcgagacagacaccaacctgaacttccagaacctgagcgtgatcggcttcagaatcctgctgctgaaagtggccggctttaacctgctgatgaccctgcggctgtggtccagc

SEQ ID NO: 33711 - DNA, 1935 bp, synthetic construct
  source 1..1935: mol_type = other DNA
atggccttaccagtgaccgccttgctcctgccgctggccttgctgctccacgccgccaggccgctcgagggctccggcgatcgccctgatcctgccgtgtaccagctgcgggatagcaagagcagcgacaagagcgtgtgtctgttcaccgacttcgacagccagaccaacgtgtcccagagcaaggactccgacgtgtacatcaccgataagtgcgtgctggacatgcggagcatggacttcaagagcaactccgccgtggcctggtccaacaagtccgatttcgcctgcgccaacgccttcaacaacagcattatccccgaggacacattcttcccaagccccgagagcagctgcgacgtgaagctggtggaaaagagcttcgagacagacaccaacctgaacttccagaacctgagcgtgatcggcttcagaatcctgctgctgaaagtggccggctttaacctgctgatgaccctgcggctgtggtccagctctagtcgcgccaagagaagcggatctggcgtgaagcagaccctgaatttcgacctgctgaagctggctggcgacgtggaatccaacccaggccccactagcatggccttaccagtgaccgccttgctcctgccgctggccttgctgctccacgccgccaggccggacatccagatgacacagagccctagcagcctgtctgccagcgtgggagacagagtgaccatcacatgcaaggccagcgaccacatcaacaactggctggcctggtatcagcagaagcctggacaggcccctaagctgctgatctacggcgctaccacactggaaacaggcgtgcccagcagattttctggcagcggctctggcaccgactacaccctgacaatatccagcctccagcctgaggacttcgccacctactactgtcagcagagctggaacaccccttggacattcggccagggcaccaagctggaaatcaagagaggcggaggcggaagtggaggcggaggatctggcggcggaggctctcaagttcagcttcaacagcctggcgctgagctggtcaaacctggcgcttctgtgaagatgagctgcaaagccagcggctacgccttcagcagctactggatcaactggatgaagcagaaacccggccagggactcgaatggatcggccaaatctatcccggcgacggcgacaccaactacaacggcaagttcaagggcagagccacactgaccgccgatacctctagcagcacagcctacatgcagctgagcagcctgaccagcgaagatagcgccgtgtacttctgtgcccggtccatcacaacagtcgtgggctgcgctatggactattggggccagggaacaagcgtgaccgtgtctagtacgcgtgaggacctgaagaacgtgttcccacctgaggtggccgtgttcgagcctagcgaggccgagatcagccacacccagaaagccaccctcgtgtgcctggctaccggcttctaccccgaccatgtggaactgtcttggtgggtcaacggcaaagaggtgcacagcggcgtgtgtaccgacccccagccactgaaagaacagcccgccctgaacgacagccggtactgcctgagcagcagactgagagtgtccgccaccttctggcagaacccccggaaccacttcagatgccaggtgcagttctacggcctgagcgagaacgacgagtggacccaggacagagccaagcccgtgacccagatcgtgtctgccgaagcctggggcagagccgattgcggctttaccagcgagagctaccagcagggcgtgctgagcgccaccatcctgtacgagatcctgctgggcaaggccaccctgtacgccgtgctggtgtctgccctggtgctgatggctatggtcaagcggaaggacagccgggga

SEQ ID NO: 33712 - DNA, 1866 bp, synthetic construct
  source 1..1866: mol_type = other DNA
atggccttaccagtgaccgccttgctcctgccgctggccttgctgctccacgccgccaggccggacatccagatgacacagagccctagcagcctgtctgccagcgtgggagacagagtgaccatcacatgcaaggccagcgaccacatcaacaactggctggcctggtatcagcagaagcctggacaggcccctaagctgctgatctacggcgctaccacactggaaacaggcgtgcccagcagattttctggcagcggctctggcaccgactacaccctgacaatatccagcctccagcctgaggacttcgccacctactactgtcagcagagctggaacaccccttggacattcggccagggcaccaagctggaaatcaagagactcgaggacctgaagaacgtgttcccacctgaggtggccgtgttcgagcctagcgaggccgagatcagccacacccagaaagccaccctcgtgtgcctggctaccggcttctaccccgaccatgtggaactgtcttggtgggtcaacggcaaagaggtgcacagcggcgtgtctaccgacccccagccactgaaagaacagcccgccctgaacgacagccggtactgcctgagcagcagactgagagtgtccgccaccttctggcagaacccccggaaccacttcagatgccaggtgcagttctacggcctgagcgagaacgacgagtggacccaggacagagccaagcccgtgacccagatcgtgtctgccgaagcctggggcagagccgattgcggctttaccagcgagagctaccagcagggcgtgctgagcgccaccatcctgtacgagatcctgctgggcaaggccaccctgtacgccgtgctggtgtctgccctggtgctgatggctatggtcaagcggaaggacagccggggaagggccaagcgatctggatctggagcaacaaacttctcactactcaaacaagcaggtgacgtggaggagaatcccgggcctactagtatggactggatttggcgcatccttttccttgtcggcgctgctaccggcgcgcattccttcgaacaagttcagcttcaacagcctggcgctgagctggtcaaacctggcgcttctgtgaagatgagctgcaaagccagcggctacgccttcagcagctactggatcaactggatgaagcagaaacccggccagggactcgaatggatcggccaaatctatcccggcgacggcgacaccaactacaacggcaagttcaagggcagagccacactgaccgccgatacctctagcagcacagcctacatgcagctgagcagcctgaccagcgaagatagcgccgtgtacttctgtgcccggtccatcacaacagtcgtgggctgcgctatggactattggggccagggaacaagcgtgaccgtgtctagtacgcgtatccagaaccctgatcctgccgtgtaccagctgcgggatagcaagagcagcgacaagagcgtgtgtctgttcaccgacttcgacagccagaccaacgtgtcccagagcaaggactccgacgtgtacatcaccgataagaccgtgctggacatgcggagcatggacttcaagagcaactccgccgtggcctggtccaacaagtccgatttcgcctgcgccaacgccttcaacaacagcattatccccgaggacacattcttcccaagccccgagagcagctgcgacgtgaagctggtggaaaagagcttcgagacagacaccaacctgaacttccagaacctgagcgtgatcggcttcagaatcctgctgctgaaagtggccggctttaacctgctgatgaccctgcggctgtggtccagc

SEQ ID NO: 33713 - DNA, 1890 bp, synthetic construct
  source 1..1890: mol_type = other DNA
atggccttaccagtgaccgccttgctcctgccgctggccttgctgctccacgccgccaggccggacatccagatgacacagagccctagcagcctgtctgccagcgtgggagacagagtgaccatcacatgcaaggccagcgaccacatcaacaactggctggcctggtatcagcagaagcctggacaggcccctaagctgctgatctacggcgctaccacactggaaacaggcgtgcccagcagattttctggcagcggctctggcaccgactacaccctgacaatatccagcctccagcctgaggacttcgccacctactactgtcagcagagctggaacaccccttggacattcggccagggcaccaagctggaaatcaagagactcgaggacaagcagctggacgccgacgtgtcccccaagcctaccatcttcctgccctctatcgccgagacaaagctccagaaggccggcacctacctgtgcctgctggaaaagttcttcccagatgtgattaagatccactggcaggaaaagaagtccaacaccatcctgggcagccaggaaggcaacaccatgaagaccaacgacacctacatgaagttcagctggctgaccgtgcccgagaagtccctggacaaagaacacagatgcatcgtgcggcacgaaaacaacaagaacggcgtggaccaggaaatcatcttcccacccatcaagaccgatgtgattacaatggaccccaaggacaactgctccaaggacgccaacgataccctgctgctccagctgaccaacaccagcgcctactacatgtacttgttgctgctgctgaagtccgtggtgtacttcgccatcatcacatgctgcctgctgcggagaaccgccttctgctgcaacggcgagaagtctagggccaagcgatctggatctggagcaacaaacttctcactactcaaacaagcaggtgacgtggaggagaatcccgggcctactagtatggactggatttggcgcatccttttccttgtcggcgctgctaccggcgcgcattccttcgaacaagttcagcttcaacagcctggcgctgagctggtcaaacctggcgcttctgtgaagatgagctgcaaagccagcggctacgccttcagcagctactggatcaactggatgaagcagaaacccggccagggactcgaatggatcggccaaatctatcccggcgacggcgacaccaactacaacggcaagttcaagggcagagccacactgaccgccgatacctctagcagcacagcctacatgcagctgagcagcctgaccagcgaagatagcgccgtgtacttctgtgcccggtccatcacaacagtcgtgggctgcgctatggactattggggccagggaacaagcgtgaccgtgtctagtacgcgtagccagcctcacaccaagcccagcgtgttcgtgatgaagaacggcaccaacgtggcctgcctcgtgaaagagttctaccccaaggacatcaggatcaacctggtgtccagcaagaagatcaccgagttcgaccccgccatcgtgatctcccccagcggcaagtacaacgccgtgaagctggggaagtacgaggacagcaacagcgtgacctgctccgtgcagcacgacaacaagaccgtgcacagcaccgactttgaagtgaaaaccgactccaccgaccacgtgaagcccaaagagacagagaacaccaagcagcccagcaagagctgccacaagcccaaggccatcgtgcacaccgagaaagtgaacatgatgagcctgaccgtgctgggcctgcggatgctgttcgccaaaaccgtggccgtgaacttcctgctgaccgccaagctgttcttcctc

SEQ ID NO: 33714 - DNA, 1890 bp, synthetic construct; identical to SEQ ID NO: 3262
  source 1..1890: mol_type = other DNA

SEQ ID NO: 33715 - DNA, 1935 bp, synthetic construct
  source 1..1935: mol_type = other DNA
atggccttaccagtgaccgccttgctcctgccgctggccttgctgctccacgccgccaggccgctcgaggacaagcagctggacgccgacgtgtcccccaagcctaccatcttcctgccctctatcgccgagacaaagctccagaaggccggcacctacctgtgcctgctggaaaagttcttcccagatgtgattaagatccactggcaggaaaagaagtccaacaccatcctgggcagccaggaaggcaacaccatgaagaccaacgacacctacatgaagttcagctggctgaccgtgcccgagaagtccctggacaaagaacacagatgcatcgtgcggcacgaaaacaacaagaacggcgtggaccaggaaatcatcttcccacccatcaagaccgatgtgattacaatggaccccaaggacaactgctccaaggacgccaacgataccctgctgctccagctgaccaacaccagcgcctactacatgtacttgttgctgctgctgaagtccgtggtgtacttcgccatcatcacatgctgcctgctgcggagaaccgccttctgctgcaacggcgagaagtctagggccaagcgatctggatctggagcaacaaacttctcactactcaaacaagcaggtgacgtggaggagaatcccgggcctactagcatggccttaccagtgaccgccttgctcctgccgctggccttgctgctccacgccgccaggccggacatccagatgacacagagccctagcagcctgtctgccagcgtgggagacagagtgaccatcacatgcaaggccagcgaccacatcaacaactggctggcctggtatcagcagaagcctggacaggcccctaagctgctgatctacggcgctaccacactggaaacaggcgtgcccagcagattttctggcagcggctctggcaccgactacaccctgacaatatccagcctccagcctgaggacttcgccacctactactgtcagcagagctggaacaccccttggacattcggccagggcaccaagctggaaatcaagagaggcggaggcggaagtggaggcggaggatctggcggcggaggctctcaagttcagcttcaacagcctggcgctgagctggtcaaacctggcgcttctgtgaagatgagctgcaaagccagcggctacgccttcagcagctactggatcaactggatgaagcagaaacccggccagggactcgaatggatcggccaaatctatcccggcgacggcgacaccaactacaacggcaagttcaagggcagagccacactgaccgccgatacctctagcagcacagcctacatgcagctgagcagcctgaccagcgaagatagcgccgtgtacttctgtgcccggtccatcacaacagtcgtgggctgcgctatggactattggggccagggaacaagcgtgaccgtgtctagtacgcgtagccagcctcacaccaagcccagcgtgttcgtgatgaagaacggcaccaacgtggcctgcctcgtgaaagagttctaccccaaggacatcaggatcaacctggtgtccagcaagaagatcaccgagttcgaccccgccatcgtgatctcccccagcggcaagtacaacgccgtgaagctggggaagtacgaggacagcaacagcgtgacctgctccgtgcagcacgacaacaagaccgtgcacagcaccgactttgaagtgaaaaccgactccaccgaccacgtgaagcccaaagagacagagaacaccaagcagcccagcaagagctgccacaagcccaaggccatcgtgcacaccgagaaagtgaacatgatgagcctgaccgtgctgggcctgcggatgctgttcgccaaaaccgtggccgtgaacttcctgctgaccgccaagctgttcttcctc

SEQ ID NO: 33716 - DNA, 2397 bp, synthetic construct
  source 1..2397: mol_type = other DNA
atggccttaccagtgaccgccttgctcctgccgctggccttgctgctccacgccgccaggccggacatccagatgacacagagccctagcagcctgtctgccagcgtgggagacagagtgaccatcacatgcaaggccagcgaccacatcaacaactggctggcctggtatcagcagaagcctggacaggcccctaagctgctgatctacggcgctaccacactggaaacaggcgtgcccagcagattttctggcagcggctctggcaccgactacaccctgacaatatccagcctccagcctgaggacttcgccacctactactgtcagcagagctggaacaccccttggacattcggccagggcaccaagctggaaatcaagagaggacagcctaaggccaatcctaccgtgacactgttccctccaagcagcgaagaactccaggccaacaaggccacacttgtgtgcctgatctccgacttctaccctggggctgtgacagtggcttggaaggccgatggatctcctgtgaaagccggcgtggaaaccaccaagccatccaagcagagcaacaacaaatacgccgccagctcctacctgagcctgacacctgagcagtggaagtcccacagatcctacagctgccaagtgacccacgaaggcagcaccgtggaaaagacagtggcccctacagagtgcagcggatcccagagcttcggcctgctggaccccaagctgtgctacctgctggatggcatcctgttcatctacggcgtgatcctgaccgccctgttcctgagagtgaagttcagcagaagcgccgacgcccctgcctaccagcagggacagaaccaactgtacaacgagctgaacctgggcagacgggaagagtacgacgtgctggacaagcggagaggcagggaccctgagatgggcggaaagccccagcggagaaagaacccccaggaaggactgtataacgaactccagaaagacaagatggccgaagcctacagcgagatcggcatgaagggcgagcggagaagaggcaagggccacgatggcctgtaccagggcctgagcaccgccaccaaggacacctatgacgccctgcacatgcaggccctgcctccaagaagggccaagcgatctggatctggagcaacaaacttctcactactcaaacaagcaggtgacgtggaggagaatcccgggcctactagtatggactggatttggcgcatccttttccttgtcggcgctgctaccggcgcgcattccttcgaacaagttcagcttcaacagcctggcgctgagctggtcaaacctggcgcttctgtgaagatgagctgcaaagccagcggctacgccttcagcagctactggatcaactggatgaagcagaaacccggccagggactcgaatggatcggccaaatctatcccggcgacggcgacaccaactacaacggcaagttcaagggcagagccacactgaccgccgatacctctagcagcacagcctacatgcagctgagcagcctgaccagcgaagatagcgccgtgtacttctgtgcccggtccatcacaacagtcgtgggctgcgctatggactattggggccagggaacaagcgtgaccgtgtctagtgcctctacaaagggaccctccgtgtttcctctggctcccagcagcaagtctacaagcggaggaacagccgctctgggctgcctggtcaaggattactttcccgagcctgtgaccgtgtcctggaatagcggagcactgacaagcggcgtgcacacctttccagccgtgctgcaaagcagcggcctgtactctctgagcagcgtggtcacagtgcctagctctagcctgggcacccagacctacatctgcaatgtgaaccacaagcctagcaacaccaaggtggacaagagagtggaacccaagagctgtggtacccagagttttgggttgttggaccctaaattgtgctatctgttggacggaatcctgttcatttacggagtgatcctgaccgcattgttcctgcgggttaagttttccagatccgcagacgcacccgcttaccaacaagggcagaaccaactctacaatgaacttaatttggggcggagggaagagtacgacgttctggacaaaaggaggggacgagatcccgagatgggcggaaagcctcagcgaaggaagaatccgcaagaggggctttataacgaactccagaaagataaaatggcagaagcctatagtgagattgggatgaagggagaaaggaggaggggtaaaggtcacgatgggttgtaccaaggattgagcacagccactaaagatacctatgatgcgctccacatgcaggccctgccgccaaga

SEQ ID NO: 33717 - DNA, 2454 bp, synthetic construct; identical to SEQ ID NO: 3265
  source 1..2454: mol_type = other DNA

SEQ ID NO: 33718 - DNA, 2580 bp, synthetic construct
  source 1..2580: mol_type = other DNA
atggccttaccagtgaccgccttgctcctgccgctggccttgctgctccacgccgccaggccggacatccagatgacacagagccctagcagcctgtctgccagcgtgggagacagagtgaccatcacatgcaaggccagcgaccacatcaacaactggctggcctggtatcagcagaagcctggacaggcccctaagctgctgatctacggcgctaccacactggaaacaggcgtgcccagcagattttctggcagcggctctggcaccgactacaccctgacaatatccagcctccagcctgaggacttcgccacctactactgtcagcagagctggaacaccccttggacattcggccagggcaccaagctggaaatcaagagactcgaggaggacctgaagaacgtgttcccacctgaggtggccgtgttcgagcctagcgaggccgagatcagccacacccagaaagccaccctcgtgtgcctggctaccggcttctaccccgaccatgtggaactgtcttggtgggtcaacggcaaagaggtgcacagcggcgtgtctaccgacccccagccactgaaagaacagcccgccctgaacgacagccggtactgcctgagcagcagactgagagtgtccgccaccttctggcagaacccccggaaccacttcagatgccaggtgcagttctacggcctgagcgagaacgacgagtggacccaggacagagccaagcccgtgacccagatcgtgtctgccgaagcctggggcagagccgattgcggatcccagagcttcggcctgctggaccccaagctgtgctacctgctggatggcatcctgttcatctacggcgtgatcctgaccgccctgttcctgagagtgaagttcagcagaagcgccgacgcccctgcctaccagcagggacagaaccaactgtacaacgagctgaacctgggcagacgggaagagtacgacgtgctggacaagcggagaggcagggaccctgagatgggcggaaagccccagcggagaaagaacccccaggaaggactgtataacgaactccagaaagacaagatggccgaagcctacagcgagatcggcatgaagggcgagcggagaagaggcaagggccacgatggcctgtaccagggcctgagcaccgccaccaaggacacctatgacgccctgcacatgcaggccctgcctccaagaagggccaagcgatctggatctggagcaacaaacttctcactactcaaacaagcaggtgacgtggaggagaatcccgggcctactagtatggactggatttggcgcatccttttccttgtcggcgctgctaccggcgcgcattccttcgaacaagttcagcttcaacagcctggcgctgagctggtcaaacctggcgcttctgtgaagatgagctgcaaagccagcggctacgccttcagcagctactggatcaactggatgaagcagaaacccggccagggactcgaatggatcggccaaatctatcccggcgacggcgacaccaactacaacggcaagttcaagggcagagccacactgaccgccgatacctctagcagcacagcctacatgcagctgagcagcctgaccagcgaagatagcgccgtgtacttctgtgcccggtccatcacaacagtcgtgggctgcgctatggactattggggccagggaacaagcgtgaccgtgtctagtacgcgtatccagaaccctgatcctgccgtgtaccagctgcgggatagcaagagcagcgacaagagcgtgtgtctgttcaccgacttcgacagccagaccaacgtgtcccagagcaaggactccgacgtgtacatcaccgataagaccgtgctggacatgcggagcatggacttcaagagcaactccgccgtggcctggtccaacaagtccgatttcgcctgcgccaacgccttcaacaacagcattatccccgaggacacattcttcccaagccccgagagcagctgcggtacccagagttttgggttgttggaccctaaattgtgctatctgttggacggaatcctgttcatttacggagtgatcctgaccgcattgttcctgaggagcaagcggtcacggctgctccacagcgattacatgaatatgacaccacgaagaccgggtcctactcgcaaacactaccaaccctacgcacctccccgcgactttgcagcgtaccgatctcgggttaagttttccagatccgcagacgcacccgcttaccaacaagggcagaaccaactctacaatgaacttaatttggggcggagggaagagtacgacgttctggacaaaaggaggggacgagatcccgagatgggcggaaagcctcagcgaaggaagaatccgcaagaggggctttataacgaactccagaaagataaaatggcagaagcctatagtgagattgggatgaagggagaaaggaggaggggtaaaggtcacgatgggttgtaccaaggattgagcacagccactaaagatacctatgatgcgctccacatgcaggccctgccgccaaga

SEQ ID NO: 33719 - DNA, 2709 bp, synthetic construct
  source 1..2709: mol_type = other DNA
atggccttaccagtgaccgccttgctcctgccgctggccttgctgctccacgccgccaggccggacatccagatgacacagagccctagcagcctgtctgccagcgtgggagacagagtgaccatcacatgcaaggccagcgaccacatcaacaactggctggcctggtatcagcagaagcctggacaggcccctaagctgctgatctacggcgctaccacactggaaacaggcgtgcccagcagattttctggcagcggctctggcaccgactacaccctgacaatatccagcctccagcctgaggacttcgccacctactactgtcagcagagctggaacaccccttggacattcggccagggcaccaagctggaaatcaagagactcgaggaggacctgaagaacgtgttcccacctgaggtggccgtgttcgagcctagcgaggccgagatcagccacacccagaaagccaccctcgtgtgcctggctaccggcttctaccccgaccatgtggaactgtcttggtgggtcaacggcaaagaggtgcacagcggcgtgtctaccgacccccagccactgaaagaacagcccgccctgaacgacagccggtactgcctgagcagcagactgagagtgtccgccaccttctggcagaacccccggaaccacttcagatgccaggtgcagttctacggcctgagcgagaacgacgagtggacccaggacagagccaagcccgtgacccagatcgtgtctgccgaagcctggggcagagccgattgcggatcccagagcttcggcctgctggaccccaagctgtgctacctgctggatggcatcctgttcatctacggcgtgatcctgaccgccctgttcctgaaacggggcagaaagaaactcctgtatatattcaaacaaccatttatgagaccagtacaaactactcaagaggaagatggctgtagctgccgatttccagaagaagaagaaggaggatgtgaactgagagtgaagttcagcagaagcgccgacgcccctgcctaccagcagggacagaaccaactgtacaacgagctgaacctgggcagacgggaagagtacgacgtgctggacaagcggagaggcagggaccctgagatgggcggaaagccccagcggagaaagaacccccaggaaggactgtataacgaactccagaaagacaagatggccgaagcctacagcgagatcggcatgaagggcgagcggagaagaggcaagggccacgatggcctgtaccagggcctgagcaccgccaccaaggacacctatgacgccctgcacatgcaggccctgcctccaagaagggccaagcgatctggatctggagcaacaaacttctcactactcaaacaagcaggtgacgtggaggagaatcccgggcctactagtatggactggatttggcgcatccttttccttgtcggcgctgctaccggcgcgcattccttcgaacaagttcagcttcaacagcctggcgctgagctggtcaaacctggcgcttctgtgaagatgagctgcaaagccagcggctacgccttcagcagctactggatcaactggatgaagcagaaacccggccagggactcgaatggatcggccaaatctatcccggcgacggcgacaccaactacaacggcaagttcaagggcagagccacactgaccgccgatacctctagcagcacagcctacatgcagctgagcagcctgaccagcgaagatagcgccgtgtacttctgtgcccggtccatcacaacagtcgtgggctgcgctatggactattggggccagggaacaagcgtgaccgtgtctagtacgcgtatccagaaccctgatcctgccgtgtaccagctgcgggatagcaagagcagcgacaagagcgtgtgtctgttcaccgacttcgacagccagaccaacgtgtcccagagcaaggactccgacgtgtacatcaccgataagaccgtgctggacatgcggagcatggacttcaagagcaactccgccgtggcctggtccaacaagtccgatttcgcctgcgccaacgccttcaacaacagcattatccccgaggacacattcttcccaagccccgagagcagctgcggtacccagagttttgggttgttggaccctaaattgtgctatctgttggacggaatcctgttcatttacggagtgatcctgaccgcattgttcctgaagagaggccggaagaagctgctgtacatcttcaagcagcctttcatgcggcccgtgcagaccacccaggaagaggacggctgctcctgccggttccccgaggaagaagaaggcggctgcgagctgcgggttaagttttccagatccgcagacgcacccgcttaccaacaagggcagaaccaactctacaatgaacttaatttggggcggagggaagagtacgacgttctggacaaaaggaggggacgagatcccgagatgggcggaaagcctcagcgaaggaagaatccgcaagaggggctttataacgaactccagaaagataaaatggcagaagcctatagtgagattgggatgaagggagaaaggaggaggggtaaaggtcacgatgggttgtaccaaggattgagcacagccactaaagatacctatgatgcgctccacatgcaggccctgccgccaaga

SEQ ID NO: 33720 - DNA, 1770 bp, synthetic construct
  source 1..1770: mol_type = other DNA
atggccttaccagtgaccgccttgctcctgccgctggccttgctgctccacgccgccaggccggacatccagatgacacagagccctagcagcctgtctgccagcgtgggagacagagtgaccatcacatgcaaggccagcgaccacatcaacaactggctggcctggtatcagcagaagcctggacaggcccctaagctgctgatctacggcgctaccacactggaaacaggcgtgcccagcagattttctggcagcggctctggcaccgactacaccctgacaatatccagcctccagcctgaggacttcgccacctactactgtcagcagagctggaacaccccttggacattcggccagggcaccaagctggaaatcaagagactcgagcagagcttcggcctgctggaccccaagctgtgctacctgctggatggcatcctgttcatctacggcgtgatcctgaccgccctgttcctgagagtgaagttcagcagaagcgccgacgcccctgcctaccagcagggacagaaccaactgtacaacgagctgaacctgggcagacgggaagagtacgacgtgctggacaagcggagaggcagggaccctgagatgggcggaaagccccagcggagaaagaacccccaggaaggactgtataacgaactccagaaagacaagatggccgaagcctacagcgagatcggcatgaagggcgagcggagaagaggcaagggccacgatggcctgtaccagggcctgagcaccgccaccaaggacacctatgacgccctgcacatgcaggccctgcctccaagaagggccaagcgatctggatctggagcaacaaacttctcactactcaaacaagcaggtgacgtggaggagaatcccgggcctactagtatggactggatttggcgcatccttttccttgtcggcgctgctaccggcgcgcattccttcgaacaagttcagcttcaacagcctggcgctgagctggtcaaacctggcgcttctgtgaagatgagctgcaaagccagcggctacgccttcagcagctactggatcaactggatgaagcagaaacccggccagggactcgaatggatcggccaaatctatcccggcgacggcgacaccaactacaacggcaagttcaagggcagagccacactgaccgccgatacctctagcagcacagcctacatgcagctgagcagcctgaccagcgaagatagcgccgtgtacttctgtgcccggtccatcacaacagtcgtgggctgcgctatggactattggggccagggaacaagcgtgaccgtgtctagtacgcgtcagagttttgggttgttggaccctaaattgtgctatctgttggacggaatcctgttcatttacggagtgatcctgaccgcattgttcctgcgggttaagttttccagatccgcagacgcacccgcttaccaacaagggcagaaccaactctacaatgaacttaatttggggcggagggaagagtacgacgttctggacaaaaggaggggacgagatcccgagatgggcggaaagcctcagcgaaggaagaatccgcaagaggggctttataacgaactccagaaagataaaatggcagaagcctatagtgagattgggatgaagggagaaaggaggaggggtaaaggtcacgatgggttgtaccaaggattgagcacagccactaaagatacctatgatgcgctccacatgcaggccctgccgccaaga

SEQ ID NO: 33721 - DNA, 1944 bp, synthetic construct; identical to SEQ ID NO: 3272
  source 1..1944: mol_type = other DNA

SEQ ID NO: 33722 - DNA, 1878 bp, synthetic construct; identical to SEQ ID NO: 3273
  source 1..1878: mol_type = other DNA

SEQ ID NO: 33723 - DNA, 1878 bp, synthetic construct; identical to SEQ ID NO: 3274
  source 1..1878: mol_type = other DNA

SEQ ID NO: 33724 - DNA, 1356 bp, synthetic construct; identical to SEQ ID NO: 3275
  source 1..1356: mol_type = other DNA

SEQ ID NO: 33725 - DNA, 1251 bp, synthetic construct; identical to SEQ ID NO: 3276
  source 1..1251: mol_type = other DNA

SEQ ID NO: 33726 - DNA, 1281 bp, synthetic construct; identical to SEQ ID NO: 3277
  source 1..1281: mol_type = other DNA

SEQ ID NO: 33727 - DNA, 1230 bp, synthetic construct; identical to SEQ ID NO: 3278
  source 1..1230: mol_type = other DNA

SEQ ID NO: 33728 - DNA, 1515 bp, synthetic construct; identical to SEQ ID NO: 3283
  source 1..1515: mol_type = other DNA

SEQ ID NO: 33729 - DNA, 1440 bp, synthetic construct; identical to SEQ ID NO: 1495
  source 1..1440: mol_type = other DNA

SEQ ID NO: 33730 - DNA, 1443 bp, synthetic construct; identical to SEQ ID NO: 1214
  source 1..1443: mol_type = other DNA

SEQ ID NO: 33731 - DNA, 2175 bp, synthetic construct
  source 1..2175: mol_type = other DNA
atggccttaccagtgaccgccttgctcctgccgctggccttgctgctccacgccgccaggccggacatccagatgacacagagccctagcagcctgtctgccagcgtgggagacagagtgaccatcacatgcaaggccagcgaccacatcaacaactggctggcctggtatcagcagaagcctggacaggcccctaagctgctgatctacggcgctaccacactggaaacaggcgtgcccagcagattttctggcagcggctctggcaccgactacaccctgacaatatccagcctccagcctgaggacttcgccacctactactgtcagcagagctggaacaccccttggacattcggccagggcaccaagctggaaatcaagagactcgagggacagcctaaggccaatcctaccgtgacactgttccctccaagcagcgaagaactccaggccaacaaggccacacttgtgtgcctgatctccgacttctaccctggggctgtgacagtggcttggaaggccgatggatctcctgtgaaagccggcgtggaaaccaccaagccatccaagcagagcaacaacaaatacgccgccagctcctacctgagcctgacacctgagcagtggaagtcccacagatcctacagctgccaagtgacccacgaaggcagcaccgtggaaaagacagtggcccctacagagtgcagcggatcccagagcttcggcctgctggaccccaagctgtgctacctgctggatggcatcctgttcatctacggcgtgatcctgaccgccctgttcctgagagtgaagttcagcagaagcgccgacgcccctgcctaccagcagggacagaaccaactgtacaacgagctgaacctgggcagacgggaagagtacgacgtgctggacaagcggagaggcagggaccctgagatgggcggaaagccccagcggagaaagaacccccaggaaggactgtataacgaactccagaaagacaagatggccgaagcctacagcgagatcggcatgaagggcgagcggagaagaggcaagggccacgatggcctgtaccagggcctgagcaccgccaccaaggacacctatgacgccctgcacatgcaggccctgcctccaagaagggccaagcgatctggatctggagcaacaaacttctcactactcaaacaagcaggtgacgtggaggagaatcccgggcctactagtatggactggatttggcgcatccttttccttgtcggcgctgctaccggcgcgcattccttcgaacaagttcagcttcaacagcctggcgctgagctggtcaaacctggcgcttctgtgaagatgagctgcaaagccagcggctacgccttcagcagctactggatcaactggatgaagcagaaacccggccagggactcgaatggatcggccaaatctatcccggcgacggcgacaccaactacaacggcaagttcaagggcagagccacactgaccgccgatacctctagcagcacagcctacatgcagctgagcagcctgaccagcgaagatagcgccgtgtacttctgtgcccggtccatcacaacagtcgtgggctgcgctatggactattggggccagggaacaagcgtgaccgtgtctagtacgcgtgcctctacaaagggaccctccgtgtttcctctggctcccagcagcaagtctacaagcggaggaacagccgctctgggctgcctggtcaaggattactttcccgagcctgtgaccgtgtcctggaatagcggagcactgacaagcggcgtgcacacctttccagccgtgctgcaaagcagcggcctgtactctctgagcagcgtggtcacagtgcctagctctagcctgggcacccagacctacatctgcaatgtgaaccacaagcctagcaacaccaaggtggacaagagagtggaacccaagagctgtggtaccatcactcaaggtttggcagtgtcaaccatctcatcattctttccacctggctaccaagtgtccttctgcctggtcatggtgctgctgttcgccgtggataccggcctgtacttcagcgtcaagaccaacatccggtccagcaccagagactggaaggaccacaagttcaagtggcggaaggaccctcaggacaag

SEQ ID NO: 33732 - DNA, 2220 bp, synthetic construct
  source 1..2220: mol_type = other DNA
atggccttaccagtgaccgccttgctcctgccgctggccttgctgctccacgccgccaggccggacatccagatgacacagagccctagcagcctgtctgccagcgtgggagacagagtgaccatcacatgcaaggccagcgaccacatcaacaactggctggcctggtatcagcagaagcctggacaggcccctaagctgctgatctacggcgctaccacactggaaacaggcgtgcccagcagattttctggcagcggctctggcaccgactacaccctgacaatatccagcctccagcctgaggacttcgccacctactactgtcagcagagctggaacaccccttggacattcggccagggcaccaagctggaaatcaagagactcgaggacctgaagaacgtgttcccacctgaggtggccgtgttcgagcctagcgaggccgagatcagccacacccagaaagccaccctcgtgtgcctggctaccggcttctaccccgaccatgtggaactgtcttggtgggtcaacggcaaagaggtgcacagcggcgtgtctaccgacccccagccactgaaagaacagcccgccctgaacgacagccggtactgcctgagcagcagactgagagtgtccgccaccttctggcagaacccccggaaccacttcagatgccaggtgcagttctacggcctgagcgagaacgacgagtggacccaggacagagccaagcccgtgacccagatcgtgtctgccgaagcctggggcagagccgattgcggatcccagagcttcggcctgctggaccccaagctgtgctacctgctggatggcatcctgttcatctacggcgtgatcctgaccgccctgttcctgagagtgaagttcagcagaagcgccgacgcccctgcctaccagcagggacagaaccaactgtacaacgagctgaacctgggcagacgggaagagtacgacgtgctggacaagcggagaggcagggaccctgagatgggcggaaagccccagcggagaaagaacccccaggaaggactgtataacgaactccagaaagacaagatggccgaagcctacagcgagatcggcatgaagggcgagcggagaagaggcaagggccacgatggcctgtaccagggcctgagcaccgccaccaaggacacctatgacgccctgcacatgcaggccctgcctccaagaagggccaagcgatctggatctggagcaacaaacttctcactactcaaacaagcaggtgacgtggaggagaatcccgggcctactagtatggactggatttggcgcatccttttccttgtcggcgctgctaccggcgcgcattccttcgaacaagttcagcttcaacagcctggcgctgagctggtcaaacctggcgcttctgtgaagatgagctgcaaagccagcggctacgccttcagcagctactggatcaactggatgaagcagaaacccggccagggactcgaatggatcggccaaatctatcccggcgacggcgacaccaactacaacggcaagttcaagggcagagccacactgaccgccgatacctctagcagcacagcctacatgcagctgagcagcctgaccagcgaagatagcgccgtgtacttctgtgcccggtccatcacaacagtcgtgggctgcgctatggactattggggccagggaacaagcgtgaccgtgtctagtacgcgtatccagaaccctgatcctgccgtgtaccagctgcgggatagcaagagcagcgacaagagcgtgtgtctgttcaccgacttcgacagccagaccaacgtgtcccagagcaaggactccgacgtgtacatcaccgataagaccgtgctggacatgcggagcatggacttcaagagcaactccgccgtggcctggtccaacaagtccgatttcgcctgcgccaacgccttcaacaacagcattatccccgaggacacattcttcccaagccccgagagcagctgcggtaccatcactcaaggtttggcagtgtcaaccatctcatcattctttccacctggctaccaagtgtccttctgcctggtcatggtgctgctgttcgccgtggataccggcctgtacttcagcgtcaagaccaacatccggtccagcaccagagactggaaggaccacaagttcaagtggcggaaggaccctcaggacaag

SEQ ID NO: 33733 - DNA, 2145 bp, synthetic construct
  source 1..2145: mol_type = other DNA
atggccttaccagtgaccgccttgctcctgccgctggccttgctgctccacgccgccaggccggacatccagatgacacagagccctagcagcctgtctgccagcgtgggagacagagtgaccatcacatgcaaggccagcgaccacatcaacaactggctggcctggtatcagcagaagcctggacaggcccctaagctgctgatctacggcgctaccacactggaaacaggcgtgcccagcagattttctggcagcggctctggcaccgactacaccctgacaatatccagcctccagcctgaggacttcgccacctactactgtcagcagagctggaacaccccttggacattcggccagggcaccaagctggaaatcaagagactcgaggacctgaagaacgtgttcccacctgaggtggccgtgttcgagcctagcgaggccgagatcagccacacccagaaagccaccctcgtgtgcctggctaccggcttctaccccgaccatgtggaactgtcttggtgggtcaacggcaaagaggtgcacagcggcgtgtctaccgacccccagccactgaaagaacagcccgccctgaacgacagccggtactgcctgagcagcagactgagagtgtccgccaccttctggcagaacccccggaaccacttcagatgccaggtgcagttctacggcctgagcgagaacgacgagtggacccaggacagagccaagcccgtgacccagatcgtgtctgccgaagcctggggcagagccgattgcggatcccagagcttcggcctgctggaccccaagctgtgctacctgctggatggcatcctgttcatctacggcgtgatcctgaccgccctgttcctgagagtgaagttcagcagaagcgccgacgcccctgcctaccagcagggacagaaccaactgtacaacgagctgaacctgggcagacgggaagagtacgacgtgctggacaagcggagaggcagggaccctgagatgggcggaaagccccagcggagaaagaacccccaggaaggactgtataacgaactccagaaagacaagatggccgaagcctacagcgagatcggcatgaagggcgagcggagaagaggcaagggccacgatggcctgtaccagggcctgagcaccgccaccaaggacacctatgacgccctgcacatgcaggccctgcctccaagaagggccaagcgatctggatctggagcaacaaacttctcactactcaaacaagcaggtgacgtggaggagaatcccgggcctactagtatggactggatttggcgcatccttttccttgtcggcgctgctaccggcgcgcattccttcgaacaagttcagcttcaacagcctggcgctgagctggtcaaacctggcgcttctgtgaagatgagctgcaaagccagcggctacgccttcagcagctactggatcaactggatgaagcagaaacccggccagggactcgaatggatcggccaaatctatcccggcgacggcgacaccaactacaacggcaagttcaagggcagagccacactgaccgccgatacctctagcagcacagcctacatgcagctgagcagcctgaccagcgaagatagcgccgtgtacttctgtgcccggtccatcacaacagtcgtgggctgcgctatggactattggggccagggaacaagcgtgaccgtgtctagtacgcgtatccagaaccctgatcctgccgtgtaccagctgcgggatagcaagagcagcgacaagagcgtgtgtctgttcaccgacttcgacagccagaccaacgtgtcccagagcaaggactccgacgtgtacatcaccgataagaccgtgctggacatgcggagcatggacttcaagagcaactccgccgtggcctggtccaacaagtccgatttcgcctgcgccaacgccttcaacaacagcattatccccgaggacacattcttcccaagccccgagagcagctgcggtaccatcactcaaggtttggcagtgtcaaccatctcatcattctttccacctggctaccaagtgtccttctgcctggtcatggtgctgctgttcgccgtggataccggcctgtacttcagcgtc

SEQ ID NO: 33734 - DNA, 2148 bp, synthetic construct
  source 1..2148: mol_type = other DNA
atggccttaccagtgaccgccttgctcctgccgctggccttgctgctccacgccgccaggccggacatccagatgacacagagccctagcagcctgtctgccagcgtgggagacagagtgaccatcacatgcaaggccagcgaccacatcaacaactggctggcctggtatcagcagaagcctggacaggcccctaagctgctgatctacggcgctaccacactggaaacaggcgtgcccagcagattttctggcagcggctctggcaccgactacaccctgacaatatccagcctccagcctgaggacttcgccacctactactgtcagcagagctggaacaccccttggacattcggccagggcaccaagctggaaatcaagagactcgaggacctgaagaacgtgttcccacctgaggtggccgtgttcgagcctagcgaggccgagatcagccacacccagaaagccaccctcgtgtgcctggctaccggcttctaccccgaccatgtggaactgtcttggtgggtcaacggcaaagaggtgcacagcggcgtgtctaccgacccccagccactgaaagaacagcccgccctgaacgacagccggtactgcctgagcagcagactgagagtgtccgccaccttctggcagaacccccggaaccacttcagatgccaggtgcagttctacggcctgagcgagaacgacgagtggacccaggacagagccaagcccgtgacccagatcgtgtctgccgaagcctggggcagagccgattgcggatcccagagcttcggcctgctggaccccaagctgtgctacctgctggatggcatcctgttcatctacggcgtgatcctgaccgccctgttcctgagagtgaagttcagcagaagcgccgacgcccctgcctaccagcagggacagaaccaactgtacaacgagctgaacctgggcagacgggaagagtacgacgtgctggacaagcggagaggcagggaccctgagatgggcggaaagccccagcggagaaagaacccccaggaaggactgtataacgaactccagaaagacaagatggccgaagcctacagcgagatcggcatgaagggcgagcggagaagaggcaagggccacgatggcctgtaccagggcctgagcaccgccaccaaggacacctatgacgccctgcacatgcaggccctgcctccaagaagggccaagcgatctggatctggagcaacaaacttctcactactcaaacaagcaggtgacgtggaggagaatcccgggcctactagtatggactggatttggcgcatccttttccttgtcggcgctgctaccggcgcgcattccttcgaacaagttcagcttcaacagcctggcgctgagctggtcaaacctggcgcttctgtgaagatgagctgcaaagccagcggctacgccttcagcagctactggatcaactggatgaagcagaaacccggccagggactcgaatggatcggccaaatctatcccggcgacggcgacaccaactacaacggcaagttcaagggcagagccacactgaccgccgatacctctagcagcacagcctacatgcagctgagcagcctgaccagcgaagatagcgccgtgtacttctgtgcccggtccatcacaacagtcgtgggctgcgctatggactattggggccagggaacaagcgtgaccgtgtctagtacgcgtatccagaaccctgatcctgccgtgtaccagctgcgggatagcaagagcagcgacaagagcgtgtgtctgttcaccgacttcgacagccagaccaacgtgtcccagagcaaggactccgacgtgtacatcaccgataagaccgtgctggacatgcggagcatggacttcaagagcaactccgccgtggcctggtccaacaagtccgatttcgcctgcgccaacgccttcaacaacagcattatccccgaggacacattcttcccaagccccgagagcagctgcggtaccatcactcaaggtttggcagtgtcaaccatctcatcattctttccacctggctaccaagtgtccttctgcctggtcatggtgctgctgttcgccgtggataccggcctgtacttcagcgtcaag

SEQ ID NO: 33735 - DNA, 2151 bp, synthetic construct
  source 1..2151: mol_type = other DNA
atggccttaccagtgaccgccttgctcctgccgctggccttgctgctccacgccgccaggccggacatccagatgacacagagccctagcagcctgtctgccagcgtgggagacagagtgaccatcacatgcaaggccagcgaccacatcaacaactggctggcctggtatcagcagaagcctggacaggcccctaagctgctgatctacggcgctaccacactggaaacaggcgtgcccagcagattttctggcagcggctctggcaccgactacaccctgacaatatccagcctccagcctgaggacttcgccacctactactgtcagcagagctggaacaccccttggacattcggccagggcaccaagctggaaatcaagagactcgaggacctgaagaacgtgttcccacctgaggtggccgtgttcgagcctagcgaggccgagatcagccacacccagaaagccaccctcgtgtgcctggctaccggcttctaccccgaccatgtggaactgtcttggtgggtcaacggcaaagaggtgcacagcggcgtgtctaccgacccccagccactgaaagaacagcccgccctgaacgacagccggtactgcctgagcagcagactgagagtgtccgccaccttctggcagaacccccggaaccacttcagatgccaggtgcagttctacggcctgagcgagaacgacgagtggacccaggacagagccaagcccgtgacccagatcgtgtctgccgaagcctggggcagagccgattgcggatcccagagcttcggcctgctggaccccaagctgtgctacctgctggatggcatcctgttcatctacggcgtgatcctgaccgccctgttcctgagagtgaagttcagcagaagcgccgacgcccctgcctaccagcagggacagaaccaactgtacaacgagctgaacctgggcagacgggaagagtacgacgtgctggacaagcggagaggcagggaccctgagatgggcggaaagccccagcggagaaagaacccccaggaaggactgtataacgaactccagaaagacaagatggccgaagcctacagcgagatcggcatgaagggcgagcggagaagaggcaagggccacgatggcctgtaccagggcctgagcaccgccaccaaggacacctatgacgccctgcacatgcaggccctgcctccaagaagggccaagcgatctggatctggagcaacaaacttctcactactcaaacaagcaggtgacgtggaggagaatcccgggcctactagtatggactggatttggcgcatccttttccttgtcggcgctgctaccggcgcgcattccttcgaacaagttcagcttcaacagcctggcgctgagctggtcaaacctggcgcttctgtgaagatgagctgcaaagccagcggctacgccttcagcagctactggatcaactggatgaagcagaaacccggccagggactcgaatggatcggccaaatctatcccggcgacggcgacaccaactacaacggcaagttcaagggcagagccacactgaccgccgatacctctagcagcacagcctacatgcagctgagcagcctgaccagcgaagatagcgccgtgtacttctgtgcccggtccatcacaacagtcgtgggctgcgctatggactattggggccagggaacaagcgtgaccgtgtctagtacgcgtatccagaaccctgatcctgccgtgtaccagctgcgggatagcaagagcagcgacaagagcgtgtgtctgttcaccgacttcgacagccagaccaacgtgtcccagagcaaggactccgacgtgtacatcaccgataagaccgtgctggacatgcggagcatggacttcaagagcaactccgccgtggcctggtccaacaagtccgatttcgcctgcgccaacgccttcaacaacagcattatccccgaggacacattcttcccaagccccgagagcagctgcggtaccatcactcaaggtttggcagtgtcaaccatctcatcattctttccacctggctaccaagtgtccttctgcctggtcatggtgctgctgttcgccgtggataccggcctgtacttcagcgtcaagacc

SEQ ID NO: 33736 - DNA, 1962 bp, synthetic construct; identical to SEQ ID NO: 1001
  source 1..1962: mol_type = other DNA

SEQ ID NO: 33737 - DNA, 1869 bp, synthetic construct
  source 1..1869: mol_type = other DNA
atggccttaccagtgaccgccttgctcctgccgctggccttgctgctccacgccgccaggccggacatccagatgacacagagccctagcagcctgtctgccagcgtgggagacagagtgaccatcacatgcaaggccagcgaccacatcaacaactggctggcctggtatcagcagaagcctggacaggcccctaagctgctgatctacggcgctaccacactggaaacaggcgtgcccagcagattttctggcagcggctctggcaccgactacaccctgacaatatccagcctccagcctgaggacttcgccacctactactgtcagcagagctggaacaccccttggacattcggccagggcaccaagctggaaatcaagagactcgaggacctgaagaacgtgttcccacctgaggtggccgtgttcgagcctagcgaggccgagatcagccacacccagaaagccaccctcgtgtgcctggctaccggcttctaccccgaccatgtggaactgtcttggtgggtcaacggcaaagaggtgcacagcggcgtgtgtaccgacccccagccactgaaagaacagcccgccctgaacgacagccggtactgcctgagcagcagactgagagtgtccgccaccttctggcagaacccccggaaccacttcagatgccaggtgcagttctacggcctgagcgagaacgacgagtggacccaggacagagccaagcccgtgacccagatcgtgtctgccgaagcctggggcagagccgattgcggctttaccagcgagagctaccagcagggcgtgctgagcgcctactacatgtacttgttgctgctgctgaagtccgtggtgtacttcgccatcatcacatgctgcctgctgcggagaaccgccttctgctgcaacggcgagaagtctagggccaagcgatctggatctggagcaacaaacttctcactactcaaacaagcaggtgacgtggaggagaatcccgggcctactagtatggactggatttggcgcatccttttccttgtcggcgctgctaccggcgcgcattccttcgaacaagttcagcttcaacagcctggcgctgagctggtcaaacctggcgcttctgtgaagatgagctgcaaagccagcggctacgccttcagcagctactggatcaactggatgaagcagaaacccggccagggactcgaatggatcggccaaatctatcccggcgacggcgacaccaactacaacggcaagttcaagggcagagccacactgaccgccgatacctctagcagcacagcctacatgcagctgagcagcctgaccagcgaagatagcgccgtgtacttctgtgcccggtccatcacaacagtcgtgggctgcgctatggactattggggccagggaacaagcgtgaccgtgtctagtacgcgtatccagaaccctgatcctgccgtgtaccagctgcgggatagcaagagcagcgacaagagcgtgtgtctgttcaccgacttcgacagccagaccaacgtgtcccagagcaaggactccgacgtgtacatcaccgataagtgcgtgctggacatgcggagcatggacttcaagagcaactccgccgtggcctggtccaacaagtccgatttcgcctgcgccaacgccttcaacaacagcattatccccgaggacacattcttcccaagccccgagagcagctgcgacgtgaagctggtggaaaagagcttcgagacagacaccaacctgaacttccagaacctgagcgtgatcggcttcagaatcctgctgctgaaagtggccggctttaacctgctgatgaccctgcggctgtggtccagc

SEQ ID NO: 33738 - DNA, 1890 bp, synthetic construct; identical to SEQ ID NO: 32586
  source 1..1890: mol_type = other DNA

SEQ ID NO: 33739 - DNA, 1890 bp, synthetic construct; identical to SEQ ID NO: 32587
  source 1..1890: mol_type = other DNA

SEQ ID NO: 33740 - DNA, 1890 bp, synthetic construct; identical to SEQ ID NO: 32588
  source 1..1890: mol_type = other DNA

SEQ ID NO: 33741 - DNA, 1890 bp, synthetic construct; identical to SEQ ID NO: 32589
  source 1..1890: mol_type = other DNA

SEQ ID NO: 33742 - DNA, 1872 bp, synthetic construct; identical to SEQ ID NO: 32590
  source 1..1872: mol_type = other DNA

SEQ ID NO: 33743 - DNA, 1959 bp, synthetic construct; identical to SEQ ID NO: 32592
  source 1..1959: mol_type = other DNA

SEQ ID NO: 33744 - DNA, 1869 bp, synthetic construct; identical to SEQ ID NO: 1062
  source 1..1869: mol_type = other DNA

SEQ ID NO: 33745 - DNA, 1869 bp, synthetic construct; identical to SEQ ID NO: 1063
  source 1..1869: mol_type = other DNA

SEQ ID NO: 33746 - DNA, 1869 bp, synthetic construct; identical to SEQ ID NO: 1062
  source 1..1869: mol_type = other DNA

SEQ ID NO: 33747 - DNA, 1869 bp, synthetic construct; identical to SEQ ID NO: 1063
  source 1..1869: mol_type = other DNA

SEQ ID NO: 33748 - DNA, 1866 bp, synthetic construct; identical to SEQ ID NO: 4051
  source 1..1866: mol_type = other DNA

SEQ ID NO: 33749 - DNA, 1878 bp, synthetic construct
  source 1..1878: mol_type = other DNA
atggccttaccagtgaccgccttgctcctgccgctggccttgctgctccacgccgccaggccggacatccagatgacacagagccctagcagcctgtctgccagcgtgggagacagagtgaccatcacatgcaaggccagcgaccacatcaacaactggctggcctggtatcagcagaagcctggacaggcccctaagctgctgatctacggcgctaccacactggaaacaggcgtgcccagcagattttctggcagcggctctggcaccgactacaccctgacaatatccagcctccagcctgaggacttcgccacctactactgtcagcagagctggaacaccccttggacattcggccagggcaccaagctggaaatcaagagactcgaggccgacgtgtcccccaagcctaccatcttcctgccctctatcgccgagacaaagctccagaaggccggcacctacctgtgcctgctggaaaagttcttcccagatgtgattaagatccactggcaggaaaagaagtccaacaccatcctgggcagccaggaaggcaacaccatgaagaccaacgacacctacatgaagttcagctggctgaccgtgcccgagaagtccctggacaaagaacacagatgcatcgtgcggcacgaaaacaacaagaacggcgtggaccaggaaatcatcttcccacccatcaagaccgatgtgattacaatggaccccaaggacaactgctccaaggacgccaacgataccctgctgctccagctgaccaacaccagcgcctactacatgtacttgttgctgctgctgaagtccgtggtgtacttcgccatcatcacatgctgcctgctgcggagaaccgccttctgctgcaacggcgagaagtctagggccaagcgatctggatctggagcaacaaacttctcactactcaaacaagcaggtgacgtggaggagaatcccgggcctactagtatggactggatttggcgcatccttttccttgtcggcgctgctaccggcgcgcattccttcgaacaagttcagcttcaacagcctggcgctgagctggtcaaacctggcgcttctgtgaagatgagctgcaaagccagcggctacgccttcagcagctactggatcaactggatgaagcagaaacccggccagggactcgaatggatcggccaaatctatcccggcgacggcgacaccaactacaacggcaagttcaagggcagagccacactgaccgccgatacctctagcagcacagcctacatgcagctgagcagcctgaccagcgaagatagcgccgtgtacttctgtgcccggtccatcacaacagtcgtgggctgcgctatggactattggggccagggaacaagcgtgaccgtgtctagtacgcgtagccagcctcacaccaagcccagcgtgttcgtgatgaagaacggcaccaacgtggcctgcctcgtgaaagagttctaccccaaggacatcaggatcaacctggtgtccagcaagaagatcaccgagttcgaccccgccatcgtgatctcccccagcggcaagtacaacgccgtgaagctggggaagtatgaggacagcaacagcgtgacctgctccgtgcagcacgacaacaagaccgtgcacagcaccgactttgaagtgaaaaccgactccaccgaccacgtgaagcccaaagagacagagaacaccaagcagcccagcaagagctgccacaagcccaaggccatcgtgcacaccgagaaagtgaacatgatgagcctgaccgtgatcggcttcagaatcctgctgctgaaagtggccggctttaacctgctgatgaccctgcggctgtggtccagctaa

SEQ ID NO: 33750 - DNA, 1878 bp, synthetic construct
  source 1..1878: mol_type = other DNA
atggccttaccagtgaccgccttgctcctgccgctggccttgctgctccacgccgccaggccggacatccagatgacacagagccctagcagcctgtctgccagcgtgggagacagagtgaccatcacatgcaaggccagcgaccacatcaacaactggctggcctggtatcagcagaagcctggacaggcccctaagctgctgatctacggcgctaccacactggaaacaggcgtgcccagcagattttctggcagcggctctggcaccgactacaccctgacaatatccagcctccagcctgaggacttcgccacctactactgtcagcagagctggaacaccccttggacattcggccagggcaccaagctggaaatcaagagactcgaggccgacgtgtcccccaagcctaccatcttcctgccctctatcgccgagacaaagctccagaaggccggcacctacctgtgcctgctggaaaagttcttcccagatgtgattaagatccactggcaggaaaagaagtccaacaccatcctgggcagccaggaaggcaacaccatgaagaccaacgacacctacatgaagttcagctggctgaccgtgcccgagaagtccctggacaaagaacacagatgcatcgtgcggcacgaaaacaacaagaacggcgtggaccaggaaatcatcttcccacccatcaagaccgatgtgattacaatggaccccaaggacaactgctccaaggacgccaacgataccctgctgctccagctgaccaacaccagcgcctactacatgtacttgttgctgctgctgaagtccgtggtgtacttcgccatcatcacatgctgcctgctgcggagaaccgccttctgctgcaacggcgagaagtctagggccaagcgatctggatctggagcaacaaacttctcactactcaaacaagcaggtgacgtggaggagaatcccgggcctactagtatggactggatttggcgcatccttttccttgtcggcgctgctaccggcgcgcattccttcgaacaagttcagcttcaacagcctggcgctgagctggtcaaacctggcgcttctgtgaagatgagctgcaaagccagcggctacgccttcagcagctactggatcaactggatgaagcagaaacccggccagggactcgaatggatcggccaaatctatcccggcgacggcgacaccaactacaacggcaagttcaagggcagagccacactgaccgccgatacctctagcagcacagcctacatgcagctgagcagcctgaccagcgaagatagcgccgtgtacttctgtgcccggtccatcacaacagtcgtgggctgcgctatggactattggggccagggaacaagcgtgaccgtgtctagtacgcgtagccagcctcacaccaagcccagcgtgttcgtgatgaagaacggcaccaacgtggcctgcctcgtgaaagagttctaccccaaggacatcaggatcaacctggtgtccagcaagaagatcaccgagttcgaccccgccatcgtgatctcccccagcggcaagtacaacgccgtgaagctggggaagtacgaggacagcaacagcgtgacctgctccgtgcagcacgacaacaagaccgtgcacagcaccgactttgaagtgaaaaccgactccaccgaccacgtgaagcccaaagagacagagaacaccaagcagcccagcaagagctgccacaagcccaaggccatcgtgcacaccgagaaagtgaacatgatgagcctgaccgtgctgggcttcagaatcctgctgctgaaagtggccggctttaacctgctgatgaccctgcggctgtggtccagctaa

SEQ ID NO: 33751 - DNA, 1866 bp, synthetic construct; identical to SEQ ID NO: 4051
  source 1..1866: mol_type = other DNA

SEQ ID NO: 33752 - DNA, 1878 bp, synthetic construct; identical to SEQ ID NO: 4216
  source 1..1878: mol_type = other DNA

SEQ ID NO: 33753 - DNA, 2271 bp, synthetic construct; identical to SEQ ID NO: 4381
  source 1..2271: mol_type = other DNA

SEQ ID NO: 33754 - DNA, 2283 bp, synthetic construct; identical to SEQ ID NO: 4546
  source 1..2283: mol_type = other DNA

SEQ ID NO: 33755 - DNA, 2682 bp, synthetic construct; identical to SEQ ID NO: 4711
  source 1..2682: mol_type = other DNA

SEQ ID NO: 33756 - DNA, 2694 bp, synthetic construct; identical to SEQ ID NO: 4876
  source 1..2694: mol_type = other DNA

SEQ ID NO: 33757 - DNA, 2076 bp, synthetic construct; identical to SEQ ID NO: 4921
  source 1..2076: mol_type = other DNA

SEQ ID NO: 33758 - DNA, 2088 bp, synthetic construct; identical to SEQ ID NO: 4922
  source 1..2088: mol_type = other DNA

SEQ ID NO: 33759 - DNA, 2007 bp, synthetic construct; identical to SEQ ID NO: 4923
  source 1..2007: mol_type = other DNA

SEQ ID NO: 33760 - DNA, 2019 bp, synthetic construct; identical to SEQ ID NO: 4924
  source 1..2019: mol_type = other DNA

SEQ ID NO: 33761 - DNA, 2277 bp, synthetic construct; identical to SEQ ID NO: 4927
  source 1..2277: mol_type = other DNA

SEQ ID NO: 33762 - DNA, 2289 bp, synthetic construct; identical to SEQ ID NO: 4928
  source 1..2289: mol_type = other DNA

SEQ ID NO: 33763 - DNA, 2295 bp, synthetic construct; identical to SEQ ID NO: 4929
  source 1..2295: mol_type = other DNA

SEQ ID NO: 33764 - DNA, 2307 bp, synthetic construct; identical to SEQ ID NO: 4930
  source 1..2307: mol_type = other DNA

SEQ ID NO: 33765 - DNA, 2289 bp, synthetic construct; identical to SEQ ID NO: 4931
  source 1..2289: mol_type = other DNA

SEQ ID NO: 33766 - DNA, 2301 bp, synthetic construct; identical to SEQ ID NO: 4932
  source 1..2301: mol_type = other DNA

SEQ ID NO: 33767 - DNA, 2193 bp, synthetic construct; identical to SEQ ID NO: 4933
  source 1..2193: mol_type = other DNA

SEQ ID NO: 33768 - DNA, 2205 bp, synthetic construct; identical to SEQ ID NO: 4934
  source 1..2205: mol_type = other DNA

SEQ ID NO: 33769 - DNA, 2280 bp, synthetic construct; identical to SEQ ID NO: 4935
  source 1..2280: mol_type = other DNA

SEQ ID NO: 33770 - DNA, 2292 bp, synthetic construct; identical to SEQ ID NO: 4936
  source 1..2292: mol_type = other DNA

SEQ ID NO: 33771 - DNA, 3396 bp, synthetic construct; identical to SEQ ID NO: 4949
  source 1..3396: mol_type = other DNA

SEQ ID NO: 33772 - DNA, 2310 bp, synthetic construct; identical to SEQ ID NO: 4950
  source 1..2310: mol_type = other DNA

SEQ ID NO: 33773 - DNA, 2310 bp, synthetic construct; identical to SEQ ID NO: 4951
  source 1..2310: mol_type = other DNA

SEQ ID NO: 33774 - DNA, 2307 bp, synthetic construct; identical to SEQ ID NO: 4952
  source 1..2307: mol_type = other DNA

SEQ ID NO: 33775 - DNA, 2307 bp, synthetic construct; identical to SEQ ID NO: 4953
  source 1..2307: mol_type = other DNA

SEQ ID NO: 33776 - DNA, 2280 bp, synthetic construct; identical to SEQ ID NO: 4954
  source 1..2280: mol_type = other DNA

SEQ ID NO: 33777 - DNA, 2286 bp, synthetic construct; identical to SEQ ID NO: 4955
  source 1..2286: mol_type = other DNA

SEQ ID NO: 33778 - DNA, 2289 bp, synthetic construct; identical to SEQ ID NO: 4956
  source 1..2289: mol_type = other DNA

SEQ ID NO: 33779 - DNA, 2277 bp, synthetic construct; identical to SEQ ID NO: 4957
  source 1..2277: mol_type = other DNA

SEQ ID NO: 33780 - DNA, 2271 bp, synthetic construct; identical to SEQ ID NO: 4958
  source 1..2271: mol_type = other DNA

SEQ ID NO: 33781 - DNA, 3378 bp, synthetic construct; identical to SEQ ID NO: 4959
  source 1..3378: mol_type = other DNA

SEQ ID NO: 33782 - DNA, 3375 bp, synthetic construct; identical to SEQ ID NO: 4960
  source 1..3375: mol_type = other DNA

SEQ ID NO: 33783 - DNA, 2850 bp, synthetic construct; identical to SEQ ID NO: 4962
  source 1..2850: mol_type = other DNA

SEQ ID NO: 33784 - DNA, 2850 bp, synthetic construct; identical to SEQ ID NO: 4963
  source 1..2850: mol_type = other DNA

SEQ ID NO: 33785 - DNA, 3201 bp, synthetic construct; identical to SEQ ID NO: 4964
  source 1..3201: mol_type = other DNA

SEQ ID NO: 33786 - DNA, 2850 bp, synthetic construct; identical to SEQ ID NO: 4965
  source 1..2850: mol_type = other DNA

SEQ ID NO: 33787 - DNA, 3480 bp, synthetic construct; identical to SEQ ID NO: 4966
  source 1..3480: mol_type = other DNA

SEQ ID NO: 33788 - DNA, 1866 bp, synthetic construct; identical to SEQ ID NO: 5087
  source 1..1866: mol_type = other DNA

SEQ ID NO: 33789 - DNA, 1878 bp, synthetic construct; identical to SEQ ID NO: 5252
  source 1..1878: mol_type = other DNA

SEQ ID NO: 33790 - DNA, 2271 bp, synthetic construct; identical to SEQ ID NO: 5417
  source 1..2271: mol_type = other DNA

SEQ ID NO: 33791 - DNA, 2283 bp, synthetic construct; identical to SEQ ID NO: 5582
  source 1..2283: mol_type = other DNA

SEQ ID NO: 33792 - DNA, 2682 bp, synthetic construct; identical to SEQ ID NO: 5747
  source 1..2682: mol_type = other DNA

SEQ ID NO: 33793 - DNA, 2694 bp, synthetic construct; identical to SEQ ID NO: 5912
  source 1..2694: mol_type = other DNA

SEQ ID NO: 33794 - DNA, 2178 bp, synthetic construct; identical to SEQ ID NO: 6123
  source 1..2178: mol_type = other DNA

SEQ ID NO: 33795 - DNA, 2190 bp, synthetic construct; identical to SEQ ID NO: 6288
  source 1..2190: mol_type = other DNA

SEQ ID NO: 33796 - DNA, 2583 bp, synthetic construct; identical to SEQ ID NO: 6453
  source 1..2583: mol_type = other DNA

SEQ ID NO: 33797 - DNA, 2595 bp, synthetic construct; identical to SEQ ID NO: 6618
  source 1..2595: mol_type = other DNA

SEQ ID NO: 33798 - DNA, 2994 bp, synthetic construct; identical to SEQ ID NO: 6783
  source 1..2994: mol_type = other DNA

SEQ ID NO: 33799 - DNA, 3006 bp, synthetic construct; identical to SEQ ID NO: 6948
  source 1..3006: mol_type = other DNA

SEQ ID NO: 33800 - DNA, 2172 bp, synthetic construct; identical to SEQ ID NO: 7159
  source 1..2172: mol_type = other DNA

SEQ ID NO: 33801 - DNA, 2184 bp, synthetic construct; identical to SEQ ID NO: 7324
  source 1..2184: mol_type = other DNA

SEQ ID NO: 33802 - DNA, 2577 bp, synthetic construct; identical to SEQ ID NO: 7489
  source 1..2577: mol_type = other DNA

SEQ ID NO: 33803 - DNA, 2988 bp, synthetic construct; identical to SEQ ID NO: 7819
  source 1..2988: mol_type = other DNA

SEQ ID NO: 33804 - DNA, 1866 bp, synthetic construct; identical to SEQ ID NO: 8076
  source 1..1866: mol_type = other DNA

SEQ ID NO: 33805 - DNA, 1866 bp, synthetic construct; identical to SEQ ID NO: 8083
  source 1..1866: mol_type = other DNA

SEQ ID NO: 33806 - DNA, 2178 bp, synthetic construct; identical to SEQ ID NO: 8090
  source 1..2178: mol_type = other DNA

SEQ ID NO: 33807 - DNA, 2172 bp, synthetic construct; identical to SEQ ID NO: 8097
  source 1..2172: mol_type = other DNA

SEQ ID NO: 33808 - DNA, 2604 bp, synthetic construct; identical to SEQ ID NO: 8146
  source 1..2604: mol_type = other DNA

SEQ ID NO: 33809 - DNA, 2604 bp, synthetic construct; identical to SEQ ID NO: 8164
  source 1..2604: mol_type = other DNA

SEQ ID NO: 33810 - DNA, 2604 bp, synthetic construct; identical to SEQ ID NO: 8146
  source 1..2604: mol_type = other DNA

SEQ ID NO: 33811 - DNA, 2928 bp, synthetic construct; identical to SEQ ID NO: 8290
  source 1..2928: mol_type = other DNA

SEQ ID NO: 33812 - DNA, 2928 bp, synthetic construct; identical to SEQ ID NO: 8308
  source 1..2928: mol_type = other DNA

SEQ ID NO: 33813 - DNA, 2922 bp, synthetic construct; identical to SEQ ID NO: 8326
  source 1..2922: mol_type = other DNA

SEQ ID NO: 33814 - DNA, 2922 bp, synthetic construct; identical to SEQ ID NO: 8344
  source 1..2922: mol_type = other DNA

SEQ ID NO: 33815 - DNA, 2922 bp, synthetic construct; identical to SEQ ID NO: 8362
  source 1..2922: mol_type = other DNA

SEQ ID NO: 33816 - DNA, 2922 bp, synthetic construct; identical to SEQ ID NO: 8380
  source 1..2922: mol_type = other DNA

SEQ ID NO: 33817 - DNA, 2616 bp, synthetic construct; identical to SEQ ID NO: 17437
  source 1..2616: mol_type = other DNA

SEQ ID NO: 33818 - DNA, 2616 bp, synthetic construct; identical to SEQ ID NO: 17467
  source 1..2616: mol_type = other DNA

SEQ ID NO: 33819 - DNA, 2295 bp, synthetic construct; identical to SEQ ID NO: 17526
  source 1..2295: mol_type = other DNA

SEQ ID NO: 33820 - DNA, 2928 bp, synthetic construct; identical to SEQ ID NO: 8290
  source 1..2928: mol_type = other DNA

SEQ ID NO: 33821 - DNA, 2928 bp, synthetic construct; identical to SEQ ID NO: 8308
  source 1..2928: mol_type = other DNA

SEQ ID NO: 33822 - DNA, 2925 bp, synthetic construct; identical to SEQ ID NO: 17614
  source 1..2925: mol_type = other DNA

SEQ ID NO: 33823 - DNA, 2925 bp, synthetic construct; identical to SEQ ID NO: 17644
  source 1..2925: mol_type = other DNA

SEQ ID NO: 33824 - DNA, 2616 bp, synthetic construct; identical to SEQ ID NO: 17673
  source 1..2616: mol_type = other DNA

SEQ ID NO: 33825 - DNA, 2616 bp, synthetic construct; identical to SEQ ID NO: 17703
  source 1..2616: mol_type = other DNA

SEQ ID NO: 33826 - DNA, 2616 bp, synthetic construct; identical to SEQ ID NO: 17732
  source 1..2616: mol_type = other DNA

SEQ ID NO: 33827 - DNA, 2616 bp, synthetic construct; identical to SEQ ID NO: 17791
  source 1..2616: mol_type = other DNA

SEQ ID NO: 33828 - DNA, 2925 bp, synthetic construct; identical to SEQ ID NO: 17909
  source 1..2925: mol_type = other DNA

SEQ ID NO: 33829 - DNA, 2616 bp, synthetic construct; identical to SEQ ID NO: 17968
  source 1..2616: mol_type = other DNA

SEQ ID NO: 33830 - DNA, 2703 bp, synthetic construct; identical to SEQ ID NO: 18027
  source 1..2703: mol_type = other DNA

SEQ ID NO: 33831 - DNA, 2703 bp, synthetic construct; identical to SEQ ID NO: 18057
  source 1..2703: mol_type = other DNA

SEQ ID NO: 33832 - DNA, 2694 bp, synthetic construct; identical to SEQ ID NO: 18086
  source 1..2694: mol_type = other DNA

SEQ ID NO: 33833 - DNA, 2628 bp, synthetic construct; identical to SEQ ID NO: 18145
  source 1..2628: mol_type = other DNA

SEQ ID NO: 33834 - DNA, 2628 bp, synthetic construct; identical to SEQ ID NO: 18204
  source 1..2628: mol_type = other DNA

SEQ ID NO: 33835 - DNA, 1866 bp, synthetic construct; identical to SEQ ID NO: 23244
  source 1..1866: mol_type = other DNA

SEQ ID NO: 33836 - DNA, 2706 bp, synthetic construct; identical to SEQ ID NO: 32889
  source 1..2706: mol_type = other DNA

SEQ ID NO: 33837 - DNA, 2706 bp, synthetic construct; identical to SEQ ID NO: 32890
  source 1..2706: mol_type = other DNA

SEQ ID NO: 33838 - DNA, 2697 bp, synthetic construct; identical to SEQ ID NO: 32341
  source 1..2697: mol_type = other DNA

SEQ ID NO: 33839 - DNA, 2310 bp, synthetic construct; identical to SEQ ID NO: 32806
  source 1..2310: mol_type = other DNA

SEQ ID NO: 33840 - DNA, 2283 bp, synthetic construct; identical to SEQ ID NO: 32808
  source 1..2283: mol_type = other DNA

SEQ ID NO: 33841 - DNA, 2301 bp, synthetic construct
  source 1..2301: mol_type = other DNA
atggccttaccagtgaccgccttgctcctgccgctggccttgctgctccacgccgccaggccggacatccagatgacacagagccctagcagcctgtctgccagcgtgggagacagagtgaccatcacatgcaaggccagcgaccacatcaacaactggctggcctggtatcagcagaagcctggacaggcccctaagctgctgatctacggcgctaccacactggaaacaggcgtgcccagcagattttctggcagcggctctggcaccgactacaccctgacaatatccagcctccagcctgaggacttcgccacctactactgtcagcagagctggaacaccccttggacattcggccagggcaccaagctggaaatcaagagactcgaggacctgaagaacgtgttcccacctgaggtggccgtgttcgagcctagcgaggccgagatcagccacacccagaaagccaccctcgtgtgcctggctaccggcttctaccccgaccatgtggaactgtcttggtgggtcaacggcaaagaggtgcacagcggcgtgtgtaccgacccccagccactgaaagaacagcccgccctgaacgacagccggtactgcctgagcagcagactgagagtgtccgccaccttctggcagaacccccggaaccacttcagatgccaggtgcagttctacggcctgagcgagaacgacgagtggacccaggacagagccaagcccgtgacccagatcgtgtctgccgaagcctggggcagagccgattgcggctttaccagcgagagctaccagcagggcgtgctgagcgccaccatcctgtacgagatcctgctgggcaaggccaccctgtacgccgtgctggtgtctgccctggtgctgatggctatggtcaagcggaaggacagccggggaagggccaagcgatctggatctggagcaacaaacttctcactactcaaacaagcaggtgacgtggaggagaatcccgggcctactagtaccatggactggatttggcgcatccttttccttgtcggcgctgctaccggcgcccattccgggccccaggtgcagctggttgaatctggcggaggactggttcagcctggcggatctctgagactgtcttgtgccgccagcggcaacatcaacagcagaaactgcatgggctggttcagacaggcccctggcaagggaagagaaggcgtggcagctatcggccaagtgaccggcagaacctactacgtggacagcgtgaagggcagattcaccatcagcctggacaacagcaagaacaccctgtacctccagatgaacagcctgagagccgaggacaccgccgtgtactattgtgctgctgcccctggctgtctgctgtctgcacttagaagcgccgactacagaaactggggccagggcacactggtcaccgtttcttctggatccggcggcggaggatctggcggaggcggatctgggggcggaggctctttcgaacaagttcagcttcaacagcctggcgctgagctggtcaaacctggcgcttctgtgaagatgagctgcaaagccagcggctacgccttcagcagctactggatcaactggatgaagcagaaacccggccagggactcgaatggatcggccaaatctatcccggcgacggcgacaccaactacaacggcaagttcaagggcagagccacactgaccgccgatacctctagcagcacagcctacatgcagctgagcagcctgaccagcgaagatagcgccgtgtacttctgtgcccggtccatcacaacagtcgtgggctgcgctatggactattggggccagggaacaagcgtgaccgtgtctagtacgcgtatccagaaccctgatcctgccgtgtaccagctgcgggatagcaagagcagcgacaagagcgtgtgtctgttcaccgacttcgacagccagaccaacgtgtcccagagcaaggactccgacgtgtacatcaccgataagtgcgtgctggacatgcggagcatggacttcaagagcaactccgccgtggcctggtccaacaagtccgatttcgcctgcgccaacgccttcaacaacagcattatccccgaggacacattcttcccaagccccgagagcagctgcgacgtgaagctggtggaaaagagcttcgagacagacaccaacctgaacttccagaacctgagcgtgatcggcttcagaatcctgctgctgaaagtggccggctttaacctgctgatgaccctgcggctgtggtccagc

SEQ ID NO: 33842 - DNA, 2304 bp, synthetic construct
  source 1..2304: mol_type = other DNA
atggccttaccagtgaccgccttgctcctgccgctggccttgctgctccacgccgccaggccggacatccagatgacacagagccctagcagcctgtctgccagcgtgggagacagagtgaccatcacatgcaaggccagcgaccacatcaacaactggctggcctggtatcagcagaagcctggacaggcccctaagctgctgatctacggcgctaccacactggaaacaggcgtgcccagcagattttctggcagcggctctggcaccgactacaccctgacaatatccagcctccagcctgaggacttcgccacctactactgtcagcagagctggaacaccccttggacattcggccagggcaccaagctggaaatcaagagactcgaggacctgaagaacgtgttcccacctgaggtggccgtgttcgagcctagcgaggccgagatcagccacacccagaaagccaccctcgtgtgcctggctaccggcttctaccccgaccatgtggaactgtcttggtgggtcaacggcaaagaggtgcacagcggcgtgtgtaccgacccccagccactgaaagaacagcccgccctgaacgacagccggtactgcctgagcagcagactgagagtgtccgccaccttctggcagaacccccggaaccacttcagatgccaggtgcagttctacggcctgagcgagaacgacgagtggacccaggacagagccaagcccgtgacccagatcgtgtctgccgaagcctggggcagagccgattgcggctttaccagcgagagctaccagcagggcgtgctgagcgccaccatcctgtacgagatcctgctgggcaaggccaccctgtacgccgtgctggtgtctgccctggtgctgatggctatggtcaagcggaaggacagccggggaagggccaagcgatctggatctggagcaacaaacttctcactactcaaacaagcaggtgacgtggaggagaatcccgggcctactagtaccatggactggatttggcgcatccttttccttgtcggcgctgctaccggcgcccattccgggccccaggtgcagctggttgaatctggcggaggatctgttcaggctggcggctctctgagactgtcttgtggcgcttccggcaacatcagcagcagaaactgcatgggctggttcagacaggcccctggcaaagagagagaaggcgttgccgccatcggacaagtgaccggcagatcctactacgtggacagcgtgaagggcagattcaccatcagcctggacaacgccaagaacaccctgtacctccagatgaacacactgaagcccgaggacaccgccatgtactactgtgctgctgcccctggctgtctgctgtctgcacttagaagcgccgactacagaaactggggccagggaacccaagtgacagtgtctagtggatccggcggcggaggatctggcggaggcggatctgggggcggaggctctttcgaacaagttcagcttcaacagcctggcgctgagctggtcaaacctggcgcttctgtgaagatgagctgcaaagccagcggctacgccttcagcagctactggatcaactggatgaagcagaaacccggccagggactcgaatggatcggccaaatctatcccggcgacggcgacaccaactacaacggcaagttcaagggcagagccacactgaccgccgatacctctagcagcacagcctacatgcagctgagcagcctgaccagcgaagatagcgccgtgtacttctgtgcccggtccatcacaacagtcgtgggctgcgctatggactattggggccagggaacaagcgtgaccgtgtctagtacgcgtatccagaaccctgatcctgccgtgtaccagctgcgggatagcaagagcagcgacaagagcgtgtgtctgttcaccgacttcgacagccagaccaacgtgtcccagagcaaggactccgacgtgtacatcaccgataagtgcgtgctggacatgcggagcatggacttcaagagcaactccgccgtggcctggtccaacaagtccgatttcgcctgcgccaacgccttcaacaacagcattatccccgaggacacattcttcccaagccccgagagcagctgcgacgtgaagctggtggaaaagagcttcgagacagacaccaacctgaacttccagaacctgagcgtgatcggcttcagaatcctgctgctgaaagtggccggctttaacctgctgatgaccctgcggctgtggtccagctaa

SEQ ID NO: 33843 - DNA, 2727 bp, synthetic construct
  source 1..2727: mol_type = other DNA
atggccttaccagtgaccgccttgctcctgccgctggccttgctgctccacgccgccaggccggaagtgcagctggttgaatctggcggaggactggttcaggctggcggatctctgagactgtcttgtgccgccagcggcagaacctttagcatgggctggtttagacaggcccctggcaaagagagagagttcgtcgccgccatcacatactctggcggcagcccttactacgccgactctgtgaagggcagattcaccatcagccgggacaacgccaagaacaccgtgtacctccagatgaacagcctgaagcctgaggacaccgccgtgtactactgcgccgccaatccaacatacggcagcgactggaacgccgagaattggggccagggaacccaagtgacagtgtctagcggtaccggcggaggcggatctggcggcggaggtagcggtggcggaggatctgaattcgacatccagatgacacagagccctagcagcctgtctgccagcgtgggagacagagtgaccatcacatgcaaggccagcgaccacatcaacaactggctggcctggtatcagcagaagcctggacaggcccctaagctgctgatctacggcgctaccacactggaaacaggcgtgcccagcagattttctggcagcggctctggcaccgactacaccctgacaatatccagcctccagcctgaggacttcgccacctactactgtcagcagagctggaacaccccttggacattcggccagggcaccaagctggaaatcaagagactcgagatccagaaccctgatcctgccgtgtaccagctgcgggatagcaagagcagcgacaagagcgtgtgtctgttcaccgacttcgacagccagaccaacgtgtcccagagcaaggactccgacgtgtacatcaccgataagtgcgtgctggacatgcggagcatggacttcaagagcaactccgccgtggcctggtccaacaagtccgatttcgcctgcgccaacgccttcaacaacagcattatccccgaggacacattcttcccaagcagcgacgtgccctgcgacgtgaagctggtggaaaagagcttcgagacagacaccaacctgaacttccagaacctgagcgtgatcggcttcagaatcctgctgctgaaagtggccggctttaacctgctgatgaccctgcggctgtggtccagccgcgccaagagaagcggatctggcgtgaagcagaccctgaatttcgacctgctgaagctggctggcgacgtggaatccaacccaggccctactagtaccatggactggatttggcgcatccttttccttgtcggcgctgctaccggcgcccattccgggccccaggtgcagctggttgaatctggcggaggatctgttcaggctggcggctctctgagactgtcttgtggcgcttccggcaacatcagcagcagaaactgcatgggctggttcagacaggcccctggcaaagagagagaaggcgttgccgccatcggacaagtgaccggcagatcctactacgtggacagcgtgaagggcagattcaccatcagcctggacaacgccaagaacaccctgtacctccagatgaacacactgaagcccgaggacaccgccatgtactactgtgctgctgcccctggctgtctgctgtctgcacttagaagcgccgactacagaaactggggccagggaacccaagtgacagtgtctagtggatccggcggcggaggatctggcggaggcggatctgggggcggaggctctttcgaacaagttcagcttcaacagcctggcgctgagctggtcaaacctggcgcttctgtgaagatgagctgcaaagccagcggctacgccttcagcagctactggatcaactggatgaagcagaaacccggccagggactcgaatggatcggccaaatctatcccggcgacggcgacaccaactacaacggcaagttcaagggcagagccacactgaccgccgatacctctagcagcacagcctacatgcagctgagcagcctgaccagcgaagatagcgccgtgtacttctgtgcccggtccatcacaacagtcgtgggctgcgctatggactattggggccagggaacaagcgtgaccgtgtctagtacgcgtgaggacctgaagaacgtgttcccacctgaggtggccgtgttcgagcctagcaaggccgagatcgcccacacccagaaagccaccctcgtgtgcctggctaccggcttctaccccgaccatgtggaactgtcttggtgggtcaacggcaaagaggtgcacagcggcgtgtgtaccgacccccagccactgaaagaacagcccgccctgaacgacagccggtactgcctgagcagcagactgagagtgtccgccaccttctggcagaacccccggaaccacttcagatgccaggtgcagttctacggcctgagcgagaacgacgagtggacccaggacagagccaagcccgtgacccagatcgtgtctgccgaagcctggggcagagccgattgcggcatcaccagcgccagctaccaccagggcgtgctgagcgccaccatcctgtacgagatcctgctgggcaaggccaccctgtacgccgtgctggtgtctgccctggtgctgatggctatggtcaagcggaaggacagccggggataa

SEQ ID NO: 33844 - DNA, 2718 bp, synthetic construct
  source 1..2718: mol_type = other DNA
atggccttaccagtgaccgccttgctcctgccgctggccttgctgctccacgccgccaggccgcaggtgcagctggttgaatctggcggaggatctgttcaggctggcggctctctgagactgtcttgtggcgcttccggcaacatcagcagcagaaactgcatgggctggttcagacaggcccctggcaaagagagagaaggcgttgccgccatcggacaagtgaccggcagatcctactacgtggacagcgtgaagggcagattcaccatcagcctggacaacgccaagaacaccctgtacctccagatgaacacactgaagcccgaggacaccgccatgtactactgtgctgctgcccctggctgtctgctgtctgcacttagaagcgccgactacagaaactggggccagggaacccaagtgacagtgtctagtggtaccggcggaggcggatctggcggcggaggtagcggtggcggaggatctgaattcgacatccagatgacacagagccctagcagcctgtctgccagcgtgggagacagagtgaccatcacatgcaaggccagcgaccacatcaacaactggctggcctggtatcagcagaagcctggacaggcccctaagctgctgatctacggcgctaccacactggaaacaggcgtgcccagcagattttctggcagcggctctggcaccgactacaccctgacaatatccagcctccagcctgaggacttcgccacctactactgtcagcagagctggaacaccccttggacattcggccagggcaccaagctggaaatcaagagactcgaggacctgaagaacgtgttcccacctgaggtggccgtgttcgagcctagcgaggccgagatcagccacacccagaaagccaccctcgtgtgcctggctaccggcttctaccccgaccatgtggaactgtcttggtgggtcaacggcaaagaggtgcacagcggcgtgtgtaccgacccccagccactgaaagaacagcccgccctgaacgacagccggtactgcctgagcagcagactgagagtgtccgccaccttctggcagaacccccggaaccacttcagatgccaggtgcagttctacggcctgagcgagaacgacgagtggacccaggacagagccaagcccgtgacccagatcgtgtctgccgaagcctggggcagagccgattgcggctttaccagcgagagctaccagcagggcgtgctgagcgccaccatcctgtacgagatcctgctgggcaaggccaccctgtacgccgtgctggtgtctgccctggtgctgatggctatggtcaagcggaaggacagccggggaagggccaagcgatctggatctggagcaacaaacttctcactactcaaacaagcaggtgacgtggaggagaatcccgggcctactagtgccaccatggactggatttggcgcatccttttccttgtcggcgctgctaccggcgcccattccgggcccgaagtgcaactggttgaatccggtggcggcctggtgcaagcaggcggatctctcagacttagctgtgccgcctccggcagaaccttcacaatgggatggtttaggcaggctccagggaaagagagagagttcgtcgccgccatctctctgtctcccacactggcctactacgccgactctgtgaaaggccggttcaccatctccagagataatgccaagaacaccgtggtgctgcaaatgaactctctgaaacccgaggatacagccctgtactattgtgccgctgaccggaagtccgtgatgagcatcagacccgattactggggacagggcacacaagtcacagtgtcctctggatccggcggcggaggatctggcggaggcggatctgggggcggaggctctttcgaacaagttcagcttcaacagcctggcgctgagctggtcaaacctggcgcttctgtgaagatgagctgcaaagccagcggctacgccttcagcagctactggatcaactggatgaagcagaaacccggccagggactcgaatggatcggccaaatctatcccggcgacggcgacaccaactacaacggcaagttcaagggcagagccacactgaccgccgatacctctagcagcacagcctacatgcagctgagcagcctgaccagcgaagatagcgccgtgtacttctgtgcccggtccatcacaacagtcgtgggctgcgctatggactattggggccagggaacaagcgtgaccgtgtctagtacgcgtatccagaaccctgatcctgccgtgtaccagctgcgggatagcaagagcagcgacaagagcgtgtgtctgttcaccgacttcgacagccagaccaacgtgtcccagagcaaggactccgacgtgtacatcaccgataagtgcgtgctggacatgcggagcatggacttcaagagcaactccgccgtggcctggtccaacaagtccgatttcgcctgcgccaacgccttcaacaacagcattatccccgaggacacattcttcccaagccccgagagcagctgcgacgtgaagctggtggaaaagagcttcgagacagacaccaacctgaacttccagaacctgagcgtgatcggcttcagaatcctgctgctgaaagtggccggctttaacctgctgatgaccctgcggctgtggtccagctaa

SEQ ID NO: 33845 - DNA, 2307 bp, synthetic construct
  source 1..2307: mol_type = other DNA
atggccttaccagtgaccgccttgctcctgccgctggccttgctgctccacgccgccaggccgcaggtgcagctggttgaatctggcggaggatctgttcaggctggcggctctctgagactgtcttgtggcgcttccggcaacatcagcagcagaaactgcatgggctggttcagacaggcccctggcaaagagagagaaggcgttgccgccatcggacaagtgaccggcagatcctactacgtggacagcgtgaagggcagattcaccatcagcctggacaacgccaagaacaccctgtacctccagatgaacacactgaagcccgaggacaccgccatgtactactgtgctgctgcccctggctgtctgctgtctgcacttagaagcgccgactacagaaactggggccagggaacccaagtgacagtgtctagtggtaccggcggaggcggatctggcggcggaggtagcggtggcggaggatctgaattcgacatccagatgacacagagccctagcagcctgtctgccagcgtgggagacagagtgaccatcacatgcaaggccagcgaccacatcaacaactggctggcctggtatcagcagaagcctggacaggcccctaagctgctgatctacggcgctaccacactggaaacaggcgtgcccagcagattttctggcagcggctctggcaccgactacaccctgacaatatccagcctccagcctgaggacttcgccacctactactgtcagcagagctggaacaccccttggacattcggccagggcaccaagctggaaatcaagagactcgaggacctgaagaacgtgttcccacctgaggtggccgtgttcgagcctagcgaggccgagatcagccacacccagaaagccaccctcgtgtgcctggctaccggcttctaccccgaccatgtggaactgtcttggtgggtcaacggcaaagaggtgcacagcggcgtgtgtaccgacccccagccactgaaagaacagcccgccctgaacgacagccggtactgcctgagcagcagactgagagtgtccgccaccttctggcagaacccccggaaccacttcagatgccaggtgcagttctacggcctgagcgagaacgacgagtggacccaggacagagccaagcccgtgacccagatcgtgtctgccgaagcctggggcagagccgattgcggctttaccagcgagagctaccagcagggcgtgctgagcgccaccatcctgtacgagatcctgctgggcaaggccaccctgtacgccgtgctggtgtctgccctggtgctgatggctatggtcaagcggaaggacagccggggaagggccaagcgatctggatctggagcaacaaacttctcactactcaaacaagcaggtgacgtggaggagaatcccgggcctactagtgccaccatggactggatttggcgcatccttttccttgtcggcgctgctaccggcgcccattccttcgaacaagttcagcttcaacagcctggcgctgagctggtcaaacctggcgcttctgtgaagatgagctgcaaagccagcggctacgccttcagcagctactggatcaactggatgaagcagaaacccggccagggactcgaatggatcggccaaatctatcccggcgacggcgacaccaactacaacggcaagttcaagggcagagccacactgaccgccgatacctctagcagcacagcctacatgcagctgagcagcctgaccagcgaagatagcgccgtgtacttctgtgcccggtccatcacaacagtcgtgggctgcgctatggactattggggccagggaacaagcgtgaccgtgtctagtacgcgtatccagaaccctgatcctgccgtgtaccagctgcgggatagcaagagcagcgacaagagcgtgtgtctgttcaccgacttcgacagccagaccaacgtgtcccagagcaaggactccgacgtgtacatcaccgataagtgcgtgctggacatgcggagcatggacttcaagagcaactccgccgtggcctggtccaacaagtccgatttcgcctgcgccaacgccttcaacaacagcattatccccgaggacacattcttcccaagccccgagagcagctgcgacgtgaagctggtggaaaagagcttcgagacagacaccaacctgaacttccagaacctgagcgtgatcggcttcagaatcctgctgctgaaagtggccggctttaacctgctgatgaccctgcggctgtggtccagctaa

SEQ ID NO: 33846 - DNA, 2307 bp, synthetic construct
  source 1..2307: mol_type = other DNA
atggccttaccagtgaccgccttgctcctgccgctggccttgctgctccacgccgccaggccgcaagttcagctggtggaaagcggtggtggcgttgtgcaacctggtggaagtctgaggctgagctgtgccgcttctggcctgagctttagcacctacactgtggcctggttcaggcaggctcccggaaagggtcttgaaggcgtggccgccattccttacaccagccagcacatggtgtacacagacagcgtcagaggccggttcaccatcagcagagacaactccaagaatacgctctatctccagatgaactctctgcgcgccgaagatacagccgtgtattactgcgccaccgacagacggcctggcacctctatgctggctatcaacggctacaacagatggggacagggaaccaccgtgaccgtgtcatctggtaccggcggaggcggatctggcggcggaggtagcggtggcggaggatctgaattcgacatccagatgacacagagccctagcagcctgtctgccagcgtgggagacagagtgaccatcacatgcaaggccagcgaccacatcaacaactggctggcctggtatcagcagaagcctggacaggcccctaagctgctgatctacggcgctaccacactggaaacaggcgtgcccagcagattttctggcagcggctctggcaccgactacaccctgacaatatccagcctccagcctgaggacttcgccacctactactgtcagcagagctggaacaccccttggacattcggccagggcaccaagctggaaatcaagagactcgaggacctgaagaacgtgttcccacctgaggtggccgtgttcgagcctagcgaggccgagatcagccacacccagaaagccaccctcgtgtgcctggctaccggcttctaccccgaccatgtggaactgtcttggtgggtcaacggcaaagaggtgcacagcggcgtgtgtaccgacccccagccactgaaagaacagcccgccctgaacgacagccggtactgcctgagcagcagactgagagtgtccgccaccttctggcagaacccccggaaccacttcagatgccaggtgcagttctacggcctgagcgagaacgacgagtggacccaggacagagccaagcccgtgacccagatcgtgtctgccgaagcctggggcagagccgattgcggctttaccagcgagagctaccagcagggcgtgctgagcgccaccatcctgtacgagatcctgctgggcaaggccaccctgtacgccgtgctggtgtctgccctggtgctgatggctatggtcaagcggaaggacagccggggaagggccaagcgatctggatctggagcaacaaacttctcactactcaaacaagcaggtgacgtggaggagaatcccgggcctactagtgccaccatggactggatttggcgcatccttttccttgtcggcgctgctaccggcgcccattccttcgaacaagttcagcttcaacagcctggcgctgagctggtcaaacctggcgcttctgtgaagatgagctgcaaagccagcggctacgccttcagcagctactggatcaactggatgaagcagaaacccggccagggactcgaatggatcggccaaatctatcccggcgacggcgacaccaactacaacggcaagttcaagggcagagccacactgaccgccgatacctctagcagcacagcctacatgcagctgagcagcctgaccagcgaagatagcgccgtgtacttctgtgcccggtccatcacaacagtcgtgggctgcgctatggactattggggccagggaacaagcgtgaccgtgtctagtacgcgtatccagaaccctgatcctgccgtgtaccagctgcgggatagcaagagcagcgacaagagcgtgtgtctgttcaccgacttcgacagccagaccaacgtgtcccagagcaaggactccgacgtgtacatcaccgataagtgcgtgctggacatgcggagcatggacttcaagagcaactccgccgtggcctggtccaacaagtccgatttcgcctgcgccaacgccttcaacaacagcattatccccgaggacacattcttcccaagccccgagagcagctgcgacgtgaagctggtggaaaagagcttcgagacagacaccaacctgaacttccagaacctgagcgtgatcggcttcagaatcctgctgctgaaagtggccggctttaacctgctgatgaccctgcggctgtggtccagctaa

SEQ ID NO: 33847 - DNA, 2304 bp, synthetic construct
  source 1..2304: mol_type = other DNA
atggccttaccagtgaccgccttgctcctgccgctggccttgctgctccacgccgccaggccggacatccagatgacacagagccctagcagcctgtctgccagcgtgggagacagagtgaccatcacatgcaaggccagcgaccacatcaacaactggctggcctggtatcagcagaagcctggacaggcccctaagctgctgatctacggcgctaccacactggaaacaggcgtgcccagcagattttctggcagcggctctggcaccgactacaccctgacaatatccagcctccagcctgaggacttcgccacctactactgtcagcagagctggaacaccccttggacattcggccagggcaccaagctggaaatcaagagactcgaggacctgaagaacgtgttcccacctgaggtggccgtgttcgagcctagcgaggccgagatcagccacacccagaaagccaccctcgtgtgcctggctaccggcttctaccccgaccatgtggaactgtcttggtgggtcaacggcaaagaggtgcacagcggcgtgtgtaccgacccccagccactgaaagaacagcccgccctgaacgacagccggtactgcctgagcagcagactgagagtgtccgccaccttctggcagaacccccggaaccacttcagatgccaggtgcagttctacggcctgagcgagaacgacgagtggacccaggacagagccaagcccgtgacccagatcgtgtctgccgaagcctggggcagagccgattgcggctttaccagcgagagctaccagcagggcgtgctgagcgccaccatcctgtacgagatcctgctgggcaaggccaccctgtacgccgtgctggtgtctgccctggtgctgatggctatggtcaagcggaaggacagccggggaagggccaagcgatctggatctggagcaacaaacttctcactactcaaacaagcaggtgacgtggaggagaatcccgggcctactagtaccatggactggatttggcgcatccttttccttgtcggcgctgctaccggcgcccattccgggccccaagttcagctggtggaaagcggtggtggcgttgtgcaacctggtggaagtctgaggctgagctgtgccgcttctggcctgagctttagcacctacactgtggcctggttcaggcaggctcccggaaagggtcttgaaggcgtggccgccattccttacaccagccagcacatggtgtacacagacagcgtcagaggccggttcaccatcagcagagacaactccaagaatacgctctatctccagatgaactctctgcgcgccgaagatacagccgtgtattactgcgccaccgacagacggcctggcacctctatgctggctatcaacggctacaacagatggggacagggaaccaccgtgaccgtgtcatctggatccggcggcggaggatctggcggaggcggatctgggggcggaggctctttcgaacaagttcagcttcaacagcctggcgctgagctggtcaaacctggcgcttctgtgaagatgagctgcaaagccagcggctacgccttcagcagctactggatcaactggatgaagcagaaacccggccagggactcgaatggatcggccaaatctatcccggcgacggcgacaccaactacaacggcaagttcaagggcagagccacactgaccgccgatacctctagcagcacagcctacatgcagctgagcagcctgaccagcgaagatagcgccgtgtacttctgtgcccggtccatcacaacagtcgtgggctgcgctatggactattggggccagggaacaagcgtgaccgtgtctagtacgcgtatccagaaccctgatcctgccgtgtaccagctgcgggatagcaagagcagcgacaagagcgtgtgtctgttcaccgacttcgacagccagaccaacgtgtcccagagcaaggactccgacgtgtacatcaccgataagtgcgtgctggacatgcggagcatggacttcaagagcaactccgccgtggcctggtccaacaagtccgatttcgcctgcgccaacgccttcaacaacagcattatccccgaggacacattcttcccaagccccgagagcagctgcgacgtgaagctggtggaaaagagcttcgagacagacaccaacctgaacttccagaacctgagcgtgatcggcttcagaatcctgctgctgaaagtggccggctttaacctgctgatgaccctgcggctgtggtccagctaa

SEQ ID NO: 33848 - DNA, 2310 bp, synthetic construct
  source 1..2310: mol_type = other DNA
atggccttaccagtgaccgccttgctcctgccgctggccttgctgctccacgccgccaggccggacatccagatgacacagagccctagcagcctgtctgccagcgtgggagacagagtgaccatcacatgcaaggccagcgaccacatcaacaactggctggcctggtatcagcagaagcctggacaggcccctaagctgctgatctacggcgctaccacactggaaacaggcgtgcccagcagattttctggcagcggctctggcaccgactacaccctgacaatatccagcctccagcctgaggacttcgccacctactactgtcagcagagctggaacaccccttggacattcggccagggcaccaagctggaaatcaagagactcgaggacctgaagaacgtgttcccacctgaggtggccgtgttcgagcctagcgaggccgagatcagccacacccagaaagccaccctcgtgtgcctggctaccggcttctaccccgaccatgtggaactgtcttggtgggtcaacggcaaagaggtgcacagcggcgtgtgtaccgacccccagccactgaaagaacagcccgccctgaacgacagccggtactgcctgagcagcagactgagagtgtccgccaccttctggcagaacccccggaaccacttcagatgccaggtgcagttctacggcctgagcgagaacgacgagtggacccaggacagagccaagcccgtgacccagatcgtgtctgccgaagcctggggcagagccgattgcggctttaccagcgagagctaccagcagggcgtgctgagcgccaccatcctgtacgagatcctgctgggcaaggccaccctgtacgccgtgctggtgtctgccctggtgctgatggctatggtcaagcggaaggacagccggggaagggccaagcgatctggatctggagcaacaaacttctcactactcaaacaagcaggtgacgtggaggagaatcccgggcctactagtaccatggactggatttggcgcatccttttccttgtcggcgctgctaccggcgcccattccgggcccgaggtgcagctggttgaatctggcggaggatctgttcaggctggcggctctctgagactgtcttgtgccgccagcggctacacctacagcatcaactgcatgggctggttcagacaggcccctggcaaagagagagaaggcgttgccgccatctctaccggcggaggcagaaccgattaccgggattctgtgaagggcagattcaccatcagccaggacaacgccaagaacaccgtgtacctccagatgaacagcctgaagcctgaggacaccgccatgtactactgtgccggcaagaccacctatcctggctacggatgtggcctgggcagaagcgcctacaattattggggccagggcacccaagtgaccgtgtcatctggatccggcggcggaggatctggcggaggcggatctgggggcggaggctctttcgaacaagttcagcttcaacagcctggcgctgagctggtcaaacctggcgcttctgtgaagatgagctgcaaagccagcggctacgccttcagcagctactggatcaactggatgaagcagaaacccggccagggactcgaatggatcggccaaatctatcccggcgacggcgacaccaactacaacggcaagttcaagggcagagccacactgaccgccgatacctctagcagcacagcctacatgcagctgagcagcctgaccagcgaagatagcgccgtgtacttctgtgcccggtccatcacaacagtcgtgggctgcgctatggactattggggccagggaacaagcgtgaccgtgtctagtacgcgtatccagaaccctgatcctgccgtgtaccagctgcgggatagcaagagcagcgacaagagcgtgtgtctgttcaccgacttcgacagccagaccaacgtgtcccagagcaaggactccgacgtgtacatcaccgataagtgcgtgctggacatgcggagcatggacttcaagagcaactccgccgtggcctggtccaacaagtccgatttcgcctgcgccaacgccttcaacaacagcattatccccgaggacacattcttcccaagccccgagagcagctgcgacgtgaagctggtggaaaagagcttcgagacagacaccaacctgaacttccagaacctgagcgtgatcggcttcagaatcctgctgctgaaagtggccggctttaacctgctgatgaccctgcggctgtggtccagctaa

SEQ ID NO: 33849 - DNA, 1866 bp, synthetic construct
  source 1..1866: mol_type = other DNA
atggccttaccagtgaccgccttgctcctgccgctggccttgctgctccacgccgccaggccggacatccagatgacacagagccctagcagcctgtctgccagcgtgggagacagagtgaccatcacatgcaaggccagcgaccacatcaacaactggctggcctggtatcagcagaagcctggacaggcccctaagctgctgatctacggcgctaccacactggaaacaggcgtgcccagcagattttctggcagcggctctggcaccgactacaccctgacaatatccagcctccagcctgaggacttcgccacctactactgtcagcagagctggaacaccccttggacattcggccagggcaccaagctggaaatcaagagactcgaggacctgaagcacgtgttcccacctgaggtggccgtgttcgagcctagcgacgccgagatctggcacacccagaaagccaccctcgtgtgcctggctaccggcttctaccccgaccatgtggaactgtcttggtgggtcaacggcaaagaggtgcacagcggcgtgtctaccgacccccagccactgaaagaacagcccgccctgaacgacagccggtactgcctgagcagcagactgagagtgtccgccaccttctggcagaacccccggaaccacttcagatgccaggtgcagttctacggcctgagcgagaacgacgagtggacccaggacagagccaagcccgtgacccagatcgtgtctgccgaagcctggggcagagccgattgcggctttaccagcgagagctaccagcagggcgtgctgagcgccaccatcctgtacgagatcctgctgggcaaggccaccctgtacgccgtgctggtgtctgccctggtgctgatggctatggtcaagcggaaggacagccggggaagggccaagcgatctggatctggagcaacaaacttctcactactcaaacaagcaggtgacgtggaggagaatcccgggcctactagtatggactggatttggcgcatccttttccttgtcggcgctgctaccggcgcgcattccttcgaacaagttcagcttcaacagcctggcgctgagctggtcaaacctggcgcttctgtgaagatgagctgcaaagccagcggctacgccttcagcagctactggatcaactggatgaagcagaaacccggccagggactcgaatggatcggccaaatctatcccggcgacggcgacaccaactacaacggcaagttcaagggcagagccacactgaccgccgatacctctagcagcacagcctacatgcagctgagcagcctgaccagcgaagatagcgccgtgtacttctgtgcccggtccatcacaacagtcgtgggctgcgctatggactattggggccagggaacaagcgtgaccgtgtctagtacgcgtatccagaaccctgatcctgccgtgtaccagctgcgggatagcaagagcagcgacaagagcgtgtgtctgttcaccgacttcgacagccagaccaacgtgtcccagagcaaggactccgacgtgtacatcaccgataagaccgtgctggacatgcggagcatggacttcaagagcaactccgccgtggcctggtccagcaagtccgatttcgcctgcgccaacgccttcaacaacagcattatccccgaggacacattcttcccaagccccgagatggcctgcgacgtgaagctggtggaaaagagcttcgagacagacaccaacctgaacttccagaacctgctcgtgatctggctgagaatcctgctgctgaaagtggccggctttaacctgctgatgaccctgcggctgtggtccagc

SEQ ID NO: 33850 - DNA, 1866 bp, synthetic construct
  source 1..1866: mol_type = other DNA
atggccttaccagtgaccgccttgctcctgccgctggccttgctgctccacgccgccaggccggacatccagatgacacagagccctagcagcctgtctgccagcgtgggagacagagtgaccatcacatgcaaggccagcgaccacatcaacaactggctggcctggtatcagcagaagcctggacaggcccctaagctgctgatctacggcgctaccacactggaaacaggcgtgcccagcagattttctggcagcggctctggcaccgactacaccctgacaatatccagcctccagcctgaggacttcgccacctactactgtcagcagagctggaacaccccttggacattcggccagggcaccaagctggaaatcaagagactcgaggacctgaagcacgtgttcccacctgaggtggccgtgttcgagcctagcgacgccgagatctggcacacccagaaagccaccctcgtgtgcctggctaccggcttctaccccgaccatgtggaactgtcttggtgggtcaacggcaaagaggtgcacagcggcgtgtctaccgacccccagccactgaaagaacagcccgccctgaacgacagccggtactgcctgagcagcagactgagagtgtccgccaccttctggcagaacccccggaaccacttcagatgccaggtgcagttctacggcctgagcgagaacgacgagtggacccaggacagagccaagcccgtgacccagatcgtgtctgccgaagcctggggcagagccgattgcggctttaccagcgagagctaccagcagggcgtgctgagcgccaccatcctgtacgagatcctgctgggcaaggccaccctgtacgccgtgctggtgtctgccctggtgctgatggctatggtcaagcggaaggacagccggggaagggccaagcgatctggatctggagcaacaaacttctcactactcaaacaagcaggtgacgtggaggagaatcccgggcctactagtatggactggatttggcgcatccttttccttgtcggcgctgctaccggcgcgcattccttcgaacaagttcagcttcaacagcctggcgctgagctggtcaaacctggcgcttctgtgaagatgagctgcaaagccagcggctacgccttcagcagctactggatcaactggatgaagcagaaacccggccagggactcgaatggatcggccaaatctatcccggcgacggcgacaccaactacaacggcaagttcaagggcagagccacactgaccgccgatacctctagcagcacagcctacatgcagctgagcagcctgaccagcgaagatagcgccgtgtacttctgtgcccggtccatcacaacagtcgtgggctgcgctatggactattggggccagggaacaagcgtgaccgtgtctagtacgcgtatccagaaccctgatcctgccgtgtaccagctgcgggatagcaagagcagcgacaagagcgtgtgtctgttcaccgacttcgacagccagaccaacgtgtcccagagcaaggactccgacgtgtacatcaccgataagaccgtgctggacatgcggagcatggacttcaagagcaactccgccgtggcctggtccaccaagtccgatttcgcctgcgccaacgccttcaacaacagcattatccccgaggacacattcttcccaagccccgaggtggtgtgcgacgtgaagctggtggaaaagagcttcgagacagacaccaacctgaacttccagaacctggtggtgatcggcgccagaatcctgctgctgaaagtggccggctttaacctgctgatgaccctgcggctgtggtccagc

SEQ ID NO: 33851 - DNA, 1866 bp, synthetic construct
  source 1..1866: mol_type = other DNA
atggccttaccagtgaccgccttgctcctgccgctggccttgctgctccacgccgccaggccggacatccagatgacacagagccctagcagcctgtctgccagcgtgggagacagagtgaccatcacatgcaaggccagcgaccacatcaacaactggctggcctggtatcagcagaagcctggacaggcccctaagctgctgatctacggcgctaccacactggaaacaggcgtgcccagcagattttctggcagcggctctggcaccgactacaccctgacaatatccagcctccagcctgaggacttcgccacctactactgtcagcagagctggaacaccccttggacattcggccagggcaccaagctggaaatcaagagactcgaggacctgaagaacgtgttcccacctgaggtggccgtgttcgagcctagcaaggccgagatcagcagaacccagaaagccaccctcgtgtgcctggctaccggcttctaccctcctcatgtggaactgtcttggtgggtcaacggcaaagaggtgcacgacggcgtgtgtaccgacccccagccactgaaagaacagcccgccctgaacgacagccggtactgcctgagcagcagactgagagtgtccgccaccttctggcagaacccccggaaccacttcagatgccaggtgcagttctacggcctgagcgagaacgacgagtggacccaggacagagccaagcccgtgacccagatcgtgtctgccgaagcctggggcagagccgattgcggctttaccagcgagagctaccagcagggcgtgctgagcgccaccatcctgtacgagatcctgctgggcaaggccaccctgtacgccgtgctggtgtctgccctggtgctgatggctatggtcaagcggaaggacagccggggaagggccaagcgatctggatctggagcaacaaacttctcactactcaaacaagcaggtgacgtggaggagaatcccgggcctactagtatggactggatttggcgcatccttttccttgtcggcgctgctaccggcgcgcattccttcgaacaagttcagcttcaacagcctggcgctgagctggtcaaacctggcgcttctgtgaagatgagctgcaaagccagcggctacgccttcagcagctactggatcaactggatgaagcagaaacccggccagggactcgaatggatcggccaaatctatcccggcgacggcgacaccaactacaacggcaagttcaagggcagagccacactgaccgccgatacctctagcagcacagcctacatgcagctgagcagcctgaccagcgaagatagcgccgtgtacttctgtgcccggtccatcacaacagtcgtgggctgcgctatggactattggggccagggaacaagcgtgaccgtgtctagtacgcgtatccagaaccctgatcctgccgtgtaccagctgcgggatagcaagagcagcgacaagttcgtgtgtctgttcaccgacttcgacagccagatcaacgtgtcccagagcaaggactccgacgtgtacatcaccgataagtgcgtgctggacatgcggagcatggacttcaagagcaactccgccgtggcctggtccaacaagtccgatttcacctgcgccaacgccttcaacaacagcattatccccgaggacacattcttcccaagccccgagagcagctgcgacgtgaagctggtggaaaagagcttcgagacagacaccaacctgaacttccagaacctgagcgtgatcggcttcagaatcctgctgctgaaagtggccggctttaacctgctgatgaccctgcggctgtggtccagc

SEQ ID NO: 33852 - DNA, 2292 bp, synthetic construct
  source 1..2292: mol_type = other DNA
atggccttaccagtgaccgccttgctcctgccgctggccttgctgctccacgccgccaggccggacatccagatgacacagagccctagcagcctgtctgccagcgtgggagacagagtgaccatcacatgcaaggccagcgaccacatcaacaactggctggcctggtatcagcagaagcctggacaggcccctaagctgctgatctacggcgctaccacactggaaacaggcgtgcccagcagattttctggcagcggctctggcaccgactacaccctgacaatatccagcctccagcctgaggacttcgccacctactactgtcagcagagctggaacaccccttggacattcggccagggcaccaagctggaaatcaagagactcgaggacctgaagaacgtgttcccacctgaggtggccgtgttcgagcctagcgaggccgagatcagccacacccagaaagccaccctcgtgtgcctggctaccggcttctaccccgaccatgtggaactgtcttggtgggtcaacggcaaagaggtgcacagcggcgtgtgtaccgacccccagccactgaaagaacagcccgccctgaacgacagccggtactgcctgagcagcagactgagagtgtccgccaccttctggcagaacccccggaaccacttcagatgccaggtgcagttctacggcctgagcgagaacgacgagtggacccaggacagagccaagcccgtgacccagatcgtgtctgccgaagcctggggcagagccgattgcggctttaccagcgagagctaccagcagggcgtgctgagcgccaccatcctgtacgagatcctgctgggcaaggccaccctgtacgccgtgctggtgtctgccctggtgctgatggctatggtcaagcggaaggacagccggggaagggccaagcgatctggatctggagcaacaaacttctcactactcaaacaagcaggtgacgtggaggagaatcccgggcctactagtaccatggactggatttggcgcatccttttccttgtcggcgctgctaccggcgcccattccgggccccaggtgcagctccaagaaagcggacccggactggttaagccctctcagaccctgtctctgacctgcacagttagcggagccagcattaccacaggcgagtattattggaattggtttcggcagccaccaggcaaggggcttgagtggatgggtgctattgctgcctctggcagcaccacctactctcccagctttgagagcagaacctccatcagccgggacacctccaaaaaccagttctctctgaagctgtcctccgtgaccgctgctgacaccgccgtctattattgtggccggtctttcggcgtggcagctgtgaccacaggacagaacagaggccagggaacacttgtgaccgtgtcctctggatccggcggcggaggatctggcggaggcggatctgggggcggaggctctttcgaacaagttcagcttcaacagcctggcgctgagctggtcaaacctggcgcttctgtgaagatgagctgcaaagccagcggctacgccttcagcagctactggatcaactggatgaagcagaaacccggccagggactcgaatggatcggccaaatctatcccggcgacggcgacaccaactacaacggcaagttcaagggcagagccacactgaccgccgatacctctagcagcacagcctacatgcagctgagcagcctgaccagcgaagatagcgccgtgtacttctgtgcccggtccatcacaacagtcgtgggctgcgctatggactattggggccagggaacaagcgtgaccgtgtctagtacgcgtatccagaaccctgatcctgccgtgtaccagctgcgggatagcaagagcagcgacaagagcgtgtgtctgttcaccgacttcgacagccagaccaacgtgtcccagagcaaggactccgacgtgtacatcaccgataagtgcgtgctggacatgcggagcatggacttcaagagcaactccgccgtggcctggtccaacaagtccgatttcgcctgcgccaacgccttcaacaacagcattatccccgaggacacattcttcccaagccccgagagcagctgcgacgtgaagctggtggaaaagagcttcgagacagacaccaacctgaacttccagaacctgagcgtgatcggcttcagaatcctgctgctgaaagtggccggctttaacctgctgatgaccctgcggctgtggtccagc

SEQ ID NO: 33853 - DNA, 2715 bp, synthetic construct
  source 1..2715: mol_type = other DNA
atggccttaccagtgaccgccttgctcctgccgctggccttgctgctccacgccgccaggccgcaggttcagctgcaagagtctggccctggcctggtcaagcctagccaaacactgagcctgacctgtaccgtgtctggcggctctatcaccaccggcgagttctactggaactggttcagacagcctcctggcaaaggactggaatggatgggagccattgccgccagcggcagcacaacatacagccctagcttcgagagccggaccagcatcagcagagacaccagcaagaatcagttcagcctgaagctgagcagcgtgacagccgccgatacagccgtgtattactgcggcagatcctttggagtggccgccgtgacaaccggccagaatagaggacagggcaccctggtcacagtgtctagcggtaccggcggaggcggatctggcggcggaggtagcggtggcggaggatctgaattcgacatccagatgacacagagccctagcagcctgtctgccagcgtgggagacagagtgaccatcacatgcaaggccagcgaccacatcaacaactggctggcctggtatcagcagaagcctggacaggcccctaagctgctgatctacggcgctaccacactggaaacaggcgtgcccagcagattttctggcagcggctctggcaccgactacaccctgacaatatccagcctccagcctgaggacttcgccacctactactgtcagcagagctggaacaccccttggacattcggccagggcaccaagctggaaatcaagagactcgagatccagaaccctgatcctgccgtgtaccagctgcgggatagcaagagcagcgacaagagcgtgtgtctgttcaccgacttcgacagccagaccaacgtgtcccagagcaaggactccgacgtgtacatcaccgataagtgcgtgctggacatgcggagcatggacttcaagagcaactccgccgtggcctggtccaacaagtccgatttcgcctgcgccaacgccttcaacaacagcattatccccgaggacacattcttcccaagcagcgacgtgccctgcgacgtgaagctggtggaaaagagcttcgagacagacaccaacctgaacttccagaacctgagcgtgatcggcttcagaatcctgctgctgaaagtggccggctttaacctgctgatgaccctgcggctgtggtccagccgcgccaagagaagcggatctggcgtgaagcagaccctgaatttcgacctgctgaagctggctggcgacgtggaatccaacccaggccctactagtaccatggactggatttggcgcatccttttccttgtcggcgctgctaccggcgcccattccgggcccgaagtgcaactggttgaatccggtggcggcctggtgcaacccggcggatctctcagacttagctgtgccgcctccggcagaaccttcacaatgggatggtacaggcaggctccagggaaagagagagagttcgtcgccgccatctctctgtctcccacactggcctactacgccgactctgtgaaaggccggttcaccatctccagagataatagcaagaacaccgtggtgctgcaaatgaactctctgagagccgaggatacagccctgtactattgtgccgctgaccggaagtccgtgatgagcatcagacccgattactggggacagggcacactggtcacagtgtctagtggatccggcggcggaggatctggcggaggcggatctgggggcggaggctctttcgaacaagttcagcttcaacagcctggcgctgagctggtcaaacctggcgcttctgtgaagatgagctgcaaagccagcggctacgccttcagcagctactggatcaactggatgaagcagaaacccggccagggactcgaatggatcggccaaatctatcccggcgacggcgacaccaactacaacggcaagttcaagggcagagccacactgaccgccgatacctctagcagcacagcctacatgcagctgagcagcctgaccagcgaagatagcgccgtgtacttctgtgcccggtccatcacaacagtcgtgggctgcgctatggactattggggccagggaacaagcgtgaccgtgtctagtacgcgtgaggacctgaagaacgtgttcccacctgaggtggccgtgttcgagcctagcaaggccgagatcgcccacacccagaaagccaccctcgtgtgcctggctaccggcttctaccccgaccatgtggaactgtcttggtgggtcaacggcaaagaggtgcacagcggcgtgtgtaccgacccccagccactgaaagaacagcccgccctgaacgacagccggtactgcctgagcagcagactgagagtgtccgccaccttctggcagaacccccggaaccacttcagatgccaggtgcagttctacggcctgagcgagaacgacgagtggacccaggacagagccaagcccgtgacccagatcgtgtctgccgaagcctggggcagagccgattgcggcatcaccagcgccagctaccaccagggcgtgctgagcgccaccatcctgtacgagatcctgctgggcaaggccaccctgtacgccgtgctggtgtctgccctggtgctgatggctatggtcaagcggaaggacagccgggga

SEQ ID NO: 33854 - DNA, 2304 bp, synthetic construct
  source 1..2304: mol_type = other DNA
atggccttaccagtgaccgccttgctcctgccgctggccttgctgctccacgccgccaggccgcaggttcagctgcaagagtctggccctggcctggtcaagcctagccaaacactgagcctgacctgtaccgtgtctggcggctctatcaccaccggcgagttctactggaactggttcagacagcctcctggcaaaggactggaatggatgggagccattgccgccagcggcagcacaacatacagccctagcttcgagagccggaccagcatcagcagagacaccagcaagaatcagttcagcctgaagctgagcagcgtgacagccgccgatacagccgtgtattactgcggcagatcctttggagtggccgccgtgacaaccggccagaatagaggacagggcaccctggtcacagtgtctagcggtaccggcggaggcggatctggcggcggaggtagcggtggcggaggatctgaattcgacatccagatgacacagagccctagcagcctgtctgccagcgtgggagacagagtgaccatcacatgcaaggccagcgaccacatcaacaactggctggcctggtatcagcagaagcctggacaggcccctaagctgctgatctacggcgctaccacactggaaacaggcgtgcccagcagattttctggcagcggctctggcaccgactacaccctgacaatatccagcctccagcctgaggacttcgccacctactactgtcagcagagctggaacaccccttggacattcggccagggcaccaagctggaaatcaagagactcgagatccagaaccctgatcctgccgtgtaccagctgcgggatagcaagagcagcgacaagagcgtgtgtctgttcaccgacttcgacagccagaccaacgtgtcccagagcaaggactccgacgtgtacatcaccgataagtgcgtgctggacatgcggagcatggacttcaagagcaactccgccgtggcctggtccaacaagtccgatttcgcctgcgccaacgccttcaacaacagcattatccccgaggacacattcttcccaagcagcgacgtgccctgcgacgtgaagctggtggaaaagagcttcgagacagacaccaacctgaacttccagaacctgagcgtgatcggcttcagaatcctgctgctgaaagtggccggctttaacctgctgatgaccctgcggctgtggtccagccgcgccaagagaagcggatctggcgtgaagcagaccctgaatttcgacctgctgaagctggctggcgacgtggaatccaacccaggccctactagtaccatggactggatttggcgcatccttttccttgtcggcgctgctaccggcgcccattccttcgaacaagttcagcttcaacagcctggcgctgagctggtcaaacctggcgcttctgtgaagatgagctgcaaagccagcggctacgccttcagcagctactggatcaactggatgaagcagaaacccggccagggactcgaatggatcggccaaatctatcccggcgacggcgacaccaactacaacggcaagttcaagggcagagccacactgaccgccgatacctctagcagcacagcctacatgcagctgagcagcctgaccagcgaagatagcgccgtgtacttctgtgcccggtccatcacaacagtcgtgggctgcgctatggactattggggccagggaacaagcgtgaccgtgtctagtacgcgtgaggacctgaagaacgtgttcccacctgaggtggccgtgttcgagcctagcaaggccgagatcgcccacacccagaaagccaccctcgtgtgcctggctaccggcttctaccccgaccatgtggaactgtcttggtgggtcaacggcaaagaggtgcacagcggcgtgtgtaccgacccccagccactgaaagaacagcccgccctgaacgacagccggtactgcctgagcagcagactgagagtgtccgccaccttctggcagaacccccggaaccacttcagatgccaggtgcagttctacggcctgagcgagaacgacgagtggacccaggacagagccaagcccgtgacccagatcgtgtctgccgaagcctggggcagagccgattgcggcatcaccagcgccagctaccaccagggcgtgctgagcgccaccatcctgtacgagatcctgctgggcaaggccaccctgtacgccgtgctggtgtctgccctggtgctgatggctatggtcaagcggaaggacagccgggga

SEQ ID NO: 33855 - DNA, 2703 bp, synthetic construct
  source 1..2703: mol_type = other DNA
atggccttaccagtgaccgccttgctcctgccgctggccttgctgctccacgccgccaggccggaagtgcagctggttgaatctggcggaggactggttcaggctggcggatctctgagactgtcttgtgccgccagcggcagaacctttagcatgggctggtttagacaggcccctggcaaagagagagagttcgtcgccgccatcacatactctggcggcagcccttactacgccgactctgtgaagggcagattcaccatcagccgggacaacgccaagaacaccgtgtacctccagatgaacagcctgaagcctgaggacaccgccgtgtactactgcgccgccaatccaacatacggcagcgactggaacgccgagaattggggccagggaacccaagtgacagtgtctagcggtaccggcggaggcggatctggcggcggaggtagcggtggcggaggatctgaattcgacatccagatgacacagagccctagcagcctgtctgccagcgtgggagacagagtgaccatcacatgcaaggccagcgaccacatcaacaactggctggcctggtatcagcagaagcctggacaggcccctaagctgctgatctacggcgctaccacactggaaacaggcgtgcccagcagattttctggcagcggctctggcaccgactacaccctgacaatatccagcctccagcctgaggacttcgccacctactactgtcagcagagctggaacaccccttggacattcggccagggcaccaagctggaaatcaagagactcgaggacctgaagaacgtgttcccacctgaggtggccgtgttcgagcctagcgaggccgagatcagccacacccagaaagccaccctcgtgtgcctggctaccggcttctaccccgaccatgtggaactgtcttggtgggtcaacggcaaagaggtgcacagcggcgtgtgtaccgacccccagccactgaaagaacagcccgccctgaacgacagccggtactgcctgagcagcagactgagagtgtccgccaccttctggcagaacccccggaaccacttcagatgccaggtgcagttctacggcctgagcgagaacgacgagtggacccaggacagagccaagcccgtgacccagatcgtgtctgccgaagcctggggcagagccgattgcggctttaccagcgagagctaccagcagggcgtgctgagcgccaccatcctgtacgagatcctgctgggcaaggccaccctgtacgccgtgctggtgtctgccctggtgctgatggctatggtcaagcggaaggacagccggggaagggccaagcgatctggatctggagcaacaaacttctcactactcaaacaagcaggtgacgtggaggagaatcccgggcctactagtaccatggactggatttggcgcatccttttccttgtcggcgctgctaccggcgcccattccgggccccaggtgcagctccaagaaagcggacccggactggttaagccctctcagaccctgtctctgacctgcacagttagcggagccagcattaccacaggcgagtattattggaattggtttcggcagccaccaggcaaggggcttgagtggatgggtgctattgctgcctctggcagcaccacctactctcccagctttgagagcagaacctccatcagccgggacacctccaaaaaccagttctctctgaagctgtcctccgtgaccgctgctgacaccgccgtctattattgtggccggtctttcggcgtggcagctgtgaccacaggacagaacagaggccagggaacacttgtgaccgtgtcctctggatccggcggcggaggatctggcggaggcggatctgggggcggaggctctttcgaacaagttcagcttcaacagcctggcgctgagctggtcaaacctggcgcttctgtgaagatgagctgcaaagccagcggctacgccttcagcagctactggatcaactggatgaagcagaaacccggccagggactcgaatggatcggccaaatctatcccggcgacggcgacaccaactacaacggcaagttcaagggcagagccacactgaccgccgatacctctagcagcacagcctacatgcagctgagcagcctgaccagcgaagatagcgccgtgtacttctgtgcccggtccatcacaacagtcgtgggctgcgctatggactattggggccagggaacaagcgtgaccgtgtctagtacgcgtatccagaaccctgatcctgccgtgtaccagctgcgggatagcaagagcagcgacaagagcgtgtgtctgttcaccgacttcgacagccagaccaacgtgtcccagagcaaggactccgacgtgtacatcaccgataagtgcgtgctggacatgcggagcatggacttcaagagcaactccgccgtggcctggtccaacaagtccgatttcgcctgcgccaacgccttcaacaacagcattatccccgaggacacattcttcccaagccccgagagcagctgcgacgtgaagctggtggaaaagagcttcgagacagacaccaacctgaacttccagaacctgagcgtgatcggcttcagaatcctgctgctgaaagtggccggctttaacctgctgatgaccctgcggctgtggtccagc

SEQ ID NO: 33856 - DNA, 2724 bp, synthetic construct
  source 1..2724: mol_type = other DNA
atggccttaccagtgaccgccttgctcctgccgctggccttgctgctccacgccgccaggccggaagtgcagctggttgaatctggcggaggactggttcaggctggcggatctctgagactgtcttgtgccgccagcggcagaacctttagcatgggctggtttagacaggcccctggcaaagagagagagttcgtcgccgccatcacatactctggcggcagcccttactacgccgactctgtgaagggcagattcaccatcagccgggacaacgccaagaacaccgtgtacctccagatgaacagcctgaagcctgaggacaccgccgtgtactactgcgccgccaatccaacatacggcagcgactggaacgccgagaattggggccagggaacccaagtgacagtgtctagcggtaccggcggaggcggatctggcggcggaggtagcggtggcggaggatctgaattcgacatccagatgacacagagccctagcagcctgtctgccagcgtgggagacagagtgaccatcacatgcaaggccagcgaccacatcaacaactggctggcctggtatcagcagaagcctggacaggcccctaagctgctgatctacggcgctaccacactggaaacaggcgtgcccagcagattttctggcagcggctctggcaccgactacaccctgacaatatccagcctccagcctgaggacttcgccacctactactgtcagcagagctggaacaccccttggacattcggccagggcaccaagctggaaatcaagagactcgagatccagaaccctgatcctgccgtgtaccagctgcgggatagcaagagcagcgacaagagcgtgtgtctgttcaccgacttcgacagccagaccaacgtgtcccagagcaaggactccgacgtgtacatcaccgataagtgcgtgctggacatgcggagcatggacttcaagagcaactccgccgtggcctggtccaacaagtccgatttcgcctgcgccaacgccttcaacaacagcattatccccgaggacacattcttcccaagcagcgacgtgccctgcgacgtgaagctggtggaaaagagcttcgagacagacaccaacctgaacttccagaacctgagcgtgatcggcttcagaatcctgctgctgaaagtggccggctttaacctgctgatgaccctgcggctgtggtccagccgcgccaagagaagcggatctggcgtgaagcagaccctgaatttcgacctgctgaagctggctggcgacgtggaatccaacccaggccctactagtaccatggactggatttggcgcatccttttccttgtcggcgctgctaccggcgcccattccgggccccaggtgcagctggttgaatctggcggaggactggttcagcctggcggatctctgagactgtcttgtgccgccagcggcaacatcaacagcagaaactgcatgggctggttcagacaggcccctggcaagggaagagaaggcgtggcagctatcggccaagtgaccggcagaacctactacgtggacagcgtgaagggcagattcaccatcagcctggacaacagcaagaacaccctgtacctccagatgaacagcctgagagccgaggacaccgccgtgtactattgtgctgctgcccctggctgtctgctgtctgcacttagaagcgccgactacagaaactggggccagggcacactggtcaccgtttcttctggatccggcggcggaggatctggcggaggcggatctgggggcggaggctctttcgaacaagttcagcttcaacagcctggcgctgagctggtcaaacctggcgcttctgtgaagatgagctgcaaagccagcggctacgccttcagcagctactggatcaactggatgaagcagaaacccggccagggactcgaatggatcggccaaatctatcccggcgacggcgacaccaactacaacggcaagttcaagggcagagccacactgaccgccgatacctctagcagcacagcctacatgcagctgagcagcctgaccagcgaagatagcgccgtgtacttctgtgcccggtccatcacaacagtcgtgggctgcgctatggactattggggccagggaacaagcgtgaccgtgtctagtacgcgtgaggacctgaagaacgtgttcccacctgaggtggccgtgttcgagcctagcaaggccgagatcgcccacacccagaaagccaccctcgtgtgcctggctaccggcttctaccccgaccatgtggaactgtcttggtgggtcaacggcaaagaggtgcacagcggcgtgtgtaccgacccccagccactgaaagaacagcccgccctgaacgacagccggtactgcctgagcagcagactgagagtgtccgccaccttctggcagaacccccggaaccacttcagatgccaggtgcagttctacggcctgagcgagaacgacgagtggacccaggacagagccaagcccgtgacccagatcgtgtctgccgaagcctggggcagagccgattgcggcatcaccagcgccagctaccaccagggcgtgctgagcgccaccatcctgtacgagatcctgctgggcaaggccaccctgtacgccgtgctggtgtctgccctggtgctgatggctatggtcaagcggaaggacagccgggga

SEQ ID NO: 33857 - DNA, 2712 bp, synthetic construct
  source 1..2712: mol_type = other DNA
atggccttaccagtgaccgccttgctcctgccgctggccttgctgctccacgccgccaggccggaagtgcagctggttgaatctggcggaggactggttcaggctggcggatctctgagactgtcttgtgccgccagcggcagaacctttagcatgggctggtttagacaggcccctggcaaagagagagagttcgtcgccgccatcacatactctggcggcagcccttactacgccgactctgtgaagggcagattcaccatcagccgggacaacgccaagaacaccgtgtacctccagatgaacagcctgaagcctgaggacaccgccgtgtactactgcgccgccaatccaacatacggcagcgactggaacgccgagaattggggccagggaacccaagtgacagtgtctagcggtaccggcggaggcggatctggcggcggaggtagcggtggcggaggatctgaattcgacatccagatgacacagagccctagcagcctgtctgccagcgtgggagacagagtgaccatcacatgcaaggccagcgaccacatcaacaactggctggcctggtatcagcagaagcctggacaggcccctaagctgctgatctacggcgctaccacactggaaacaggcgtgcccagcagattttctggcagcggctctggcaccgactacaccctgacaatatccagcctccagcctgaggacttcgccacctactactgtcagcagagctggaacaccccttggacattcggccagggcaccaagctggaaatcaagagactcgaggacctgaagaacgtgttcccacctgaggtggccgtgttcgagcctagcgaggccgagatcagccacacccagaaagccaccctcgtgtgcctggctaccggcttctaccccgaccatgtggaactgtcttggtgggtcaacggcaaagaggtgcacagcggcgtgtgtaccgacccccagccactgaaagaacagcccgccctgaacgacagccggtactgcctgagcagcagactgagagtgtccgccaccttctggcagaacccccggaaccacttcagatgccaggtgcagttctacggcctgagcgagaacgacgagtggacccaggacagagccaagcccgtgacccagatcgtgtctgccgaagcctggggcagagccgattgcggctttaccagcgagagctaccagcagggcgtgctgagcgccaccatcctgtacgagatcctgctgggcaaggccaccctgtacgccgtgctggtgtctgccctggtgctgatggctatggtcaagcggaaggacagccggggaagggccaagcgatctggatctggagcaacaaacttctcactactcaaacaagcaggtgacgtggaggagaatcccgggcctactagtaccatggactggatttggcgcatccttttccttgtcggcgctgctaccggcgcccattccgggccccaggtgcagctggttgaatctggcggaggactggttcagcctggcggatctctgagactgtcttgtgccgccagcggcaacatcaacagcagaaactgcatgggctggttcagacaggcccctggcaagggaagagaaggcgtggcagctatcggccaagtgaccggcagaacctactacgtggacagcgtgaagggcagattcaccatcagcctggacaacagcaagaacaccctgtacctccagatgaacagcctgagagccgaggacaccgccgtgtactattgtgctgctgcccctggctgtctgctgtctgcacttagaagcgccgactacagaaactggggccagggcacactggtcaccgtttcttctggatccggcggcggaggatctggcggaggcggatctgggggcggaggctctttcgaacaagttcagcttcaacagcctggcgctgagctggtcaaacctggcgcttctgtgaagatgagctgcaaagccagcggctacgccttcagcagctactggatcaactggatgaagcagaaacccggccagggactcgaatggatcggccaaatctatcccggcgacggcgacaccaactacaacggcaagttcaagggcagagccacactgaccgccgatacctctagcagcacagcctacatgcagctgagcagcctgaccagcgaagatagcgccgtgtacttctgtgcccggtccatcacaacagtcgtgggctgcgctatggactattggggccagggaacaagcgtgaccgtgtctagtacgcgtatccagaaccctgatcctgccgtgtaccagctgcgggatagcaagagcagcgacaagagcgtgtgtctgttcaccgacttcgacagccagaccaacgtgtcccagagcaaggactccgacgtgtacatcaccgataagtgcgtgctggacatgcggagcatggacttcaagagcaactccgccgtggcctggtccaacaagtccgatttcgcctgcgccaacgccttcaacaacagcattatccccgaggacacattcttcccaagccccgagagcagctgcgacgtgaagctggtggaaaagagcttcgagacagacaccaacctgaacttccagaacctgagcgtgatcggcttcagaatcctgctgctgaaagtggccggctttaacctgctgatgaccctgcggctgtggtccagc

SEQ ID NO: 33858 - DNA, 2712 bp, synthetic construct
  source 1..2712: mol_type = other DNA
atggccttaccagtgaccgccttgctcctgccgctggccttgctgctccacgccgccaggccggaagtgcaactggttgaatccggtggcggcctggtgcaagcaggcggatctctcagacttagctgtgccgcctccggcagaaccttcacaatgggatggtttaggcaggctccagggaaagagagagagttcgtcgccgccatctctctgtctcccacactggcctactacgccgactctgtgaaaggccggttcaccatctccagagataatgccaagaacaccgtggtgctgcaaatgaactctctgaaacccgaggatacagccctgtactattgtgccgctgaccggaagtccgtgatgagcatcagacccgattactggggacagggcacacaagtcacagtgtcctctggtaccggcggaggcggatctggcggcggaggtagcggtggcggaggatctgaattcgacatccagatgacacagagccctagcagcctgtctgccagcgtgggagacagagtgaccatcacatgcaaggccagcgaccacatcaacaactggctggcctggtatcagcagaagcctggacaggcccctaagctgctgatctacggcgctaccacactggaaacaggcgtgcccagcagattttctggcagcggctctggcaccgactacaccctgacaatatccagcctccagcctgaggacttcgccacctactactgtcagcagagctggaacaccccttggacattcggccagggcaccaagctggaaatcaagagactcgaggacctgaagaacgtgttcccacctgaggtggccgtgttcgagcctagcgaggccgagatcagccacacccagaaagccaccctcgtgtgcctggctaccggcttctaccccgaccatgtggaactgtcttggtgggtcaacggcaaagaggtgcacagcggcgtgtgtaccgacccccagccactgaaagaacagcccgccctgaacgacagccggtactgcctgagcagcagactgagagtgtccgccaccttctggcagaacccccggaaccacttcagatgccaggtgcagttctacggcctgagcgagaacgacgagtggacccaggacagagccaagcccgtgacccagatcgtgtctgccgaagcctggggcagagccgattgcggctttaccagcgagagctaccagcagggcgtgctgagcgccaccatcctgtacgagatcctgctgggcaaggccaccctgtacgccgtgctggtgtctgccctggtgctgatggctatggtcaagcggaaggacagccggggaagggccaagcgatctggatctggagcaacaaacttctcactactcaaacaagcaggtgacgtggaggagaatcccgggcctactagtaccatggactggatttggcgcatccttttccttgtcggcgctgctaccggcgcccattccgggccccaggtgcagctggttgaatctggcggaggactggttcagcctggcggatctctgagactgtcttgtgccgccagcggcaacatcaacagcagaaactgcatgggctggttcagacaggcccctggcaagggaagagaaggcgtggcagctatcggccaagtgaccggcagaacctactacgtggacagcgtgaagggcagattcaccatcagcctggacaacagcaagaacaccctgtacctccagatgaacagcctgagagccgaggacaccgccgtgtactattgtgctgctgcccctggctgtctgctgtctgcacttagaagcgccgactacagaaactggggccagggcacactggtcaccgtttcttctggatccggcggcggaggatctggcggaggcggatctgggggcggaggctctttcgaacaagttcagcttcaacagcctggcgctgagctggtcaaacctggcgcttctgtgaagatgagctgcaaagccagcggctacgccttcagcagctactggatcaactggatgaagcagaaacccggccagggactcgaatggatcggccaaatctatcccggcgacggcgacaccaactacaacggcaagttcaagggcagagccacactgaccgccgatacctctagcagcacagcctacatgcagctgagcagcctgaccagcgaagatagcgccgtgtacttctgtgcccggtccatcacaacagtcgtgggctgcgctatggactattggggccagggaacaagcgtgaccgtgtctagtacgcgtatccagaaccctgatcctgccgtgtaccagctgcgggatagcaagagcagcgacaagagcgtgtgtctgttcaccgacttcgacagccagaccaacgtgtcccagagcaaggactccgacgtgtacatcaccgataagtgcgtgctggacatgcggagcatggacttcaagagcaactccgccgtggcctggtccaacaagtccgatttcgcctgcgccaacgccttcaacaacagcattatccccgaggacacattcttcccaagccccgagagcagctgcgacgtgaagctggtggaaaagagcttcgagacagacaccaacctgaacttccagaacctgagcgtgatcggcttcagaatcctgctgctgaaagtggccggctttaacctgctgatgaccctgcggctgtggtccagc

SEQ ID NO: 33859 - DNA, 2724 bp, synthetic construct
  source 1..2724: mol_type = other DNA
atggccttaccagtgaccgccttgctcctgccgctggccttgctgctccacgccgccaggccgcaggttcagctgcaagagtctggccctggcctggtcaagcctagccaaacactgagcctgacctgtaccgtgtctggcggctctatcaccaccggcgagttctactggaactggttcagacagcctcctggcaaaggactggaatggatgggagccattgccgccagcggcagcacaacatacagccctagcttcgagagccggaccagcatcagcagagacaccagcaagaatcagttcagcctgaagctgagcagcgtgacagccgccgatacagccgtgtattactgcggcagatcctttggagtggccgccgtgacaaccggccagaatagaggacagggcaccctggtcacagtgtctagcggtaccggcggaggcggatctggcggcggaggtagcggtggcggaggatctgaattcgacatccagatgacacagagccctagcagcctgtctgccagcgtgggagacagagtgaccatcacatgcaaggccagcgaccacatcaacaactggctggcctggtatcagcagaagcctggacaggcccctaagctgctgatctacggcgctaccacactggaaacaggcgtgcccagcagattttctggcagcggctctggcaccgactacaccctgacaatatccagcctccagcctgaggacttcgccacctactactgtcagcagagctggaacaccccttggacattcggccagggcaccaagctggaaatcaagagactcgaggacctgaagaacgtgttcccacctgaggtggccgtgttcgagcctagcgaggccgagatcagccacacccagaaagccaccctcgtgtgcctggctaccggcttctaccccgaccatgtggaactgtcttggtgggtcaacggcaaagaggtgcacagcggcgtgtgtaccgacccccagccactgaaagaacagcccgccctgaacgacagccggtactgcctgagcagcagactgagagtgtccgccaccttctggcagaacccccggaaccacttcagatgccaggtgcagttctacggcctgagcgagaacgacgagtggacccaggacagagccaagcccgtgacccagatcgtgtctgccgaagcctggggcagagccgattgcggctttaccagcgagagctaccagcagggcgtgctgagcgccaccatcctgtacgagatcctgctgggcaaggccaccctgtacgccgtgctggtgtctgccctggtgctgatggctatggtcaagcggaaggacagccggggaagggccaagcgatctggatctggagcaacaaacttctcactactcaaacaagcaggtgacgtggaggagaatcccgggcctactagtaccatggactggatttggcgcatccttttccttgtcggcgctgctaccggcgcccattccgggccccaggtgcagctggttgaatctggcggaggactggttcagcctggcggatctctgagactgtcttgtgccgccagcggcaacatcaacagcagaaactgcatgggctggttcagacaggcccctggcaagggaagagaaggcgtggcagctatcggccaagtgaccggcagaacctactacgtggacagcgtgaagggcagattcaccatcagcctggacaacagcaagaacaccctgtacctccagatgaacagcctgagagccgaggacaccgccgtgtactattgtgctgctgcccctggctgtctgctgtctgcacttagaagcgccgactacagaaactggggccagggcacactggtcaccgtttcttctggatccggcggcggaggatctggcggaggcggatctgggggcggaggctctttcgaacaagttcagcttcaacagcctggcgctgagctggtcaaacctggcgcttctgtgaagatgagctgcaaagccagcggctacgccttcagcagctactggatcaactggatgaagcagaaacccggccagggactcgaatggatcggccaaatctatcccggcgacggcgacaccaactacaacggcaagttcaagggcagagccacactgaccgccgatacctctagcagcacagcctacatgcagctgagcagcctgaccagcgaagatagcgccgtgtacttctgtgcccggtccatcacaacagtcgtgggctgcgctatggactattggggccagggaacaagcgtgaccgtgtctagtacgcgtatccagaaccctgatcctgccgtgtaccagctgcgggatagcaagagcagcgacaagagcgtgtgtctgttcaccgacttcgacagccagaccaacgtgtcccagagcaaggactccgacgtgtacatcaccgataagtgcgtgctggacatgcggagcatggacttcaagagcaactccgccgtggcctggtccaacaagtccgatttcgcctgcgccaacgccttcaacaacagcattatccccgaggacacattcttcccaagccccgagagcagctgcgacgtgaagctggtggaaaagagcttcgagacagacaccaacctgaacttccagaacctgagcgtgatcggcttcagaatcctgctgctgaaagtggccggctttaacctgctgatgaccctgcggctgtggtccagc

SEQ ID NO: 33860 - DNA, 1461 bp, synthetic construct
  source 1..1461: mol_type = other DNA
atggccttaccagtgaccgccttgctcctgccgctggccttgctgctccacgccgccaggccggacatccagatgacacagagccctagcagcctgtctgccagcgtgggagacagagtgaccatcacatgcaaggccagcgaccacatcaacaactggctggcctggtatcagcagaagcctggacaggcccctaagctgctgatctacggcgctaccacactggaaacaggcgtgcccagcagattttctggcagcggctctggcaccgactacaccctgacaatatccagcctccagcctgaggacttcgccacctactactgtcagcagagctggaacaccccttggacattcggccagggcaccaagctggaaatcaagagaggcggaggcggaagtggaggcggaggatctggcggcggaggctctcaagttcagcttcaacagcctggcgctgagctggtcaaacctggcgcttctgtgaagatgagctgcaaagccagcggctacaccttcagcagctactggatcaactggatgaagcagaaacccggccagggactcgaatggatcggccaaatctatcccggcgacggcgacaccaactacaacggcaagttcaagggcagagccacactgaccgccgatacctctagcagcacagcctacatgcagctgagcagcctgaccagcgaagatagcgccgtgtacttctgtgcccggtccatcacaacagtcgtgggctgcgctatggactattggggccagggaacaagcgtgaccgtgtctagtacgcgtaaaattgaagttatgtatcctcctccttacctagacaatgagaagagcaatggaaccattatccatgtgaaagggaaacacctttgtccaagtcccctatttcccggaccttctaagcccttttgggtgctggtggtggttgggggagtcctggcttgctatagcttgctagtaacagtggcctttattattttctgggtgaggagtaagaggagcaggctcctgcacagtgactacatgaacatgactccacgccgccccggacccacccgcaagcattaccagccctatgccccaccacgcgacttcgcagcctatcgctccagagtgaagttcagcaggagcgcagacgcccccgcgtaccagcagggccagaaccagctctataacgagctcaatctaggacgaagagaggagtacgatgttttggacaagagacgtggccgggaccctgagatggggggaaagccgagaaggaagaaccctcaggaaggcctgtacaatgaactgcagaaagataagatggcggaggcctacagtgagattgggatgaaaggcgagcgccggaggggcaaggggcacgatggcctttaccagggtctcagtacagccaccaaggacacctacgacgcccttcacatgcaggccctgccccctcgc

SEQ ID NO: 33861 - DNA, 1479 bp, synthetic construct
  source 1..1479: mol_type = other DNA
atggccttaccagtgaccgccttgctcctgccgctggccttgctgctccacgccgccaggccggacatccagatgacacagagccctagcagcctgtctgccagcgtgggagacagagtgaccatcacatgcaaggccagcgaccacatcaacaactggctggcctggtatcagcagaagcctggacaggcccctaagctgctgatctacggcgctaccacactggaaacaggcgtgcccagcagattttctggcagcggctctggcaccgactacaccctgacaatatccagcctccagcctgaggacttcgccacctactactgtcagcagagctggaacaccccttggacattcggccagggcaccaagctggaaatcaagagaggcggaggcggaagtggaggcggaggatctggcggcggaggctctcaagttcagcttcaacagcctggcgctgagctggtcaaacctggcgcttctgtgaagatgagctgcaaagccagcggctacaccttcagcagctactggatcaactggatgaagcagaaacccggccagggactcgaatggatcggccaaatctatcccggcgacggcgacaccaactacaacggcaagttcaagggcagagccacactgaccgccgatacctctagcagcacagcctacatgcagctgagcagcctgaccagcgaagatagcgccgtgtacttctgtgcccggtccatcacaacagtcgtgggctgcgctatggactattggggccagggaacaagcgtgaccgtgtctagtacgcgtgcgaagcccaccacgacgccagcgccgcgaccaccaacaccggcgcccaccatcgcgtcgcagcccctgtccctgcgcccagaggcgtgccggccagcggcggggggcgcagtgcacacgagggggctggacttcgcctgtgacatctacatctgggcgcccttggccgggacttgtggggtccttctcctgtcactggttatcaccctttactgcaaacggggcagaaagaaactcctgtatatattcaaacaaccatttatgagaccagtacaaactactcaagaggaagatggctgtagctgccgatttccagaagaagaagaaggaggatgtgaactgagagtgaagttcagcaggagcgcagacgcccccgcgtaccagcagggccagaaccagctctataacgagctgaatctaggacgaagagaggagtacgatgttttggacaagagacgtggccgggaccctgagatggggggaaagccgagaaggaagaaccctcaggaaggcctgtacaatgaactgcagaaagataagatggcggaggcctacagtgagattgggatgaaaggcgagcgccggaggggcaaggggcacgatggcctttaccagggtctcagtacagccaccaaggacacctacgacgcccttcacatgcaggccctgccccctcgc

SEQ ID NO: 33862 - DNA, 1479 bp, synthetic construct
  source 1..1479: mol_type = other DNA
atggccttaccagtgaccgccttgctcctgccgctggccttgctgctccacgccgccaggccgcaagttcagcttcaacagcctggcgctgagctggtcaaacctggcgcttctgtgaagatgagctgcaaagccagcggctacaccttcagcagctactggatcaactggatgaagcagaaacccggccagggactcgaatggatcggccaaatctatcccggcgacggcgacaccaactacaacggcaagttcaagggcagagccacactgaccgccgatacctctagcagcacagcctacatgcagctgagcagcctgaccagcgaagatagcgccgtgtacttctgtgcccggtccatcacaacagtcgtgggctgcgctatggactattggggccagggaacaagcgtgaccgtgtctagtggcggaggcggaagtggaggcggaggatctggcggcggaggctctgacatccagatgacacagagccctagcagcctgtctgccagcgtgggagacagagtgaccatcacatgcaaggccagcgaccacatcaacaactggctggcctggtatcagcagaagcctggacaggcccctaagctgctgatctacggcgctaccacactggaaacaggcgtgcccagcagattttctggcagcggctctggcaccgactacaccctgacaatatccagcctccagcctgaggacttcgccacctactactgtcagcagagctggaacaccccttggacattcggccagggcaccaagctggaaatcaagagaacgcgtgcgaagcccaccacgacgccagcgccgcgaccaccaacaccggcgcccaccatcgcgtcgcagcccctgtccctgcgcccagaggcgtgccggccagcggcggggggcgcagtgcacacgagggggctggacttcgcctgtgacatctacatctgggcgcccttggccgggacttgtggggtccttctcctgtcactggttatcaccctttactgcaaacggggcagaaagaaactcctgtatatattcaaacaaccatttatgagaccagtacaaactactcaagaggaagatggctgtagctgccgatttccagaagaagaagaaggaggatgtgaactgagagtgaagttcagcaggagcgcagacgcccccgcgtaccagcagggccagaaccagctctataacgagctgaatctaggacgaagagaggagtacgatgttttggacaagagacgtggccgggaccctgagatggggggaaagccgagaaggaagaaccctcaggaaggcctgtacaatgaactgcagaaagataagatggcggaggcctacagtgagattgggatgaaaggcgagcgccggaggggcaaggggcacgatggcctttaccagggtctcagtacagccaccaaggacacctacgacgcccttcacatgcaggccctgccccctcgc

SEQ ID NO: 33863 - DNA, 1878 bp, synthetic construct
  source 1..1878: mol_type = other DNA
atggccttaccagtgaccgccttgctcctgccgctggccttgctgctccacgccgccaggccggacatccagatgacacagagccctagcagcctgtctgccagcgtgggagacagagtgaccatcacatgcaaggccagcgaccacatcaacaactggctggcctggtatcagcagaagcctggacaggcccctaagctgctgatctacggcgctaccacactggaaacaggcgtgcccagcagattttctggcagcggctctggcaccgactacaccctgacaatatccagcctccagcctgaggacttcgccacctactactgtcagcagagctggaacaccccttggacattcggccagggcaccaagctggaaatcaagagactcgagatccagaaccctgatcctgccgtgtaccagctgcgggatagcaagagcagcgacaagagcgtgtgtctgttcaccgacttcgacagccagaccaacgtgtcccagagcaaggactccgacgtgtacatcaccgataagtgcgtgctggacatgcggagcatggacttcaagagcaactccgccgtggcctggtccaacaagtccgatttcgcctgcgccaacgccttcaacaacagcattatccccgaggacacattcttcccaagcagcgacgtgccctgcgacgtgaagctggtggaaaagagcttcgagacagacaccaacctgaacttccagaacctgagcgtgatcggcttcagaatcctgctgctgaaagtggccggctttaacctgctgatgaccctgcggctgtggtccagccgcgccaagagaagcggatctggcgtgaagcagaccctgaatttcgacctgctgaagctggctggcgacgtggaatccaacccaggccctactagtatggactggatttggcgcatccttttccttgtcggcgctgctaccggcgcgcattccttcgaacaagttcagcttcaacagcctggcgctgagctggtcaaacctggcgcttctgtgaagatgagctgcaaagccagcggctacaccttcagcagctactggatcaactggatgaagcagaaacccggccagggactcgaatggatcggccaaatctatcccggcgacggcgacaccaactacaacggcaagttcaagggcagagccacactgaccgccgatacctctagcagcacagcctacatgcagctgagcagcctgaccagcgaagatagcgccgtgtacttctgtgcccggtccatcacaacagtcgtgggctgcgctatggactattggggccagggaacaagcgtgaccgtgtctagtacgcgtgaggacctgaagaacgtgttcccacctgaggtggccgtgttcgagcctagcaaggccgagatcgcccacacccagaaagccaccctcgtgtgcctggctaccggcttctaccccgaccatgtggaactgtcttggtgggtcaacggcaaagaggtgcacagcggcgtgtgtaccgacccccagccactgaaagaacagcccgccctgaacgacagccggtactgcctgagcagcagactgagagtgtccgccaccttctggcagaacccccggaaccacttcagatgccaggtgcagttctacggcctgagcgagaacgacgagtggacccaggacagagccaagcccgtgacccagatcgtgtctgccgaagcctggggcagagccgattgcggcatcaccagcgccagctaccaccagggcgtgctgagcgccaccatcctgtacgagatcctgctgggcaaggccaccctgtacgccgtgctggtgtctgccctggtgctgatggctatggtcaagcggaaggacagccgggga

SEQ ID NO: 33864 - DNA, 1866 bp, synthetic construct
  source 1..1866: mol_type = other DNA
atggccttaccagtgaccgccttgctcctgccgctggccttgctgctccacgccgccaggccggacatccagatgacacagagccctagcagcctgtctgccagcgtgggagacagagtgaccatcacatgcaaggccagcgaccacatcaacaactggctggcctggtatcagcagaagcctggacaggcccctaagctgctgatctacggcgctaccacactggaaacaggcgtgcccagcagattttctggcagcggctctggcaccgactacaccctgacaatatccagcctccagcctgaggacttcgccacctactactgtcagcagagctggaacaccccttggacattcggccagggcaccaagctggaaatcaagagactcgaggacctgaagaacgtgttcccacctgaggtggccgtgttcgagcctagcaaggccgagatcgcccacacccagaaagccaccctcgtgtgcctggctaccggcttctaccccgaccatgtggaactgtcttggtgggtcaacggcaaagaggtgcacagcggcgtgtgtaccgacccccagccactgaaagaacagcccgccctgaacgacagccggtactgcctgagcagcagactgagagtgtccgccaccttctggcagaacccccggaaccacttcagatgccaggtgcagttctacggcctgagcgagaacgacgagtggacccaggacagagccaagcccgtgacccagatcgtgtctgccgaagcctggggcagagccgattgcggcatcaccagcgccagctaccaccagggcgtgctgagcgccaccatcctgtacgagatcctgctgggcaaggccaccctgtacgccgtgctggtgtctgccctggtgctgatggctatggtcaagcggaaggacagccggggaagggccaagcgatctggatctggagcaacaaacttctcactactcaaacaagcaggtgacgtggaggagaatcccgggcctactagtatggactggatttggcgcatccttttccttgtcggcgctgctaccggcgcgcattccttcgaacaagttcagcttcaacagcctggcgctgagctggtcaaacctggcgcttctgtgaagatgagctgcaaagccagcggctacaccttcagcagctactggatcaactggatgaagcagaaacccggccagggactcgaatggatcggccaaatctatcccggcgacggcgacaccaactacaacggcaagttcaagggcagagccacactgaccgccgatacctctagcagcacagcctacatgcagctgagcagcctgaccagcgaagatagcgccgtgtacttctgtgcccggtccatcacaacagtcgtgggctgcgctatggactattggggccagggaacaagcgtgaccgtgtctagtacgcgtatccagaaccctgatcctgccgtgtaccagctgcgggatagcaagagcagcgacaagagcgtgtgtctgttcaccgacttcgacagccagaccaacgtgtcccagagcaaggactccgacgtgtacatcaccgataagtgcgtgctggacatgcggagcatggacttcaagagcaactccgccgtggcctggtccaacaagtccgatttcgcctgcgccaacgccttcaacaacagcattatccccgaggacacattcttcccaagcagcgacgtgccctgcgacgtgaagctggtggaaaagagcttcgagacagacaccaacctgaacttccagaacctgagcgtgatcggcttcagaatcctgctgctgaaagtggccggctttaacctgctgatgaccctgcggctgtggtccagc

SEQ ID NO: 33865 - DNA, 1866 bp, synthetic construct
  source 1..1866: mol_type = other DNA
atggccttaccagtgaccgccttgctcctgccgctggccttgctgctccacgccgccaggccggacatccagatgacacagagccctagcagcctgtctgccagcgtgggagacagagtgaccatcacatgcaaggccagcgaccacatcaacaactggctggcctggtatcagcagaagcctggacaggcccctaagctgctgatctacggcgctaccacactggaaacaggcgtgcccagcagattttctggcagcggctctggcaccgactacaccctgacaatatccagcctccagcctgaggacttcgccacctactactgtcagcagagctggaacaccccttggacattcggccagggcaccaagctggaaatcaagagactcgaggacctgaagaacgtgttcccacctgaggtggccgtgttcgagcctagcgaggccgagatcagccacacccagaaagccaccctcgtgtgcctggctaccggcttctaccccgaccatgtggaactgtcttggtgggtcaacggcaaagaggtgcacagcggcgtgtgtaccgacccccagccactgaaagaacagcccgccctgaacgacagccggtactgcctgagcagcagactgagagtgtccgccaccttctggcagaacccccggaaccacttcagatgccaggtgcagttctacggcctgagcgagaacgacgagtggacccaggacagagccaagcccgtgacccagatcgtgtctgccgaagcctggggcagagccgattgcggctttaccagcgagagctaccagcagggcgtgctgagcgccaccatcctgtacgagatcctgctgggcaaggccaccctgtacgccgtgctggtgtctgccctggtgctgatggctatggtcaagcggaaggacagccggggaagggccaagcgatctggatctggagcaacaaacttctcactactcaaacaagcaggtgacgtggaggagaatcccgggcctactagtatggactggatttggcgcatccttttccttgtcggcgctgctaccggcgcgcattccttcgaacaagttcagcttcaacagcctggcgctgagctggtcaaacctggcgcttctgtgaagatgagctgcaaagccagcggctacaccttcagcagctactggatcaactggatgaagcagaaacccggccagggactcgaatggatcggccaaatctatcccggcgacggcgacaccaactacaacggcaagttcaagggcagagccacactgaccgccgatacctctagcagcacagcctacatgcagctgagcagcctgaccagcgaagatagcgccgtgtacttctgtgcccggtccatcacaacagtcgtgggctgcgctatggactattggggccagggaacaagcgtgaccgtgtctagtacgcgtatccagaaccctgatcctgccgtgtaccagctgcgggatagcaagagcagcgacaagagcgtgtgtctgttcaccgacttcgacagccagaccaacgtgtcccagagcaaggactccgacgtgtacatcaccgataagtgcgtgctggacatgcggagcatggacttcaagagcaactccgccgtggcctggtccaacaagtccgatttcgcctgcgccaacgccttcaacaacagcattatccccgaggacacattcttcccaagccccgagagcagctgcgacgtgaagctggtggaaaagagcttcgagacagacaccaacctgaacttccagaacctgagcgtgatcggcttcagaatcctgctgctgaaagtggccggctttaacctgctgatgaccctgcggctgtggtccagc

SEQ ID NO: 33866 - DNA, 1878 bp, synthetic construct
  source 1..1878: mol_type = other DNA
atggccttaccagtgaccgccttgctcctgccgctggccttgctgctccacgccgccaggccggacatccagatgacacagagccctagcagcctgtctgccagcgtgggagacagagtgaccatcacatgcaaggccagcgaccacatcaacaactggctggcctggtatcagcagaagcctggacaggcccctaagctgctgatctacggcgctaccacactggaaacaggcgtgcccagcagattttctggcagcggctctggcaccgactacaccctgacaatatccagcctccagcctgaggacttcgccacctactactgtcagcagagctggaacaccccttggacattcggccagggcaccaagctggaaatcaagagactcgagatccagaaccctgatcctgccgtgtaccagctgcgggatagcaagagcagcgacaagagcgtgtgtctgttcaccgacttcgacagccagaccaacgtgtcccagagcaaggactccgacgtgtacatcaccgataagtgcgtgctggacatgcggagcatggacttcaagagcaactccgccgtggcctggtccaacaagtccgatttcgcctgcgccaacgccttcaacaacagcattatccccgaggacacattcttcccaagccccgagagcagctgcgacgtgaagctggtggaaaagagcttcgagacagacaccaacctgaacttccagaacctgagcgtgatcggcttcagaatcctgctgctgaaagtggccggctttaacctgctgatgaccctgcggctgtggtccagccgcgccaagagaagcggatctggcgtgaagcagaccctgaatttcgacctgctgaagctggctggcgacgtggaatccaacccaggccctactagtatggactggatttggcgcatccttttccttgtcggcgctgctaccggcgcgcattccttcgaacaagttcagcttcaacagcctggcgctgagctggtcaaacctggcgcttctgtgaagatgagctgcaaagccagcggctacaccttcagcagctactggatcaactggatgaagcagaaacccggccagggactcgaatggatcggccaaatctatcccggcgacggcgacaccaactacaacggcaagttcaagggcagagccacactgaccgccgatacctctagcagcacagcctacatgcagctgagcagcctgaccagcgaagatagcgccgtgtacttctgtgcccggtccatcacaacagtcgtgggctgcgctatggactattggggccagggaacaagcgtgaccgtgtctagtacgcgtgaggacctgaagaacgtgttcccacctgaggtggccgtgttcgagcctagcgaggccgagatcagccacacccagaaagccaccctcgtgtgcctggctaccggcttctaccccgaccatgtggaactgtcttggtgggtcaacggcaaagaggtgcacagcggcgtgtgtaccgacccccagccactgaaagaacagcccgccctgaacgacagccggtactgcctgagcagcagactgagagtgtccgccaccttctggcagaacccccggaaccacttcagatgccaggtgcagttctacggcctgagcgagaacgacgagtggacccaggacagagccaagcccgtgacccagatcgtgtctgccgaagcctggggcagagccgattgcggctttaccagcgagagctaccagcagggcgtgctgagcgccaccatcctgtacgagatcctgctgggcaaggccaccctgtacgccgtgctggtgtctgccctggtgctgatggctatggtcaagcggaaggacagccgggga

SEQ ID NO: 33867 - DNA, 1914 bp, synthetic construct
  source 1..1914: mol_type = other DNA
atggccttaccagtgaccgccttgctcctgccgctggccttgctgctccacgccgccaggccgctcgaggaggacctgaagaacgtgttcccacctgaggtggccgtgttcgagcctagcaaggccgagatcgcccacacccagaaagccaccctcgtgtgcctggctaccggcttctaccccgaccatgtggaactgtcttggtgggtcaacggcaaagaggtgcacagcggcgtgtgtaccgacccccagccactgaaagaacagcccgccctgaacgacagccggtactgcctgagcagcagactgagagtgtccgccaccttctggcagaacccccggaaccacttcagatgccaggtgcagttctacggcctgagcgagaacgacgagtggacccaggacagagccaagcccgtgacccagatcgtgtctgccgaagcctggggcagagccgattgcggcatcaccagcgccagctaccaccagggcgtgctgagcgccaccatcctgtacgagatcctgctgggcaaggccaccctgtacgccgtgctggtgtctgccctggtgctgatggctatggtcaagcggaaggacagccggggaagggccaagcgatctggatctggagcaacaaacttctcactactcaaacaagcaggtgacgtggaggagaatcccgggcctactagcatggccttaccagtgaccgccttgctcctgccgctggccttgctgctccacgccgccaggccggacatccagatgacacagagccctagcagcctgtctgccagcgtgggagacagagtgaccatcacatgcaaggccagcgaccacatcaacaactggctggcctggtatcagcagaagcctggacaggcccctaagctgctgatctacggcgctaccacactggaaacaggcgtgcccagcagattttctggcagcggctctggcaccgactacaccctgacaatatccagcctccagcctgaggacttcgccacctactactgtcagcagagctggaacaccccttggacattcggccagggcaccaagctggaaatcaagagaggcggaggcggaagtggaggcggaggatctggcggcggaggctctcaagttcagcttcaacagcctggcgctgagctggtcaaacctggcgcttctgtgaagatgagctgcaaagccagcggctacaccttcagcagctactggatcaactggatgaagcagaaacccggccagggactcgaatggatcggccaaatctatcccggcgacggcgacaccaactacaacggcaagttcaagggcagagccacactgaccgccgatacctctagcagcacagcctacatgcagctgagcagcctgaccagcgaagatagcgccgtgtacttctgtgcccggtccatcacaacagtcgtgggctgcgctatggactattggggccagggaacaagcgtgaccgtgtctagtacgcgtatccagaaccctgatcctgccgtgtaccagctgcgggatagcaagagcagcgacaagagcgtgtgtctgttcaccgacttcgacagccagaccaacgtgtcccagagcaaggactccgacgtgtacatcaccgataagtgcgtgctggacatgcggagcatggacttcaagagcaactccgccgtggcctggtccaacaagtccgatttcgcctgcgccaacgccttcaacaacagcattatccccgaggacacattcttcccaagcagcgacgtgccctgcgacgtgaagctggtggaaaagagcttcgagacagacaccaacctgaacttccagaacctgagcgtgatcggcttcagaatcctgctgctgaaagtggccggctttaacctgctgatgaccctgcggctgtggtccagc

SEQ ID NO: 33868 - DNA, 1935 bp, synthetic construct
  source 1..1935: mol_type = other DNA
atggccttaccagtgaccgccttgctcctgccgctggccttgctgctccacgccgccaggccgctcgagggctccggcgatcgccctgatcctgccgtgtaccagctgcgggatagcaagagcagcgacaagagcgtgtgtctgttcaccgacttcgacagccagaccaacgtgtcccagagcaaggactccgacgtgtacatcaccgataagtgcgtgctggacatgcggagcatggacttcaagagcaactccgccgtggcctggtccaacaagtccgatttcgcctgcgccaacgccttcaacaacagcattatccccgaggacacattcttcccaagccccgagagcagctgcgacgtgaagctggtggaaaagagcttcgagacagacaccaacctgaacttccagaacctgagcgtgatcggcttcagaatcctgctgctgaaagtggccggctttaacctgctgatgaccctgcggctgtggtccagctctagtcgcgccaagagaagcggatctggcgtgaagcagaccctgaatttcgacctgctgaagctggctggcgacgtggaatccaacccaggccccactagcatggccttaccagtgaccgccttgctcctgccgctggccttgctgctccacgccgccaggccggacatccagatgacacagagccctagcagcctgtctgccagcgtgggagacagagtgaccatcacatgcaaggccagcgaccacatcaacaactggctggcctggtatcagcagaagcctggacaggcccctaagctgctgatctacggcgctaccacactggaaacaggcgtgcccagcagattttctggcagcggctctggcaccgactacaccctgacaatatccagcctccagcctgaggacttcgccacctactactgtcagcagagctggaacaccccttggacattcggccagggcaccaagctggaaatcaagagaggcggaggcggaagtggaggcggaggatctggcggcggaggctctcaagttcagcttcaacagcctggcgctgagctggtcaaacctggcgcttctgtgaagatgagctgcaaagccagcggctacaccttcagcagctactggatcaactggatgaagcagaaacccggccagggactcgaatggatcggccaaatctatcccggcgacggcgacaccaactacaacggcaagttcaagggcagagccacactgaccgccgatacctctagcagcacagcctacatgcagctgagcagcctgaccagcgaagatagcgccgtgtacttctgtgcccggtccatcacaacagtcgtgggctgcgctatggactattggggccagggaacaagcgtgaccgtgtctagtacgcgtgaggacctgaagaacgtgttcccacctgaggtggccgtgttcgagcctagcgaggccgagatcagccacacccagaaagccaccctcgtgtgcctggctaccggcttctaccccgaccatgtggaactgtcttggtgggtcaacggcaaagaggtgcacagcggcgtgtgtaccgacccccagccactgaaagaacagcccgccctgaacgacagccggtactgcctgagcagcagactgagagtgtccgccaccttctggcagaacccccggaaccacttcagatgccaggtgcagttctacggcctgagcgagaacgacgagtggacccaggacagagccaagcccgtgacccagatcgtgtctgccgaagcctggggcagagccgattgcggctttaccagcgagagctaccagcagggcgtgctgagcgccaccatcctgtacgagatcctgctgggcaaggccaccctgtacgccgtgctggtgtctgccctggtgctgatggctatggtcaagcggaaggacagccgggga

SEQ ID NO: 33869 - DNA, 1866 bp, synthetic construct
  source 1..1866: mol_type = other DNA
atggccttaccagtgaccgccttgctcctgccgctggccttgctgctccacgccgccaggccggacatccagatgacacagagccctagcagcctgtctgccagcgtgggagacagagtgaccatcacatgcaaggccagcgaccacatcaacaactggctggcctggtatcagcagaagcctggacaggcccctaagctgctgatctacggcgctaccacactggaaacaggcgtgcccagcagattttctggcagcggctctggcaccgactacaccctgacaatatccagcctccagcctgaggacttcgccacctactactgtcagcagagctggaacaccccttggacattcggccagggcaccaagctggaaatcaagagactcgaggacctgaagaacgtgttcccacctgaggtggccgtgttcgagcctagcgaggccgagatcagccacacccagaaagccaccctcgtgtgcctggctaccggcttctaccccgaccatgtggaactgtcttggtgggtcaacggcaaagaggtgcacagcggcgtgtctaccgacccccagccactgaaagaacagcccgccctgaacgacagccggtactgcctgagcagcagactgagagtgtccgccaccttctggcagaacccccggaaccacttcagatgccaggtgcagttctacggcctgagcgagaacgacgagtggacccaggacagagccaagcccgtgacccagatcgtgtctgccgaagcctggggcagagccgattgcggctttaccagcgagagctaccagcagggcgtgctgagcgccaccatcctgtacgagatcctgctgggcaaggccaccctgtacgccgtgctggtgtctgccctggtgctgatggctatggtcaagcggaaggacagccggggaagggccaagcgatctggatctggagcaacaaacttctcactactcaaacaagcaggtgacgtggaggagaatcccgggcctactagtatggactggatttggcgcatccttttccttgtcggcgctgctaccggcgcgcattccttcgaacaagttcagcttcaacagcctggcgctgagctggtcaaacctggcgcttctgtgaagatgagctgcaaagccagcggctacaccttcagcagctactggatcaactggatgaagcagaaacccggccagggactcgaatggatcggccaaatctatcccggcgacggcgacaccaactacaacggcaagttcaagggcagagccacactgaccgccgatacctctagcagcacagcctacatgcagctgagcagcctgaccagcgaagatagcgccgtgtacttctgtgcccggtccatcacaacagtcgtgggctgcgctatggactattggggccagggaacaagcgtgaccgtgtctagtacgcgtatccagaaccctgatcctgccgtgtaccagctgcgggatagcaagagcagcgacaagagcgtgtgtctgttcaccgacttcgacagccagaccaacgtgtcccagagcaaggactccgacgtgtacatcaccgataagaccgtgctggacatgcggagcatggacttcaagagcaactccgccgtggcctggtccaacaagtccgatttcgcctgcgccaacgccttcaacaacagcattatccccgaggacacattcttcccaagccccgagagcagctgcgacgtgaagctggtggaaaagagcttcgagacagacaccaacctgaacttccagaacctgagcgtgatcggcttcagaatcctgctgctgaaagtggccggctttaacctgctgatgaccctgcggctgtggtccagc

SEQ ID NO: 33870 - DNA, 1890 bp, synthetic construct
  source 1..1890: mol_type = other DNA
atggccttaccagtgaccgccttgctcctgccgctggccttgctgctccacgccgccaggccggacatccagatgacacagagccctagcagcctgtctgccagcgtgggagacagagtgaccatcacatgcaaggccagcgaccacatcaacaactggctggcctggtatcagcagaagcctggacaggcccctaagctgctgatctacggcgctaccacactggaaacaggcgtgcccagcagattttctggcagcggctctggcaccgactacaccctgacaatatccagcctccagcctgaggacttcgccacctactactgtcagcagagctggaacaccccttggacattcggccagggcaccaagctggaaatcaagagactcgaggacaagcagctggacgccgacgtgtcccccaagcctaccatcttcctgccctctatcgccgagacaaagctccagaaggccggcacctacctgtgcctgctggaaaagttcttcccagatgtgattaagatccactggcaggaaaagaagtccaacaccatcctgggcagccaggaaggcaacaccatgaagaccaacgacacctacatgaagttcagctggctgaccgtgcccgagaagtccctggacaaagaacacagatgcatcgtgcggcacgaaaacaacaagaacggcgtggaccaggaaatcatcttcccacccatcaagaccgatgtgattacaatggaccccaaggacaactgctccaaggacgccaacgataccctgctgctccagctgaccaacaccagcgcctactacatgtacttgttgctgctgctgaagtccgtggtgtacttcgccatcatcacatgctgcctgctgcggagaaccgccttctgctgcaacggcgagaagtctagggccaagcgatctggatctggagcaacaaacttctcactactcaaacaagcaggtgacgtggaggagaatcccgggcctactagtatggactggatttggcgcatccttttccttgtcggcgctgctaccggcgcgcattccttcgaacaagttcagcttcaacagcctggcgctgagctggtcaaacctggcgcttctgtgaagatgagctgcaaagccagcggctacaccttcagcagctactggatcaactggatgaagcagaaacccggccagggactcgaatggatcggccaaatctatcccggcgacggcgacaccaactacaacggcaagttcaagggcagagccacactgaccgccgatacctctagcagcacagcctacatgcagctgagcagcctgaccagcgaagatagcgccgtgtacttctgtgcccggtccatcacaacagtcgtgggctgcgctatggactattggggccagggaacaagcgtgaccgtgtctagtacgcgtagccagcctcacaccaagcccagcgtgttcgtgatgaagaacggcaccaacgtggcctgcctcgtgaaagagttctaccccaaggacatcaggatcaacctggtgtccagcaagaagatcaccgagttcgaccccgccatcgtgatctcccccagcggcaagtacaacgccgtgaagctggggaagtacgaggacagcaacagcgtgacctgctccgtgcagcacgacaacaagaccgtgcacagcaccgactttgaagtgaaaaccgactccaccgaccacgtgaagcccaaagagacagagaacaccaagcagcccagcaagagctgccacaagcccaaggccatcgtgcacaccgagaaagtgaacatgatgagcctgaccgtgctgggcctgcggatgctgttcgccaaaaccgtggccgtgaacttcctgctgaccgccaagctgttcttcctc

SEQ ID NO: 33871 - DNA, 1890 bp, synthetic construct
  source 1..1890: mol_type = other DNA
atggccttaccagtgaccgccttgctcctgccgctggccttgctgctccacgccgccaggccggacatccagatgacacagagccctagcagcctgtctgccagcgtgggagacagagtgaccatcacatgcaaggccagcgaccacatcaacaactggctggcctggtatcagcagaagcctggacaggcccctaagctgctgatctacggcgctaccacactggaaacaggcgtgcccagcagattttctggcagcggctctggcaccgactacaccctgacaatatccagcctccagcctgaggacttcgccacctactactgtcagcagagctggaacaccccttggacattcggccagggcaccaagctggaaatcaagagactcgagagccagcctcacaccaagcccagcgtgttcgtgatgaagaacggcaccaacgtggcctgcctcgtgaaagagttctaccccaaggacatcaggatcaacctggtgtccagcaagaagatcaccgagttcgaccccgccatcgtgatctcccccagcggcaagtacaacgccgtgaagctggggaagtacgaggacagcaacagcgtgacctgctccgtgcagcacgacaacaagaccgtgcacagcaccgactttgaagtgaaaaccgactccaccgaccacgtgaagcccaaagagacagagaacaccaagcagcccagcaagagctgccacaagcccaaggccatcgtgcacaccgagaaagtgaacatgatgagcctgaccgtgctgggcctgcggatgctgttcgccaaaaccgtggccgtgaacttcctgctgaccgccaagctgttcttcctcagggccaagcgatctggatctggagcaacaaacttctcactactcaaacaagcaggtgacgtggaggagaatcccgggcctactagtatggactggatttggcgcatccttttccttgtcggcgctgctaccggcgcgcattccttcgaacaagttcagcttcaacagcctggcgctgagctggtcaaacctggcgcttctgtgaagatgagctgcaaagccagcggctacaccttcagcagctactggatcaactggatgaagcagaaacccggccagggactcgaatggatcggccaaatctatcccggcgacggcgacaccaactacaacggcaagttcaagggcagagccacactgaccgccgatacctctagcagcacagcctacatgcagctgagcagcctgaccagcgaagatagcgccgtgtacttctgtgcccggtccatcacaacagtcgtgggctgcgctatggactattggggccagggaacaagcgtgaccgtgtctagtacgcgtgacaagcagctggacgccgacgtgtcccccaagcctaccatcttcctgccctctatcgccgagacaaagctccagaaggccggcacctacctgtgcctgctggaaaagttcttcccagatgtgattaagatccactggcaggaaaagaagtccaacaccatcctgggcagccaggaaggcaacaccatgaagaccaacgacacctacatgaagttcagctggctgaccgtgcccgagaagtccctggacaaagaacacagatgcatcgtgcggcacgaaaacaacaagaacggcgtggaccaggaaatcatcttcccacccatcaagaccgatgtgattacaatggaccccaaggacaactgctccaaggacgccaacgataccctgctgctccagctgaccaacaccagcgcctactacatgtacttgttgctgctgctgaagtccgtggtgtacttcgccatcatcacatgctgcctgctgcggagaaccgccttctgctgcaacggcgagaagtct

SEQ ID NO: 33872 - DNA, 1935 bp, synthetic construct
  source 1..1935: mol_type = other DNA
atggccttaccagtgaccgccttgctcctgccgctggccttgctgctccacgccgccaggccgctcgaggacaagcagctggacgccgacgtgtcccccaagcctaccatcttcctgccctctatcgccgagacaaagctccagaaggccggcacctacctgtgcctgctggaaaagttcttcccagatgtgattaagatccactggcaggaaaagaagtccaacaccatcctgggcagccaggaaggcaacaccatgaagaccaacgacacctacatgaagttcagctggctgaccgtgcccgagaagtccctggacaaagaacacagatgcatcgtgcggcacgaaaacaacaagaacggcgtggaccaggaaatcatcttcccacccatcaagaccgatgtgattacaatggaccccaaggacaactgctccaaggacgccaacgataccctgctgctccagctgaccaacaccagcgcctactacatgtacttgttgctgctgctgaagtccgtggtgtacttcgccatcatcacatgctgcctgctgcggagaaccgccttctgctgcaacggcgagaagtctagggccaagcgatctggatctggagcaacaaacttctcactactcaaacaagcaggtgacgtggaggagaatcccgggcctactagcatggccttaccagtgaccgccttgctcctgccgctggccttgctgctccacgccgccaggccggacatccagatgacacagagccctagcagcctgtctgccagcgtgggagacagagtgaccatcacatgcaaggccagcgaccacatcaacaactggctggcctggtatcagcagaagcctggacaggcccctaagctgctgatctacggcgctaccacactggaaacaggcgtgcccagcagattttctggcagcggctctggcaccgactacaccctgacaatatccagcctccagcctgaggacttcgccacctactactgtcagcagagctggaacaccccttggacattcggccagggcaccaagctggaaatcaagagaggcggaggcggaagtggaggcggaggatctggcggcggaggctctcaagttcagcttcaacagcctggcgctgagctggtcaaacctggcgcttctgtgaagatgagctgcaaagccagcggctacaccttcagcagctactggatcaactggatgaagcagaaacccggccagggactcgaatggatcggccaaatctatcccggcgacggcgacaccaactacaacggcaagttcaagggcagagccacactgaccgccgatacctctagcagcacagcctacatgcagctgagcagcctgaccagcgaagatagcgccgtgtacttctgtgcccggtccatcacaacagtcgtgggctgcgctatggactattggggccagggaacaagcgtgaccgtgtctagtacgcgtagccagcctcacaccaagcccagcgtgttcgtgatgaagaacggcaccaacgtggcctgcctcgtgaaagagttctaccccaaggacatcaggatcaacctggtgtccagcaagaagatcaccgagttcgaccccgccatcgtgatctcccccagcggcaagtacaacgccgtgaagctggggaagtacgaggacagcaacagcgtgacctgctccgtgcagcacgacaacaagaccgtgcacagcaccgactttgaagtgaaaaccgactccaccgaccacgtgaagcccaaagagacagagaacaccaagcagcccagcaagagctgccacaagcccaaggccatcgtgcacaccgagaaagtgaacatgatgagcctgaccgtgctgggcctgcggatgctgttcgccaaaaccgtggccgtgaacttcctgctgaccgccaagctgttcttcctc

SEQ ID NO: 33873 - DNA, 2397 bp, synthetic construct
  source 1..2397: mol_type = other DNA
atggccttaccagtgaccgccttgctcctgccgctggccttgctgctccacgccgccaggccggacatccagatgacacagagccctagcagcctgtctgccagcgtgggagacagagtgaccatcacatgcaaggccagcgaccacatcaacaactggctggcctggtatcagcagaagcctggacaggcccctaagctgctgatctacggcgctaccacactggaaacaggcgtgcccagcagattttctggcagcggctctggcaccgactacaccctgacaatatccagcctccagcctgaggacttcgccacctactactgtcagcagagctggaacaccccttggacattcggccagggcaccaagctggaaatcaagagaggacagcctaaggccaatcctaccgtgacactgttccctccaagcagcgaagaactccaggccaacaaggccacacttgtgtgcctgatctccgacttctaccctggggctgtgacagtggcttggaaggccgatggatctcctgtgaaagccggcgtggaaaccaccaagccatccaagcagagcaacaacaaatacgccgccagctcctacctgagcctgacacctgagcagtggaagtcccacagatcctacagctgccaagtgacccacgaaggcagcaccgtggaaaagacagtggcccctacagagtgcagcggatcccagagcttcggcctgctggaccccaagctgtgctacctgctggatggcatcctgttcatctacggcgtgatcctgaccgccctgttcctgagagtgaagttcagcagaagcgccgacgcccctgcctaccagcagggacagaaccaactgtacaacgagctgaacctgggcagacgggaagagtacgacgtgctggacaagcggagaggcagggaccctgagatgggcggaaagccccagcggagaaagaacccccaggaaggactgtataacgaactccagaaagacaagatggccgaagcctacagcgagatcggcatgaagggcgagcggagaagaggcaagggccacgatggcctgtaccagggcctgagcaccgccaccaaggacacctatgacgccctgcacatgcaggccctgcctccaagaagggccaagcgatctggatctggagcaacaaacttctcactactcaaacaagcaggtgacgtggaggagaatcccgggcctactagtatggactggatttggcgcatccttttccttgtcggcgctgctaccggcgcgcattccttcgaacaagttcagcttcaacagcctggcgctgagctggtcaaacctggcgcttctgtgaagatgagctgcaaagccagcggctacaccttcagcagctactggatcaactggatgaagcagaaacccggccagggactcgaatggatcggccaaatctatcccggcgacggcgacaccaactacaacggcaagttcaagggcagagccacactgaccgccgatacctctagcagcacagcctacatgcagctgagcagcctgaccagcgaagatagcgccgtgtacttctgtgcccggtccatcacaacagtcgtgggctgcgctatggactattggggccagggaacaagcgtgaccgtgtctagtgcctctacaaagggaccctccgtgtttcctctggctcccagcagcaagtctacaagcggaggaacagccgctctgggctgcctggtcaaggattactttcccgagcctgtgaccgtgtcctggaatagcggagcactgacaagcggcgtgcacacctttccagccgtgctgcaaagcagcggcctgtactctctgagcagcgtggtcacagtgcctagctctagcctgggcacccagacctacatctgcaatgtgaaccacaagcctagcaacaccaaggtggacaagagagtggaacccaagagctgtggtacccagagttttgggttgttggaccctaaattgtgctatctgttggacggaatcctgttcatttacggagtgatcctgaccgcattgttcctgcgggttaagttttccagatccgcagacgcacccgcttaccaacaagggcagaaccaactctacaatgaacttaatttggggcggagggaagagtacgacgttctggacaaaaggaggggacgagatcccgagatgggcggaaagcctcagcgaaggaagaatccgcaagaggggctttataacgaactccagaaagataaaatggcagaagcctatagtgagattgggatgaagggagaaaggaggaggggtaaaggtcacgatgggttgtaccaaggattgagcacagccactaaagatacctatgatgcgctccacatgcaggccctgccgccaaga

SEQ ID NO: 33874 - DNA, 2454 bp, synthetic construct
  source 1..2454: mol_type = other DNA
atggccttaccagtgaccgccttgctcctgccgctggccttgctgctccacgccgccaggccggacatccagatgacacagagccctagcagcctgtctgccagcgtgggagacagagtgaccatcacatgcaaggccagcgaccacatcaacaactggctggcctggtatcagcagaagcctggacaggcccctaagctgctgatctacggcgctaccacactggaaacaggcgtgcccagcagattttctggcagcggctctggcaccgactacaccctgacaatatccagcctccagcctgaggacttcgccacctactactgtcagcagagctggaacaccccttggacattcggccagggcaccaagctggaaatcaagagactcgaggacctgaagaacgtgttcccacctgaggtggccgtgttcgagcctagcgaggccgagatcagccacacccagaaagccaccctcgtgtgcctggctaccggcttctaccccgaccatgtggaactgtcttggtgggtcaacggcaaagaggtgcacagcggcgtgtctaccgacccccagccactgaaagaacagcccgccctgaacgacagccggtactgcctgagcagcagactgagagtgtccgccaccttctggcagaacccccggaaccacttcagatgccaggtgcagttctacggcctgagcgagaacgacgagtggacccaggacagagccaagcccgtgacccagatcgtgtctgccgaagcctggggcagagccgattgcggatcccagagcttcggcctgctggaccccaagctgtgctacctgctggatggcatcctgttcatctacggcgtgatcctgaccgccctgttcctgagagtgaagttcagcagaagcgccgacgcccctgcctaccagcagggacagaaccaactgtacaacgagctgaacctgggcagacgggaagagtacgacgtgctggacaagcggagaggcagggaccctgagatgggcggaaagccccagcggagaaagaacccccaggaaggactgtataacgaactccagaaagacaagatggccgaagcctacagcgagatcggcatgaagggcgagcggagaagaggcaagggccacgatggcctgtaccagggcctgagcaccgccaccaaggacacctatgacgccctgcacatgcaggccctgcctccaagaagggccaagcgatctggatctggagcaacaaacttctcactactcaaacaagcaggtgacgtggaggagaatcccgggcctactagtatggactggatttggcgcatccttttccttgtcggcgctgctaccggcgcgcattccttcgaacaagttcagcttcaacagcctggcgctgagctggtcaaacctggcgcttctgtgaagatgagctgcaaagccagcggctacaccttcagcagctactggatcaactggatgaagcagaaacccggccagggactcgaatggatcggccaaatctatcccggcgacggcgacaccaactacaacggcaagttcaagggcagagccacactgaccgccgatacctctagcagcacagcctacatgcagctgagcagcctgaccagcgaagatagcgccgtgtacttctgtgcccggtccatcacaacagtcgtgggctgcgctatggactattggggccagggaacaagcgtgaccgtgtctagtacgcgtatccagaaccctgatcctgccgtgtaccagctgcgggatagcaagagcagcgacaagagcgtgtgtctgttcaccgacttcgacagccagaccaacgtgtcccagagcaaggactccgacgtgtacatcaccgataagaccgtgctggacatgcggagcatggacttcaagagcaactccgccgtggcctggtccaacaagtccgatttcgcctgcgccaacgccttcaacaacagcattatccccgaggacacattcttcccaagccccgagagcagctgcggtacccagagttttgggttgttggaccctaaattgtgctatctgttggacggaatcctgttcatttacggagtgatcctgaccgcattgttcctgcgggttaagttttccagatccgcagacgcacccgcttaccaacaagggcagaaccaactctacaatgaacttaatttggggcggagggaagagtacgacgttctggacaaaaggaggggacgagatcccgagatgggcggaaagcctcagcgaaggaagaatccgcaagaggggctttataacgaactccagaaagataaaatggcagaagcctatagtgagattgggatgaagggagaaaggaggaggggtaaaggtcacgatgggttgtaccaaggattgagcacagccactaaagatacctatgatgcgctccacatgcaggccctgccgccaaga

SEQ ID NO: 33875 - DNA, 2580 bp, synthetic construct
  source 1..2580: mol_type = other DNA
atggccttaccagtgaccgccttgctcctgccgctggccttgctgctccacgccgccaggccggacatccagatgacacagagccctagcagcctgtctgccagcgtgggagacagagtgaccatcacatgcaaggccagcgaccacatcaacaactggctggcctggtatcagcagaagcctggacaggcccctaagctgctgatctacggcgctaccacactggaaacaggcgtgcccagcagattttctggcagcggctctggcaccgactacaccctgacaatatccagcctccagcctgaggacttcgccacctactactgtcagcagagctggaacaccccttggacattcggccagggcaccaagctggaaatcaagagactcgaggaggacctgaagaacgtgttcccacctgaggtggccgtgttcgagcctagcgaggccgagatcagccacacccagaaagccaccctcgtgtgcctggctaccggcttctaccccgaccatgtggaactgtcttggtgggtcaacggcaaagaggtgcacagcggcgtgtctaccgacccccagccactgaaagaacagcccgccctgaacgacagccggtactgcctgagcagcagactgagagtgtccgccaccttctggcagaacccccggaaccacttcagatgccaggtgcagttctacggcctgagcgagaacgacgagtggacccaggacagagccaagcccgtgacccagatcgtgtctgccgaagcctggggcagagccgattgcggatcccagagcttcggcctgctggaccccaagctgtgctacctgctggatggcatcctgttcatctacggcgtgatcctgaccgccctgttcctgagagtgaagttcagcagaagcgccgacgcccctgcctaccagcagggacagaaccaactgtacaacgagctgaacctgggcagacgggaagagtacgacgtgctggacaagcggagaggcagggaccctgagatgggcggaaagccccagcggagaaagaacccccaggaaggactgtataacgaactccagaaagacaagatggccgaagcctacagcgagatcggcatgaagggcgagcggagaagaggcaagggccacgatggcctgtaccagggcctgagcaccgccaccaaggacacctatgacgccctgcacatgcaggccctgcctccaagaagggccaagcgatctggatctggagcaacaaacttctcactactcaaacaagcaggtgacgtggaggagaatcccgggcctactagtatggactggatttggcgcatccttttccttgtcggcgctgctaccggcgcgcattccttcgaacaagttcagcttcaacagcctggcgctgagctggtcaaacctggcgcttctgtgaagatgagctgcaaagccagcggctacaccttcagcagctactggatcaactggatgaagcagaaacccggccagggactcgaatggatcggccaaatctatcccggcgacggcgacaccaactacaacggcaagttcaagggcagagccacactgaccgccgatacctctagcagcacagcctacatgcagctgagcagcctgaccagcgaagatagcgccgtgtacttctgtgcccggtccatcacaacagtcgtgggctgcgctatggactattggggccagggaacaagcgtgaccgtgtctagtacgcgtatccagaaccctgatcctgccgtgtaccagctgcgggatagcaagagcagcgacaagagcgtgtgtctgttcaccgacttcgacagccagaccaacgtgtcccagagcaaggactccgacgtgtacatcaccgataagaccgtgctggacatgcggagcatggacttcaagagcaactccgccgtggcctggtccaacaagtccgatttcgcctgcgccaacgccttcaacaacagcattatccccgaggacacattcttcccaagccccgagagcagctgcggtacccagagttttgggttgttggaccctaaattgtgctatctgttggacggaatcctgttcatttacggagtgatcctgaccgcattgttcctgaggagcaagcggtcacggctgctccacagcgattacatgaatatgacaccacgaagaccgggtcctactcgcaaacactaccaaccctacgcacctccccgcgactttgcagcgtaccgatctcgggttaagttttccagatccgcagacgcacccgcttaccaacaagggcagaaccaactctacaatgaacttaatttggggcggagggaagagtacgacgttctggacaaaaggaggggacgagatcccgagatgggcggaaagcctcagcgaaggaagaatccgcaagaggggctttataacgaactccagaaagataaaatggcagaagcctatagtgagattgggatgaagggagaaaggaggaggggtaaaggtcacgatgggttgtaccaaggattgagcacagccactaaagatacctatgatgcgctccacatgcaggccctgccgccaaga

SEQ ID NO: 33876 - DNA, 2709 bp, synthetic construct
  source 1..2709: mol_type = other DNA
atggccttaccagtgaccgccttgctcctgccgctggccttgctgctccacgccgccaggccggacatccagatgacacagagccctagcagcctgtctgccagcgtgggagacagagtgaccatcacatgcaaggccagcgaccacatcaacaactggctggcctggtatcagcagaagcctggacaggcccctaagctgctgatctacggcgctaccacactggaaacaggcgtgcccagcagattttctggcagcggctctggcaccgactacaccctgacaatatccagcctccagcctgaggacttcgccacctactactgtcagcagagctggaacaccccttggacattcggccagggcaccaagctggaaatcaagagactcgaggaggacctgaagaacgtgttcccacctgaggtggccgtgttcgagcctagcgaggccgagatcagccacacccagaaagccaccctcgtgtgcctggctaccggcttctaccccgaccatgtggaactgtcttggtgggtcaacggcaaagaggtgcacagcggcgtgtctaccgacccccagccactgaaagaacagcccgccctgaacgacagccggtactgcctgagcagcagactgagagtgtccgccaccttctggcagaacccccggaaccacttcagatgccaggtgcagttctacggcctgagcgagaacgacgagtggacccaggacagagccaagcccgtgacccagatcgtgtctgccgaagcctggggcagagccgattgcggatcccagagcttcggcctgctggaccccaagctgtgctacctgctggatggcatcctgttcatctacggcgtgatcctgaccgccctgttcctgaaacggggcagaaagaaactcctgtatatattcaaacaaccatttatgagaccagtacaaactactcaagaggaagatggctgtagctgccgatttccagaagaagaagaaggaggatgtgaactgagagtgaagttcagcagaagcgccgacgcccctgcctaccagcagggacagaaccaactgtacaacgagctgaacctgggcagacgggaagagtacgacgtgctggacaagcggagaggcagggaccctgagatgggcggaaagccccagcggagaaagaacccccaggaaggactgtataacgaactccagaaagacaagatggccgaagcctacagcgagatcggcatgaagggcgagcggagaagaggcaagggccacgatggcctgtaccagggcctgagcaccgccaccaaggacacctatgacgccctgcacatgcaggccctgcctccaagaagggccaagcgatctggatctggagcaacaaacttctcactactcaaacaagcaggtgacgtggaggagaatcccgggcctactagtatggactggatttggcgcatccttttccttgtcggcgctgctaccggcgcgcattccttcgaacaagttcagcttcaacagcctggcgctgagctggtcaaacctggcgcttctgtgaagatgagctgcaaagccagcggctacaccttcagcagctactggatcaactggatgaagcagaaacccggccagggactcgaatggatcggccaaatctatcccggcgacggcgacaccaactacaacggcaagttcaagggcagagccacactgaccgccgatacctctagcagcacagcctacatgcagctgagcagcctgaccagcgaagatagcgccgtgtacttctgtgcccggtccatcacaacagtcgtgggctgcgctatggactattggggccagggaacaagcgtgaccgtgtctagtacgcgtatccagaaccctgatcctgccgtgtaccagctgcgggatagcaagagcagcgacaagagcgtgtgtctgttcaccgacttcgacagccagaccaacgtgtcccagagcaaggactccgacgtgtacatcaccgataagaccgtgctggacatgcggagcatggacttcaagagcaactccgccgtggcctggtccaacaagtccgatttcgcctgcgccaacgccttcaacaacagcattatccccgaggacacattcttcccaagccccgagagcagctgcggtacccagagttttgggttgttggaccctaaattgtgctatctgttggacggaatcctgttcatttacggagtgatcctgaccgcattgttcctgaagagaggccggaagaagctgctgtacatcttcaagcagcctttcatgcggcccgtgcagaccacccaggaagaggacggctgctcctgccggttccccgaggaagaagaaggcggctgcgagctgcgggttaagttttccagatccgcagacgcacccgcttaccaacaagggcagaaccaactctacaatgaacttaatttggggcggagggaagagtacgacgttctggacaaaaggaggggacgagatcccgagatgggcggaaagcctcagcgaaggaagaatccgcaagaggggctttataacgaactccagaaagataaaatggcagaagcctatagtgagattgggatgaagggagaaaggaggaggggtaaaggtcacgatgggttgtaccaaggattgagcacagccactaaagatacctatgatgcgctccacatgcaggccctgccgccaaga

SEQ ID NO: 33877 - DNA, 1770 bp, synthetic construct
  source 1..1770: mol_type = other DNA
atggccttaccagtgaccgccttgctcctgccgctggccttgctgctccacgccgccaggccggacatccagatgacacagagccctagcagcctgtctgccagcgtgggagacagagtgaccatcacatgcaaggccagcgaccacatcaacaactggctggcctggtatcagcagaagcctggacaggcccctaagctgctgatctacggcgctaccacactggaaacaggcgtgcccagcagattttctggcagcggctctggcaccgactacaccctgacaatatccagcctccagcctgaggacttcgccacctactactgtcagcagagctggaacaccccttggacattcggccagggcaccaagctggaaatcaagagactcgagcagagcttcggcctgctggaccccaagctgtgctacctgctggatggcatcctgttcatctacggcgtgatcctgaccgccctgttcctgagagtgaagttcagcagaagcgccgacgcccctgcctaccagcagggacagaaccaactgtacaacgagctgaacctgggcagacgggaagagtacgacgtgctggacaagcggagaggcagggaccctgagatgggcggaaagccccagcggagaaagaacccccaggaaggactgtataacgaactccagaaagacaagatggccgaagcctacagcgagatcggcatgaagggcgagcggagaagaggcaagggccacgatggcctgtaccagggcctgagcaccgccaccaaggacacctatgacgccctgcacatgcaggccctgcctccaagaagggccaagcgatctggatctggagcaacaaacttctcactactcaaacaagcaggtgacgtggaggagaatcccgggcctactagtatggactggatttggcgcatccttttccttgtcggcgctgctaccggcgcgcattccttcgaacaagttcagcttcaacagcctggcgctgagctggtcaaacctggcgcttctgtgaagatgagctgcaaagccagcggctacaccttcagcagctactggatcaactggatgaagcagaaacccggccagggactcgaatggatcggccaaatctatcccggcgacggcgacaccaactacaacggcaagttcaagggcagagccacactgaccgccgatacctctagcagcacagcctacatgcagctgagcagcctgaccagcgaagatagcgccgtgtacttctgtgcccggtccatcacaacagtcgtgggctgcgctatggactattggggccagggaacaagcgtgaccgtgtctagtacgcgtcagagttttgggttgttggaccctaaattgtgctatctgttggacggaatcctgttcatttacggagtgatcctgaccgcattgttcctgcgggttaagttttccagatccgcagacgcacccgcttaccaacaagggcagaaccaactctacaatgaacttaatttggggcggagggaagagtacgacgttctggacaaaaggaggggacgagatcccgagatgggcggaaagcctcagcgaaggaagaatccgcaagaggggctttataacgaactccagaaagataaaatggcagaagcctatagtgagattgggatgaagggagaaaggaggaggggtaaaggtcacgatgggttgtaccaaggattgagcacagccactaaagatacctatgatgcgctccacatgcaggccctgccgccaaga

SEQ ID NO: 33878 - DNA, 1944 bp, synthetic construct
  source 1..1944: mol_type = other DNA
atggccttaccagtgaccgccttgctcctgccgctggccttgctgctccacgccgccaggccggacatccagatgacacagagccctagcagcctgtctgccagcgtgggagacagagtgaccatcacatgcaaggccagcgaccacatcaacaactggctggcctggtatcagcagaagcctggacaggcccctaagctgctgatctacggcgctaccacactggaaacaggcgtgcccagcagattttctggcagcggctctggcaccgactacaccctgacaatatccagcctccagcctgaggacttcgccacctactactgtcagcagagctggaacaccccttggacattcggccagggcaccaagctggaaatcaagagactcgagggacagcctaaggccaatcctaccgtgacactgttccctccaagcagcgaagaactccaggccaacaaggccacacttgtgtgcctgatctccgacttctaccctggggctgtgacagtggcttggaaggccgatggatctcctgtgaaagccggcgtggaaaccaccaagccatccaagcagagcaacaacaaatacgccgccagctcctacctgagcctgacacctgagcagtggaagtcccacagatcctacagctgccaagtgacccacgaaggcagcaccgtggaaaagacagtggcccctacagagtgcagccccatcaagaccgatgtgattacaatggaccccaaggacaactgctccaaggacgccaacgataccctgctgctccagctgaccaacaccagcgcctactacatgtacttgttgctgctgctgaagtccgtggtgtacttcgccatcatcacatgctgcctgctgcggagaaccgccttctgctgcaacggcgagaagtctagggccaagcgatctggatctggagcaacaaacttctcactactcaaacaagcaggtgacgtggaggagaatcccgggcctactagtatggactggatttggcgcatccttttccttgtcggcgctgctaccggcgcgcattccttcgaacaagttcagcttcaacagcctggcgctgagctggtcaaacctggcgcttctgtgaagatgagctgcaaagccagcggctacaccttcagcagctactggatcaactggatgaagcagaaacccggccagggactcgaatggatcggccaaatctatcccggcgacggcgacaccaactacaacggcaagttcaagggcagagccacactgaccgccgatacctctagcagcacagcctacatgcagctgagcagcctgaccagcgaagatagcgccgtgtacttctgtgcccggtccatcacaacagtcgtgggctgcgctatggactattggggccagggaacaagcgtgaccgtgtctagtacgcgtgcctctacaaagggaccctccgtgtttcctctggctcccagcagcaagtctacaagcggaggaacagccgctctgggctgcctggtcaaggattactttcccgagcctgtgaccgtgtcctggaatagcggagcactgacaagcggcgtgcacacctttccagccgtgctgcaaagcagcggcctgtactctctgagcagcgtggtcacagtgcctagctctagcctgggcacccagacctacatctgcaatgtgaaccacaagcctagcaacaccaaggtggacaagagagtggaacccaagagctgtgaagtgaaaaccgactccaccgaccacgtgaagcccaaagagacagagaacaccaagcagcccagcaagagctgccacaagcccaaggccatcgtgcacaccgagaaagtgaacatgatgagcctgaccgtgctgggcctgcggatgctgttcgccaaaaccgtggccgtgaacttcctgctgaccgccaagctgttcttcctc

SEQ ID NO: 33879 - DNA, 1878 bp, synthetic construct
  source 1..1878: mol_type = other DNA
atggccttaccagtgaccgccttgctcctgccgctggccttgctgctccacgccgccaggccggacatccagatgacacagagccctagcagcctgtctgccagcgtgggagacagagtgaccatcacatgcaaggccagcgaccacatcaacaactggctggcctggtatcagcagaagcctggacaggcccctaagctgctgatctacggcgctaccacactggaaacaggcgtgcccagcagattttctggcagcggctctggcaccgactacaccctgacaatatccagcctccagcctgaggacttcgccacctactactgtcagcagagctggaacaccccttggacattcggccagggcaccaagctggaaatcaagagactcgagggacagcctaaggccaatcctaccgtgacactgttccctccaagcagcgaagaactccaggccaacaaggccacacttgtgtgcctgatctccgacttctaccctggggctgtgacagtggcttggaaggccgatggatctcctgtgaaagccggcgtggaaaccaccaagccatccaagcagagcaacaacaaatacgccgccagctcctacctgagcctgacacctgagcagtggaagtcccacagatcctacagctgccaagtgacccacgaaggcagcaccgtggaaaagacagtggcccctacagagtgcagcggcagagccgattgcggcatcaccagcgccagctaccaccagggcgtgctgagcgccaccatcctgtacgagatcctgctgggcaaggccaccctgtacgccgtgctggtgtctgccctggtgctgatggctatggtcaagcggaaggacagccggggaagggccaagcgatctggatctggagcaacaaacttctcactactcaaacaagcaggtgacgtggaggagaatcccgggcctactagtatggactggatttggcgcatccttttccttgtcggcgctgctaccggcgcgcattccttcgaacaagttcagcttcaacagcctggcgctgagctggtcaaacctggcgcttctgtgaagatgagctgcaaagccagcggctacaccttcagcagctactggatcaactggatgaagcagaaacccggccagggactcgaatggatcggccaaatctatcccggcgacggcgacaccaactacaacggcaagttcaagggcagagccacactgaccgccgatacctctagcagcacagcctacatgcagctgagcagcctgaccagcgaagatagcgccgtgtacttctgtgcccggtccatcacaacagtcgtgggctgcgctatggactattggggccagggaacaagcgtgaccgtgtctagtacgcgtgcctctacaaagggaccctccgtgtttcctctggctcccagcagcaagtctacaagcggaggaacagccgctctgggctgcctggtcaaggattactttcccgagcctgtgaccgtgtcctggaatagcggagcactgacaagcggcgtgcacacctttccagccgtgctgcaaagcagcggcctgtactctctgagcagcgtggtcacagtgcctagctctagcctgggcacccagacctacatctgcaatgtgaaccacaagcctagcaacaccaaggtggacaagagagtggaacccaagagctgtatccccgaggacacattcttcccaagcagcgacgtgccctgcgacgtgaagctggtggaaaagagcttcgagacagacaccaacctgaacttccagaacctgagcgtgatcggcttcagaatcctgctgctgaaagtggccggctttaacctgctgatgaccctgcggctgtggtccagc

SEQ ID NO: 33880 - DNA, 1878 bp, synthetic construct
  source 1..1878: mol_type = other DNA
atggccttaccagtgaccgccttgctcctgccgctggccttgctgctccacgccgccaggccggacatccagatgacacagagccctagcagcctgtctgccagcgtgggagacagagtgaccatcacatgcaaggccagcgaccacatcaacaactggctggcctggtatcagcagaagcctggacaggcccctaagctgctgatctacggcgctaccacactggaaacaggcgtgcccagcagattttctggcagcggctctggcaccgactacaccctgacaatatccagcctccagcctgaggacttcgccacctactactgtcagcagagctggaacaccccttggacattcggccagggcaccaagctggaaatcaagagactcgagggacagcctaaggccaatcctaccgtgacactgttccctccaagcagcgaagaactccaggccaacaaggccacacttgtgtgcctgatctccgacttctaccctggggctgtgacagtggcttggaaggccgatggatctcctgtgaaagccggcgtggaaaccaccaagccatccaagcagagcaacaacaaatacgccgccagctcctacctgagcctgacacctgagcagtggaagtcccacagatcctacagctgccaagtgacccacgaaggcagcaccgtggaaaagacagtggcccctacagagtgcagcggcagagccgattgcggctttaccagcgagagctaccagcagggcgtgctgagcgccaccatcctgtacgagatcctgctgggcaaggccaccctgtacgccgtgctggtgtctgccctggtgctgatggctatggtcaagcggaaggacagccggggaagggccaagcgatctggatctggagcaacaaacttctcactactcaaacaagcaggtgacgtggaggagaatcccgggcctactagtatggactggatttggcgcatccttttccttgtcggcgctgctaccggcgcgcattccttcgaacaagttcagcttcaacagcctggcgctgagctggtcaaacctggcgcttctgtgaagatgagctgcaaagccagcggctacaccttcagcagctactggatcaactggatgaagcagaaacccggccagggactcgaatggatcggccaaatctatcccggcgacggcgacaccaactacaacggcaagttcaagggcagagccacactgaccgccgatacctctagcagcacagcctacatgcagctgagcagcctgaccagcgaagatagcgccgtgtacttctgtgcccggtccatcacaacagtcgtgggctgcgctatggactattggggccagggaacaagcgtgaccgtgtctagtacgcgtgcctctacaaagggaccctccgtgtttcctctggctcccagcagcaagtctacaagcggaggaacagccgctctgggctgcctggtcaaggattactttcccgagcctgtgaccgtgtcctggaatagcggagcactgacaagcggcgtgcacacctttccagccgtgctgcaaagcagcggcctgtactctctgagcagcgtggtcacagtgcctagctctagcctgggcacccagacctacatctgcaatgtgaaccacaagcctagcaacaccaaggtggacaagagagtggaacccaagagctgtatccccgaggacacattcttcccaagccccgagagcagctgcgacgtgaagctggtggaaaagagcttcgagacagacaccaacctgaacttccagaacctgagcgtgatcggcttcagaatcctgctgctgaaagtggccggctttaacctgctgatgaccctgcggctgtggtccagc

SEQ ID NO: 33881 - DNA, 1356 bp, synthetic construct
  source 1..1356: mol_type = other DNA
atggccttaccagtgaccgccttgctcctgccgctggccttgctgctccacgccgccaggccggacatccagatgacacagagccctagcagcctgtctgccagcgtgggagacagagtgaccatcacatgcaaggccagcgaccacatcaacaactggctggcctggtatcagcagaagcctggacaggcccctaagctgctgatctacggcgctaccacactggaaacaggcgtgcccagcagattttctggcagcggctctggcaccgactacaccctgacaatatccagcctccagcctgaggacttcgccacctactactgtcagcagagctggaacaccccttggacattcggccagggcaccaagctggaaatcaagagaggcggaggcggaagtggaggcggaggatctggcggcggaggctctcaagttcagcttcaacagcctggcgctgagctggtcaaacctggcgcttctgtgaagatgagctgcaaagccagcggctacaccttcagcagctactggatcaactggatgaagcagaaacccggccagggactcgaatggatcggccaaatctatcccggcgacggcgacaccaactacaacggcaagttcaagggcagagccacactgaccgccgatacctctagcagcacagcctacatgcagctgagcagcctgaccagcgaagatagcgccgtgtacttctgtgcccggtccatcacaacagtcgtgggctgcgctatggactattggggccagggaacaagcgtgaccgtgtctagtacgcgtgacggtaacgaggagatgggaggaatcactcaaaccccttacaaagtctcaatttcaggaacaactgttatccttacatgtccccagtatcctggcagcgagatcctttggcagcataacgacaagaatatagggggagatgaagacgataagaatatcggatctgacgaggatcacttgagcctgaaagagttctccgagcttgaacaaagcggatattatgtgtgctatccgcgcgggtcaaagccggaagacgctaacttttacctttatctccgagccagagtgtgcgaaaattgcatggaaatggacgttatgtccgttgctacaatagttatcgtagatatatgcatcacgggtggactgcttctgctggtttattattggtccaagaatagaaaggccaaagctaaacccgtgaccagaggcgctggcgcaggcggaaggcaaaggggacaaaacaaagaacggccaccaccagtgccaaatccagattatgagcctattcggaaaggacagagggacctgtactctggcctgaatcagagaagaatc

SEQ ID NO: 33882 - DNA, 1251 bp, synthetic construct
  source 1..1251: mol_type = other DNA
atggccttaccagtgaccgccttgctcctgccgctggccttgctgctccacgccgccaggccggacatccagatgacacagagccctagcagcctgtctgccagcgtgggagacagagtgaccatcacatgcaaggccagcgaccacatcaacaactggctggcctggtatcagcagaagcctggacaggcccctaagctgctgatctacggcgctaccacactggaaacaggcgtgcccagcagattttctggcagcggctctggcaccgactacaccctgacaatatccagcctccagcctgaggacttcgccacctactactgtcagcagagctggaacaccccttggacattcggccagggcaccaagctggaaatcaagagaggcggaggcggaagtggaggcggaggatctggcggcggaggctctcaagttcagcttcaacagcctggcgctgagctggtcaaacctggcgcttctgtgaagatgagctgcaaagccagcggctacaccttcagcagctactggatcaactggatgaagcagaaacccggccagggactcgaatggatcggccaaatctatcccggcgacggcgacaccaactacaacggcaagttcaagggcagagccacactgaccgccgatacctctagcagcacagcctacatgcagctgagcagcctgaccagcgaagatagcgccgtgtacttctgtgcccggtccatcacaacagtcgtgggctgcgctatggactattggggccagggaacaagcgtgaccgtgtctagtacgcgtttcaagatccccatcgaggaactggaagatcgggtgttcgtgaactgcaacacctctatcacctgggtggaaggcaccgtgggaacactgctgagcgacatcaccagactggacctcggcaagcggattctggaccctcggggcatctacagatgcaacggcaccgacatctacaaggacaaagaaagcaccgtgcaggtccactacagaatgtgccagtcctgcgtggaactggaccctgctacagtggccggcatcatcgtgaccgatgtgatcgctactctgctgctggctctgggagtgttctgcttcgccggacacgaaacaggcagactgtctggcgctgccgatacacaggccctgctgagaaacgaccaagtgtatcagcccctgcgcgacagagatgatgcccagtattctcacctcggcggcaactgggctagaaacaag

SEQ ID NO: 33883 - DNA, 1281 bp, synthetic construct
  source 1..1281: mol_type = other DNA
atggccttaccagtgaccgccttgctcctgccgctggccttgctgctccacgccgccaggccggacatccagatgacacagagccctagcagcctgtctgccagcgtgggagacagagtgaccatcacatgcaaggccagcgaccacatcaacaactggctggcctggtatcagcagaagcctggacaggcccctaagctgctgatctacggcgctaccacactggaaacaggcgtgcccagcagattttctggcagcggctctggcaccgactacaccctgacaatatccagcctccagcctgaggacttcgccacctactactgtcagcagagctggaacaccccttggacattcggccagggcaccaagctggaaatcaagagaggcggaggcggaagtggaggcggaggatctggcggcggaggctctcaagttcagcttcaacagcctggcgctgagctggtcaaacctggcgcttctgtgaagatgagctgcaaagccagcggctacaccttcagcagctactggatcaactggatgaagcagaaacccggccagggactcgaatggatcggccaaatctatcccggcgacggcgacaccaactacaacggcaagttcaagggcagagccacactgaccgccgatacctctagcagcacagcctacatgcagctgagcagcctgaccagcgaagatagcgccgtgtacttctgtgcccggtccatcacaacagtcgtgggctgcgctatggactattggggccagggaacaagcgtgaccgtgtctagtacgcgtcagagcatcaagggcaaccacctggtcaaggtgtacgactaccaagaggacggcagcgtgctgctgacatgtgatgccgaggccaagaacatcacctggtttaaggacggcaagatgatcggcttcctgaccgaggacaagaagaagtggaacctgggcagcaacgctaaggaccccagaggcatgtatcagtgcaagggcagccagaacaagagcaagcccctccaggtgtactaccggatgtgccagaactgcatcgagctgaacgccgctaccatcagcggctttctgttcgccgagatcgtgtccatcttcgtgctggccgtgggcgtgtactttatcgctggacaggatggcgtgcggcagagcagagcttccgataagcaaaccctgctgcctaacgaccagctgtaccagcctctgaaggacagagaggacgaccagtacagccacctccagggcaatcagctgagaagaaac

SEQ ID NO: 33884 - DNA, 1230 bp, synthetic construct
  source 1..1230: mol_type = other DNA
atggccttaccagtgaccgccttgctcctgccgctggccttgctgctccacgccgccaggccggacatccagatgacacagagccctagcagcctgtctgccagcgtgggagacagagtgaccatcacatgcaaggccagcgaccacatcaacaactggctggcctggtatcagcagaagcctggacaggcccctaagctgctgatctacggcgctaccacactggaaacaggcgtgcccagcagattttctggcagcggctctggcaccgactacaccctgacaatatccagcctccagcctgaggacttcgccacctactactgtcagcagagctggaacaccccttggacattcggccagggcaccaagctggaaatcaagagaggcggaggcggaagtggaggcggaggatctggcggcggaggctctcaagttcagcttcaacagcctggcgctgagctggtcaaacctggcgcttctgtgaagatgagctgcaaagccagcggctacaccttcagcagctactggatcaactggatgaagcagaaacccggccagggactcgaatggatcggccaaatctatcccggcgacggcgacaccaactacaacggcaagttcaagggcagagccacactgaccgccgatacctctagcagcacagcctacatgcagctgagcagcctgaccagcgaagatagcgccgtgtacttctgtgcccggtccatcacaacagtcgtgggctgcgctatggactattggggccagggaacaagcgtgaccgtgtctagtacgcgtcagagttttgggttgttggaccctaaattgtgctatctgttggacggaatcctgttcatttacggagtgatcctgaccgcattgttcctgcgggttaagttttccagatccgcagacgcacccgcttaccaacaagggcagaaccaactctacaatgaacttaatttggggcggagggaagagtacgacgttctggacaaaaggaggggacgagatcccgagatgggcggaaagcctcagcgaaggaagaatccgcaagaggggctttataacgaactccagaaagataaaatggcagaagcctatagtgagattgggatgaagggagaaaggaggaggggtaaaggtcacgatgggttgtaccaaggattgagcacagccactaaagatacctatgatgcgctccacatgcaggccctgccgccaaga

SEQ ID NO: 33885 - DNA, 1515 bp, synthetic construct
  source 1..1515: mol_type = other DNA
atggccttaccagtgaccgccttgctcctgccgctggccttgctgctccacgccgccaggccggacatccagatgacacagagccctagcagcctgtctgccagcgtgggagacagagtgaccatcacatgcaaggccagcgaccacatcaacaactggctggcctggtatcagcagaagcctggacaggcccctaagctgctgatctacggcgctaccacactggaaacaggcgtgcccagcagattttctggcagcggctctggcaccgactacaccctgacaatatccagcctccagcctgaggacttcgccacctactactgtcagcagagctggaacaccccttggacattcggccagggcaccaagctggaaatcaagagaggcggaggcggaagtggaggcggaggatctggcggcggaggctctcaagttcagcttcaacagcctggcgctgagctggtcaaacctggcgcttctgtgaagatgagctgcaaagccagcggctacaccttcagcagctactggatcaactggatgaagcagaaacccggccagggactcgaatggatcggccaaatctatcccggcgacggcgacaccaactacaacggcaagttcaagggcagagccacactgaccgccgatacctctagcagcacagcctacatgcagctgagcagcctgaccagcgaagatagcgccgtgtacttctgtgcccggtccatcacaacagtcgtgggctgcgctatggactattggggccagggaacaagcgtgaccgtgtctagtacgcgtggaatgaggactgaggatcttcccaaagctgtcgtctttctcgaaccccaatggtatcgggtgctcgaaaaagactctgtgacactgaaatgccaaggggcctactctcccgaggacaactccacacagtggtttcataatgagtccctcatcagctctcaggccagctcttatttcattgatgccgctacagtggacgactccggcgagtatcggtgtcagaccaatctgtctacactgtctgaccccgtgcagcttgaggtccacattggatggttgctcttgcaagccccacgctgggttttcaaagaggaagatccaatccatctgcggtgccacagctggaaaaacaccgctctccacaaagtcacatacctgcaaaatggcaaaggacgcaaatacttccatcacaattccgatttttacattccgaaggctaccctgaaagacagcggcagctatttctgccggggactcgtcggctccaagaatgtgtcctccgaaaccgtgaatatcacgattacccaaggactggctgtgcctacaatctctagcttctttccgcctggataccaagtctccttctgtcttgtgatggtcctcctgtttgctgtggacacaggactgtacttttccgtgaaaacgaacatccgcagctccacacgcgattggaaagatcacaagtttaaatggcgcaaagatccccaggacaag

SEQ ID NO: 33886 - DNA, 1440 bp, synthetic construct
  source 1..1440: mol_type = other DNA
atggccttaccagtgaccgccttgctcctgccgctggccttgctgctccacgccgccaggccggacatccagatgacacagagccctagcagcctgtctgccagcgtgggagacagagtgaccatcacatgcaaggccagcgaccacatcaacaactggctggcctggtatcagcagaagcctggacaggcccctaagctgctgatctacggcgctaccacactggaaacaggcgtgcccagcagattttctggcagcggctctggcaccgactacaccctgacaatatccagcctccagcctgaggacttcgccacctactactgtcagcagagctggaacaccccttggacattcggccagggcaccaagctggaaatcaagagaggcggaggcggaagtggaggcggaggatctggcggcggaggctctcaagttcagcttcaacagcctggcgctgagctggtcaaacctggcgcttctgtgaagatgagctgcaaagccagcggctacaccttcagcagctactggatcaactggatgaagcagaaacccggccagggactcgaatggatcggccaaatctatcccggcgacggcgacaccaactacaacggcaagttcaagggcagagccacactgaccgccgatacctctagcagcacagcctacatgcagctgagcagcctgaccagcgaagatagcgccgtgtacttctgtgcccggtccatcacaacagtcgtgggctgcgctatggactattggggccagggaacaagcgtgaccgtgtctagtacgcgtggaatgaggactgaggatcttcccaaagctgtcgtctttctcgaaccccaatggtatcgggtgctcgaaaaagactctgtgacactgaaatgccaaggggcctactctcccgaggacaactccacacagtggtttcataatgagtccctcatcagctctcaggccagctcttatttcattgatgccgctacagtggacgactccggcgagtatcggtgtcagaccaatctgtctacactgtctgaccccgtgcagcttgaggtccacattggatggttgctcttgcaagccccacgctgggttttcaaagaggaagatccaatccatctgcggtgccacagctggaaaaacaccgctctccacaaagtcacatacctgcaaaatggcaaaggacgcaaatacttccatcacaattccgatttttacattccgaaggctaccctgaaagacagcggcagctatttctgccggggactcgtcggctccaagaatgtgtcctccgaaaccgtgaatatcacgattacccaaggactggctgtgcctacaatctctagcttctttccgcctggataccaagtctccttctgtcttgtgatggtcctcctgtttgctgtggacacaggactgtacttttccgtg

SEQ ID NO: 33887 - DNA, 1443 bp, synthetic construct
  source 1..1443: mol_type = other DNA
atggccttaccagtgaccgccttgctcctgccgctggccttgctgctccacgccgccaggccggacatccagatgacacagagccctagcagcctgtctgccagcgtgggagacagagtgaccatcacatgcaaggccagcgaccacatcaacaactggctggcctggtatcagcagaagcctggacaggcccctaagctgctgatctacggcgctaccacactggaaacaggcgtgcccagcagattttctggcagcggctctggcaccgactacaccctgacaatatccagcctccagcctgaggacttcgccacctactactgtcagcagagctggaacaccccttggacattcggccagggcaccaagctggaaatcaagagaggcggaggcggaagtggaggcggaggatctggcggcggaggctctcaagttcagcttcaacagcctggcgctgagctggtcaaacctggcgcttctgtgaagatgagctgcaaagccagcggctacaccttcagcagctactggatcaactggatgaagcagaaacccggccagggactcgaatggatcggccaaatctatcccggcgacggcgacaccaactacaacggcaagttcaagggcagagccacactgaccgccgatacctctagcagcacagcctacatgcagctgagcagcctgaccagcgaagatagcgccgtgtacttctgtgcccggtccatcacaacagtcgtgggctgcgctatggactattggggccagggaacaagcgtgaccgtgtctagtacgcgtggaatgaggactgaggatcttcccaaagctgtcgtctttctcgaaccccaatggtatcgggtgctcgaaaaagactctgtgacactgaaatgccaaggggcctactctcccgaggacaactccacacagtggtttcataatgagtccctcatcagctctcaggccagctcttatttcattgatgccgctacagtggacgactccggcgagtatcggtgtcagaccaatctgtctacactgtctgaccccgtgcagcttgaggtccacattggatggttgctcttgcaagccccacgctgggttttcaaagaggaagatccaatccatctgcggtgccacagctggaaaaacaccgctctccacaaagtcacatacctgcaaaatggcaaaggacgcaaatacttccatcacaattccgatttttacattccgaaggctaccctgaaagacagcggcagctatttctgccggggactcgtcggctccaagaatgtgtcctccgaaaccgtgaatatcacgattacccaaggactggctgtgcctacaatctctagcttctttccgcctggataccaagtctccttctgtcttgtgatggtcctcctgtttgctgtggacacaggactgtacttttccgtgaaa

SEQ ID NO: 33888 - DNA, 2175 bp, synthetic construct
  source 1..2175: mol_type = other DNA
atggccttaccagtgaccgccttgctcctgccgctggccttgctgctccacgccgccaggccggacatccagatgacacagagccctagcagcctgtctgccagcgtgggagacagagtgaccatcacatgcaaggccagcgaccacatcaacaactggctggcctggtatcagcagaagcctggacaggcccctaagctgctgatctacggcgctaccacactggaaacaggcgtgcccagcagattttctggcagcggctctggcaccgactacaccctgacaatatccagcctccagcctgaggacttcgccacctactactgtcagcagagctggaacaccccttggacattcggccagggcaccaagctggaaatcaagagactcgagggacagcctaaggccaatcctaccgtgacactgttccctccaagcagcgaagaactccaggccaacaaggccacacttgtgtgcctgatctccgacttctaccctggggctgtgacagtggcttggaaggccgatggatctcctgtgaaagccggcgtggaaaccaccaagccatccaagcagagcaacaacaaatacgccgccagctcctacctgagcctgacacctgagcagtggaagtcccacagatcctacagctgccaagtgacccacgaaggcagcaccgtggaaaagacagtggcccctacagagtgcagcggatcccagagcttcggcctgctggaccccaagctgtgctacctgctggatggcatcctgttcatctacggcgtgatcctgaccgccctgttcctgagagtgaagttcagcagaagcgccgacgcccctgcctaccagcagggacagaaccaactgtacaacgagctgaacctgggcagacgggaagagtacgacgtgctggacaagcggagaggcagggaccctgagatgggcggaaagccccagcggagaaagaacccccaggaaggactgtataacgaactccagaaagacaagatggccgaagcctacagcgagatcggcatgaagggcgagcggagaagaggcaagggccacgatggcctgtaccagggcctgagcaccgccaccaaggacacctatgacgccctgcacatgcaggccctgcctccaagaagggccaagcgatctggatctggagcaacaaacttctcactactcaaacaagcaggtgacgtggaggagaatcccgggcctactagtatggactggatttggcgcatccttttccttgtcggcgctgctaccggcgcgcattccttcgaacaagttcagcttcaacagcctggcgctgagctggtcaaacctggcgcttctgtgaagatgagctgcaaagccagcggctacaccttcagcagctactggatcaactggatgaagcagaaacccggccagggactcgaatggatcggccaaatctatcccggcgacggcgacaccaactacaacggcaagttcaagggcagagccacactgaccgccgatacctctagcagcacagcctacatgcagctgagcagcctgaccagcgaagatagcgccgtgtacttctgtgcccggtccatcacaacagtcgtgggctgcgctatggactattggggccagggaacaagcgtgaccgtgtctagtacgcgtgcctctacaaagggaccctccgtgtttcctctggctcccagcagcaagtctacaagcggaggaacagccgctctgggctgcctggtcaaggattactttcccgagcctgtgaccgtgtcctggaatagcggagcactgacaagcggcgtgcacacctttccagccgtgctgcaaagcagcggcctgtactctctgagcagcgtggtcacagtgcctagctctagcctgggcacccagacctacatctgcaatgtgaaccacaagcctagcaacaccaaggtggacaagagagtggaacccaagagctgtggtaccatcactcaaggtttggcagtgtcaaccatctcatcattctttccacctggctaccaagtgtccttctgcctggtcatggtgctgctgttcgccgtggataccggcctgtacttcagcgtcaagaccaacatccggtccagcaccagagactggaaggaccacaagttcaagtggcggaaggaccctcaggacaag

SEQ ID NO: 33889 - DNA, 2220 bp, synthetic construct
  source 1..2220: mol_type = other DNA
atggccttaccagtgaccgccttgctcctgccgctggccttgctgctccacgccgccaggccggacatccagatgacacagagccctagcagcctgtctgccagcgtgggagacagagtgaccatcacatgcaaggccagcgaccacatcaacaactggctggcctggtatcagcagaagcctggacaggcccctaagctgctgatctacggcgctaccacactggaaacaggcgtgcccagcagattttctggcagcggctctggcaccgactacaccctgacaatatccagcctccagcctgaggacttcgccacctactactgtcagcagagctggaacaccccttggacattcggccagggcaccaagctggaaatcaagagactcgaggacctgaagaacgtgttcccacctgaggtggccgtgttcgagcctagcgaggccgagatcagccacacccagaaagccaccctcgtgtgcctggctaccggcttctaccccgaccatgtggaactgtcttggtgggtcaacggcaaagaggtgcacagcggcgtgtctaccgacccccagccactgaaagaacagcccgccctgaacgacagccggtactgcctgagcagcagactgagagtgtccgccaccttctggcagaacccccggaaccacttcagatgccaggtgcagttctacggcctgagcgagaacgacgagtggacccaggacagagccaagcccgtgacccagatcgtgtctgccgaagcctggggcagagccgattgcggatcccagagcttcggcctgctggaccccaagctgtgctacctgctggatggcatcctgttcatctacggcgtgatcctgaccgccctgttcctgagagtgaagttcagcagaagcgccgacgcccctgcctaccagcagggacagaaccaactgtacaacgagctgaacctgggcagacgggaagagtacgacgtgctggacaagcggagaggcagggaccctgagatgggcggaaagccccagcggagaaagaacccccaggaaggactgtataacgaactccagaaagacaagatggccgaagcctacagcgagatcggcatgaagggcgagcggagaagaggcaagggccacgatggcctgtaccagggcctgagcaccgccaccaaggacacctatgacgccctgcacatgcaggccctgcctccaagaagggccaagcgatctggatctggagcaacaaacttctcactactcaaacaagcaggtgacgtggaggagaatcccgggcctactagtatggactggatttggcgcatccttttccttgtcggcgctgctaccggcgcgcattccttcgaacaagttcagcttcaacagcctggcgctgagctggtcaaacctggcgcttctgtgaagatgagctgcaaagccagcggctacaccttcagcagctactggatcaactggatgaagcagaaacccggccagggactcgaatggatcggccaaatctatcccggcgacggcgacaccaactacaacggcaagttcaagggcagagccacactgaccgccgatacctctagcagcacagcctacatgcagctgagcagcctgaccagcgaagatagcgccgtgtacttctgtgcccggtccatcacaacagtcgtgggctgcgctatggactattggggccagggaacaagcgtgaccgtgtctagtacgcgtatccagaaccctgatcctgccgtgtaccagctgcgggatagcaagagcagcgacaagagcgtgtgtctgttcaccgacttcgacagccagaccaacgtgtcccagagcaaggactccgacgtgtacatcaccgataagaccgtgctggacatgcggagcatggacttcaagagcaactccgccgtggcctggtccaacaagtccgatttcgcctgcgccaacgccttcaacaacagcattatccccgaggacacattcttcccaagccccgagagcagctgcggtaccatcactcaaggtttggcagtgtcaaccatctcatcattctttccacctggctaccaagtgtccttctgcctggtcatggtgctgctgttcgccgtggataccggcctgtacttcagcgtcaagaccaacatccggtccagcaccagagactggaaggaccacaagttcaagtggcggaaggaccctcaggacaag

SEQ ID NO: 33890 - DNA, 2145 bp, synthetic construct
  source 1..2145: mol_type = other DNA
atggccttaccagtgaccgccttgctcctgccgctggccttgctgctccacgccgccaggccggacatccagatgacacagagccctagcagcctgtctgccagcgtgggagacagagtgaccatcacatgcaaggccagcgaccacatcaacaactggctggcctggtatcagcagaagcctggacaggcccctaagctgctgatctacggcgctaccacactggaaacaggcgtgcccagcagattttctggcagcggctctggcaccgactacaccctgacaatatccagcctccagcctgaggacttcgccacctactactgtcagcagagctggaacaccccttggacattcggccagggcaccaagctggaaatcaagagactcgaggacctgaagaacgtgttcccacctgaggtggccgtgttcgagcctagcgaggccgagatcagccacacccagaaagccaccctcgtgtgcctggctaccggcttctaccccgaccatgtggaactgtcttggtgggtcaacggcaaagaggtgcacagcggcgtgtctaccgacccccagccactgaaagaacagcccgccctgaacgacagccggtactgcctgagcagcagactgagagtgtccgccaccttctggcagaacccccggaaccacttcagatgccaggtgcagttctacggcctgagcgagaacgacgagtggacccaggacagagccaagcccgtgacccagatcgtgtctgccgaagcctggggcagagccgattgcggatcccagagcttcggcctgctggaccccaagctgtgctacctgctggatggcatcctgttcatctacggcgtgatcctgaccgccctgttcctgagagtgaagttcagcagaagcgccgacgcccctgcctaccagcagggacagaaccaactgtacaacgagctgaacctgggcagacgggaagagtacgacgtgctggacaagcggagaggcagggaccctgagatgggcggaaagccccagcggagaaagaacccccaggaaggactgtataacgaactccagaaagacaagatggccgaagcctacagcgagatcggcatgaagggcgagcggagaagaggcaagggccacgatggcctgtaccagggcctgagcaccgccaccaaggacacctatgacgccctgcacatgcaggccctgcctccaagaagggccaagcgatctggatctggagcaacaaacttctcactactcaaacaagcaggtgacgtggaggagaatcccgggcctactagtatggactggatttggcgcatccttttccttgtcggcgctgctaccggcgcgcattccttcgaacaagttcagcttcaacagcctggcgctgagctggtcaaacctggcgcttctgtgaagatgagctgcaaagccagcggctacaccttcagcagctactggatcaactggatgaagcagaaacccggccagggactcgaatggatcggccaaatctatcccggcgacggcgacaccaactacaacggcaagttcaagggcagagccacactgaccgccgatacctctagcagcacagcctacatgcagctgagcagcctgaccagcgaagatagcgccgtgtacttctgtgcccggtccatcacaacagtcgtgggctgcgctatggactattggggccagggaacaagcgtgaccgtgtctagtacgcgtatccagaaccctgatcctgccgtgtaccagctgcgggatagcaagagcagcgacaagagcgtgtgtctgttcaccgacttcgacagccagaccaacgtgtcccagagcaaggactccgacgtgtacatcaccgataagaccgtgctggacatgcggagcatggacttcaagagcaactccgccgtggcctggtccaacaagtccgatttcgcctgcgccaacgccttcaacaacagcattatccccgaggacacattcttcccaagccccgagagcagctgcggtaccatcactcaaggtttggcagtgtcaaccatctcatcattctttccacctggctaccaagtgtccttctgcctggtcatggtgctgctgttcgccgtggataccggcctgtacttcagcgtc

SEQ ID NO: 33891 - DNA, 2148 bp, synthetic construct
  source 1..2148: mol_type = other DNA
atggccttaccagtgaccgccttgctcctgccgctggccttgctgctccacgccgccaggccggacatccagatgacacagagccctagcagcctgtctgccagcgtgggagacagagtgaccatcacatgcaaggccagcgaccacatcaacaactggctggcctggtatcagcagaagcctggacaggcccctaagctgctgatctacggcgctaccacactggaaacaggcgtgcccagcagattttctggcagcggctctggcaccgactacaccctgacaatatccagcctccagcctgaggacttcgccacctactactgtcagcagagctggaacaccccttggacattcggccagggcaccaagctggaaatcaagagactcgaggacctgaagaacgtgttcccacctgaggtggccgtgttcgagcctagcgaggccgagatcagccacacccagaaagccaccctcgtgtgcctggctaccggcttctaccccgaccatgtggaactgtcttggtgggtcaacggcaaagaggtgcacagcggcgtgtctaccgacccccagccactgaaagaacagcccgccctgaacgacagccggtactgcctgagcagcagactgagagtgtccgccaccttctggcagaacccccggaaccacttcagatgccaggtgcagttctacggcctgagcgagaacgacgagtggacccaggacagagccaagcccgtgacccagatcgtgtctgccgaagcctggggcagagccgattgcggatcccagagcttcggcctgctggaccccaagctgtgctacctgctggatggcatcctgttcatctacggcgtgatcctgaccgccctgttcctgagagtgaagttcagcagaagcgccgacgcccctgcctaccagcagggacagaaccaactgtacaacgagctgaacctgggcagacgggaagagtacgacgtgctggacaagcggagaggcagggaccctgagatgggcggaaagccccagcggagaaagaacccccaggaaggactgtataacgaactccagaaagacaagatggccgaagcctacagcgagatcggcatgaagggcgagcggagaagaggcaagggccacgatggcctgtaccagggcctgagcaccgccaccaaggacacctatgacgccctgcacatgcaggccctgcctccaagaagggccaagcgatctggatctggagcaacaaacttctcactactcaaacaagcaggtgacgtggaggagaatcccgggcctactagtatggactggatttggcgcatccttttccttgtcggcgctgctaccggcgcgcattccttcgaacaagttcagcttcaacagcctggcgctgagctggtcaaacctggcgcttctgtgaagatgagctgcaaagccagcggctacaccttcagcagctactggatcaactggatgaagcagaaacccggccagggactcgaatggatcggccaaatctatcccggcgacggcgacaccaactacaacggcaagttcaagggcagagccacactgaccgccgatacctctagcagcacagcctacatgcagctgagcagcctgaccagcgaagatagcgccgtgtacttctgtgcccggtccatcacaacagtcgtgggctgcgctatggactattggggccagggaacaagcgtgaccgtgtctagtacgcgtatccagaaccctgatcctgccgtgtaccagctgcgggatagcaagagcagcgacaagagcgtgtgtctgttcaccgacttcgacagccagaccaacgtgtcccagagcaaggactccgacgtgtacatcaccgataagaccgtgctggacatgcggagcatggacttcaagagcaactccgccgtggcctggtccaacaagtccgatttcgcctgcgccaacgccttcaacaacagcattatccccgaggacacattcttcccaagccccgagagcagctgcggtaccatcactcaaggtttggcagtgtcaaccatctcatcattctttccacctggctaccaagtgtccttctgcctggtcatggtgctgctgttcgccgtggataccggcctgtacttcagcgtcaag

SEQ ID NO: 33892 - DNA, 2151 bp, synthetic construct
  source 1..2151: mol_type = other DNA
atggccttaccagtgaccgccttgctcctgccgctggccttgctgctccacgccgccaggccggacatccagatgacacagagccctagcagcctgtctgccagcgtgggagacagagtgaccatcacatgcaaggccagcgaccacatcaacaactggctggcctggtatcagcagaagcctggacaggcccctaagctgctgatctacggcgctaccacactggaaacaggcgtgcccagcagattttctggcagcggctctggcaccgactacaccctgacaatatccagcctccagcctgaggacttcgccacctactactgtcagcagagctggaacaccccttggacattcggccagggcaccaagctggaaatcaagagactcgaggacctgaagaacgtgttcccacctgaggtggccgtgttcgagcctagcgaggccgagatcagccacacccagaaagccaccctcgtgtgcctggctaccggcttctaccccgaccatgtggaactgtcttggtgggtcaacggcaaagaggtgcacagcggcgtgtctaccgacccccagccactgaaagaacagcccgccctgaacgacagccggtactgcctgagcagcagactgagagtgtccgccaccttctggcagaacccccggaaccacttcagatgccaggtgcagttctacggcctgagcgagaacgacgagtggacccaggacagagccaagcccgtgacccagatcgtgtctgccgaagcctggggcagagccgattgcggatcccagagcttcggcctgctggaccccaagctgtgctacctgctggatggcatcctgttcatctacggcgtgatcctgaccgccctgttcctgagagtgaagttcagcagaagcgccgacgcccctgcctaccagcagggacagaaccaactgtacaacgagctgaacctgggcagacgggaagagtacgacgtgctggacaagcggagaggcagggaccctgagatgggcggaaagccccagcggagaaagaacccccaggaaggactgtataacgaactccagaaagacaagatggccgaagcctacagcgagatcggcatgaagggcgagcggagaagaggcaagggccacgatggcctgtaccagggcctgagcaccgccaccaaggacacctatgacgccctgcacatgcaggccctgcctccaagaagggccaagcgatctggatctggagcaacaaacttctcactactcaaacaagcaggtgacgtggaggagaatcccgggcctactagtatggactggatttggcgcatccttttccttgtcggcgctgctaccggcgcgcattccttcgaacaagttcagcttcaacagcctggcgctgagctggtcaaacctggcgcttctgtgaagatgagctgcaaagccagcggctacaccttcagcagctactggatcaactggatgaagcagaaacccggccagggactcgaatggatcggccaaatctatcccggcgacggcgacaccaactacaacggcaagttcaagggcagagccacactgaccgccgatacctctagcagcacagcctacatgcagctgagcagcctgaccagcgaagatagcgccgtgtacttctgtgcccggtccatcacaacagtcgtgggctgcgctatggactattggggccagggaacaagcgtgaccgtgtctagtacgcgtatccagaaccctgatcctgccgtgtaccagctgcgggatagcaagagcagcgacaagagcgtgtgtctgttcaccgacttcgacagccagaccaacgtgtcccagagcaaggactccgacgtgtacatcaccgataagaccgtgctggacatgcggagcatggacttcaagagcaactccgccgtggcctggtccaacaagtccgatttcgcctgcgccaacgccttcaacaacagcattatccccgaggacacattcttcccaagccccgagagcagctgcggtaccatcactcaaggtttggcagtgtcaaccatctcatcattctttccacctggctaccaagtgtccttctgcctggtcatggtgctgctgttcgccgtggataccggcctgtacttcagcgtcaagacc

SEQ ID NO: 33893 - DNA, 1962 bp, synthetic construct
  source 1..1962: mol_type = other DNA
atggccttaccagtgaccgccttgctcctgccgctggccttgctgctccacgccgccaggccggacatccagatgacacagagccctagcagcctgtctgccagcgtgggagacagagtgaccatcacatgcaaggccagcgaccacatcaacaactggctggcctggtatcagcagaagcctggacaggcccctaagctgctgatctacggcgctaccacactggaaacaggcgtgcccagcagattttctggcagcggctctggcaccgactacaccctgacaatatccagcctccagcctgaggacttcgccacctactactgtcagcagagctggaacaccccttggacattcggccagggcaccaagctggaaatcaagagactcgagggacagcctaaggccaatcctaccgtgacactgttccctccaagcagcgaagaactccaggccaacaaggccacacttgtgtgcctgatctccgacttctaccctggggctgtgacagtggcttggaaggccgatggatctcctgtgaaagccggcgtggaaaccaccaagccatccaagcagagcaacaacaaatacgccgccagctcctacctgagcctgacacctgagcagtggaagtcccacagatcctacagctgccaagtgacccacgaaggcagcaccgtggaaaagacagtggcccctacagagtgcagcggatccctgggagagcctcagctgtgctatatcctggacgccatcctgtttctgtacggcatcgtgctgaccctgctgtactgccggctgaagatccaagtgcggaaggccgccatcaccagctacgagaaatccgacggcgtgtacaccggcctgagcaccagaaatcaagagacatacgagacactgaagcacgaaaagcctccacaaagggccaagcgatctggatctggagcaacaaacttctcactactcaaacaagcaggtgacgtggaggagaatcccgggcctactagtatggactggatttggcgcatccttttccttgtcggcgctgctaccggcgcgcattccttcgaacaagttcagcttcaacagcctggcgctgagctggtcaaacctggcgcttctgtgaagatgagctgcaaagccagcggctacaccttcagcagctactggatcaactggatgaagcagaaacccggccagggactcgaatggatcggccaaatctatcccggcgacggcgacaccaactacaacggcaagttcaagggcagagccacactgaccgccgatacctctagcagcacagcctacatgcagctgagcagcctgaccagcgaagatagcgccgtgtacttctgtgcccggtccatcacaacagtcgtgggctgcgctatggactattggggccagggaacaagcgtgaccgtgtctagtacgcgtgcctctacaaagggaccctccgtgtttcctctggctcccagcagcaagtctacaagcggaggaacagccgctctgggctgcctggtcaaggattactttcccgagcctgtgaccgtgtcctggaatagcggagcactgacaagcggcgtgcacacctttccagccgtgctgcaaagcagcggcctgtactctctgagcagcgtggtcacagtgcctagctctagcctgggcacccagacctacatctgcaatgtgaaccacaagcctagcaacaccaaggtggacaagagagtggaacccaagagctgtggtaccctcggagaaccacagctctgttacattctggatgctatcctgttcctctatgggatcgtcctgacactcctgtattgcagactcaaaattcaagttcgcaaagccgccattacctcttacgagaagagtgatggggtgtacacaggactgtctacccggaatcaagaaacctacgaaaccctcaaacatgagaagccacctcagtaa

SEQ ID NO: 33894 - DNA, 1869 bp, synthetic construct
  source 1..1869: mol_type = other DNA
atggccttaccagtgaccgccttgctcctgccgctggccttgctgctccacgccgccaggccggacatccagatgacacagagccctagcagcctgtctgccagcgtgggagacagagtgaccatcacatgcaaggccagcgaccacatcaacaactggctggcctggtatcagcagaagcctggacaggcccctaagctgctgatctacggcgctaccacactggaaacaggcgtgcccagcagattttctggcagcggctctggcaccgactacaccctgacaatatccagcctccagcctgaggacttcgccacctactactgtcagcagagctggaacaccccttggacattcggccagggcaccaagctggaaatcaagagactcgaggacctgaagaacgtgttcccacctgaggtggccgtgttcgagcctagcgaggccgagatcagccacacccagaaagccaccctcgtgtgcctggctaccggcttctaccccgaccatgtggaactgtcttggtgggtcaacggcaaagaggtgcacagcggcgtgtgtaccgacccccagccactgaaagaacagcccgccctgaacgacagccggtactgcctgagcagcagactgagagtgtccgccaccttctggcagaacccccggaaccacttcagatgccaggtgcagttctacggcctgagcgagaacgacgagtggacccaggacagagccaagcccgtgacccagatcgtgtctgccgaagcctggggcagagccgattgcggctttaccagcgagagctaccagcagggcgtgctgagcgcctactacatgtacttgttgctgctgctgaagtccgtggtgtacttcgccatcatcacatgctgcctgctgcggagaaccgccttctgctgcaacggcgagaagtctagggccaagcgatctggatctggagcaacaaacttctcactactcaaacaagcaggtgacgtggaggagaatcccgggcctactagtatggactggatttggcgcatccttttccttgtcggcgctgctaccggcgcgcattccttcgaacaagttcagcttcaacagcctggcgctgagctggtcaaacctggcgcttctgtgaagatgagctgcaaagccagcggctacaccttcagcagctactggatcaactggatgaagcagaaacccggccagggactcgaatggatcggccaaatctatcccggcgacggcgacaccaactacaacggcaagttcaagggcagagccacactgaccgccgatacctctagcagcacagcctacatgcagctgagcagcctgaccagcgaagatagcgccgtgtacttctgtgcccggtccatcacaacagtcgtgggctgcgctatggactattggggccagggaacaagcgtgaccgtgtctagtacgcgtatccagaaccctgatcctgccgtgtaccagctgcgggatagcaagagcagcgacaagagcgtgtgtctgttcaccgacttcgacagccagaccaacgtgtcccagagcaaggactccgacgtgtacatcaccgataagtgcgtgctggacatgcggagcatggacttcaagagcaactccgccgtggcctggtccaacaagtccgatttcgcctgcgccaacgccttcaacaacagcattatccccgaggacacattcttcccaagccccgagagcagctgcgacgtgaagctggtggaaaagagcttcgagacagacaccaacctgaacttccagaacctgagcgtgatcggcttcagaatcctgctgctgaaagtggccggctttaacctgctgatgaccctgcggctgtggtccagc

SEQ ID NO: 33895 - DNA, 1890 bp, synthetic construct
  source 1..1890: mol_type = other DNA
atggccttaccagtgaccgccttgctcctgccgctggccttgctgctccacgccgccaggccggacatccagatgacacagagccctagcagcctgtctgccagcgtgggagacagagtgaccatcacatgcaaggccagcgaccacatcaacaactggctggcctggtatcagcagaagcctggacaggcccctaagctgctgatctacggcgctaccacactggaaacaggcgtgcccagcagattttctggcagcggctctggcaccgactacaccctgacaatatccagcctccagcctgaggacttcgccacctactactgtcagcagagctggaacaccccttggacattcggccagggcaccaagctggaaatcaagagactcgaggacaagcagctggacgccgacgtgtcccccaagcctaccatcttcctgccctctatcgccgagacaaagctccagaaggccggcacctacctgtgcctgctggaaaagttcttcccagatgtgattaagatccactggcaggaaaagaagtccaacaccatcctgggcagccaggaaggcaacaccatgaagaccaacgacacctacatgaagttcagctggctgaccgtgcccgagaagtccctggacaaagaacacagatgcatcgtgcggcacgaaaacaacaagaacggcgtggaccaggaaatcatcttcccacccatcaagaccgatgtgattacaatggaccccaaggacaactgctccaaggacgccaacgataccctgctgctccagctgaccaacaccagcgcctactacatgtacgagatcctgctgggcaaggccaccctgtacgccgtgctggtgtctgccctggtgctgatggctatggtcaagcggaaggacagccggggaagggccaagcgatctggatctggagcaacaaacttctcactactcaaacaagcaggtgacgtggaggagaatcccgggcctactagtatggactggatttggcgcatccttttccttgtcggcgctgctaccggcgcgcattccttcgaacaagttcagcttcaacagcctggcgctgagctggtcaaacctggcgcttctgtgaagatgagctgcaaagccagcggctacaccttcagcagctactggatcaactggatgaagcagaaacccggccagggactcgaatggatcggccaaatctatcccggcgacggcgacaccaactacaacggcaagttcaagggcagagccacactgaccgccgatacctctagcagcacagcctacatgcagctgagcagcctgaccagcgaagatagcgccgtgtacttctgtgcccggtccatcacaacagtcgtgggctgcgctatggactattggggccagggaacaagcgtgaccgtgtctagtacgcgtagccagcctcacaccaagcccagcgtgttcgtgatgaagaacggcaccaacgtggcctgcctcgtgaaagagttctaccccaaggacatcaggatcaacctggtgtccagcaagaagatcaccgagttcgaccccgccatcgtgatctcccccagcggcaagtacaacgccgtgaagctggggaagtatgaggacagcaacagcgtgacctgctccgtgcagcacgacaacaagaccgtgcacagcaccgactttgaagtgaaaaccgactccaccgaccacgtgaagcccaaagagacagagaacaccaagcagcccagcaagagctgccacaagcccaaggccatcgtgcacaccgagaaagtgaacatgatgagcctgaccgtgatcggcttcagaatcctgctgctgaaagtggccggctttaacctgctgatgaccctgcggctgtggtccagctaa

SEQ ID NO: 33896 - DNA, 1890 bp, synthetic construct
  source 1..1890: mol_type = other DNA
atggccttaccagtgaccgccttgctcctgccgctggccttgctgctccacgccgccaggccggacatccagatgacacagagccctagcagcctgtctgccagcgtgggagacagagtgaccatcacatgcaaggccagcgaccacatcaacaactggctggcctggtatcagcagaagcctggacaggcccctaagctgctgatctacggcgctaccacactggaaacaggcgtgcccagcagattttctggcagcggctctggcaccgactacaccctgacaatatccagcctccagcctgaggacttcgccacctactactgtcagcagagctggaacaccccttggacattcggccagggcaccaagctggaaatcaagagactcgaggacaagcagctggacgccgacgtgtcccccaagcctaccatcttcctgccctctatcgccgagacaaagctccagaaggccggcacctacctgtgcctgctggaaaagttcttcccagatgtgattaagatccactggcaggaaaagaagtccaacaccatcctgggcagccaggaaggcaacaccatgaagaccaacgacacctacatgaagttcagctggctgaccgtgcccgagaagtccctggacaaagaacacagatgcatcgtgcggcacgaaaacaacaagaacggcgtggaccaggaaatcatcttcccacccatcaagaccgatgtgattacaatggaccccaaggacaactgctccaaggacgccaacgataccctgctgctccagctgaccaacaccagcgccaccatcctgtacgagatcctgctgggcaaggccaccctgtacgccgtgctggtgtctgccctggtgctgatggctatggtcaagcggaaggacagccggggaagggccaagcgatctggatctggagcaacaaacttctcactactcaaacaagcaggtgacgtggaggagaatcccgggcctactagtatggactggatttggcgcatccttttccttgtcggcgctgctaccggcgcgcattccttcgaacaagttcagcttcaacagcctggcgctgagctggtcaaacctggcgcttctgtgaagatgagctgcaaagccagcggctacaccttcagcagctactggatcaactggatgaagcagaaacccggccagggactcgaatggatcggccaaatctatcccggcgacggcgacaccaactacaacggcaagttcaagggcagagccacactgaccgccgatacctctagcagcacagcctacatgcagctgagcagcctgaccagcgaagatagcgccgtgtacttctgtgcccggtccatcacaacagtcgtgggctgcgctatggactattggggccagggaacaagcgtgaccgtgtctagtacgcgtagccagcctcacaccaagcccagcgtgttcgtgatgaagaacggcaccaacgtggcctgcctcgtgaaagagttctaccccaaggacatcaggatcaacctggtgtccagcaagaagatcaccgagttcgaccccgccatcgtgatctcccccagcggcaagtacaacgccgtgaagctggggaagtatgaggacagcaacagcgtgacctgctccgtgcagcacgacaacaagaccgtgcacagcaccgactttgaagtgaaaaccgactccaccgaccacgtgaagcccaaagagacagagaacaccaagcagcccagcaagagctgccacaagcccaaggccatcgtgcacaccgagaaagtgaacatgatgagcctgaccgtgatcggcttcagaatcctgctgctgaaagtggccggctttaacctgctgatgaccctgcggctgtggtccagctaa

SEQ ID NO: 33897 - DNA, 1890 bp, synthetic construct
  source 1..1890: mol_type = other DNA
atggccttaccagtgaccgccttgctcctgccgctggccttgctgctccacgccgccaggccggacatccagatgacacagagccctagcagcctgtctgccagcgtgggagacagagtgaccatcacatgcaaggccagcgaccacatcaacaactggctggcctggtatcagcagaagcctggacaggcccctaagctgctgatctacggcgctaccacactggaaacaggcgtgcccagcagattttctggcagcggctctggcaccgactacaccctgacaatatccagcctccagcctgaggacttcgccacctactactgtcagcagagctggaacaccccttggacattcggccagggcaccaagctggaaatcaagagactcgaggacaagcagctggacgccgacgtgtcccccaagcctaccatcttcctgccctctatcgccgagacaaagctccagaaggccggcacctacctgtgcctgctggaaaagttcttcccagatgtgattaagatccactggcaggaaaagaagtccaacaccatcctgggcagccaggaaggcaacaccatgaagaccaacgacacctacatgaagttcagctggctgaccgtgcccgagaagtccctggacaaagaacacagatgcatcgtgcggcacgaaaacaacaagaacggcgtggaccaggaaatcatcttcccacccatcaagaccgatgtgattacaatggaccccaaggacaactgctccaaggacgccaacgataccctgctgctccagctgaccaacaccagcgcctactacatgtacgagatcctgctgggcaaggccaccctgtacgccgtgctggtgtctgccctggtgctgatggctatggtcaagcggaaggacagccggggaagggccaagcgatctggatctggagcaacaaacttctcactactcaaacaagcaggtgacgtggaggagaatcccgggcctactagtatggactggatttggcgcatccttttccttgtcggcgctgctaccggcgcgcattccttcgaacaagttcagcttcaacagcctggcgctgagctggtcaaacctggcgcttctgtgaagatgagctgcaaagccagcggctacaccttcagcagctactggatcaactggatgaagcagaaacccggccagggactcgaatggatcggccaaatctatcccggcgacggcgacaccaactacaacggcaagttcaagggcagagccacactgaccgccgatacctctagcagcacagcctacatgcagctgagcagcctgaccagcgaagatagcgccgtgtacttctgtgcccggtccatcacaacagtcgtgggctgcgctatggactattggggccagggaacaagcgtgaccgtgtctagtacgcgtagccagcctcacaccaagcccagcgtgttcgtgatgaagaacggcaccaacgtggcctgcctcgtgaaagagttctaccccaaggacatcaggatcaacctggtgtccagcaagaagatcaccgagttcgaccccgccatcgtgatctcccccagcggcaagtacaacgccgtgaagctggggaagtacgaggacagcaacagcgtgacctgctccgtgcagcacgacaacaagaccgtgcacagcaccgactttgaagtgaaaaccgactccaccgaccacgtgaagcccaaagagacagagaacaccaagcagcccagcaagagctgccacaagcccaaggccatcgtgcacaccgagaaagtgaacatgatgagcctgaccgtgctgggcttcagaatcctgctgctgaaagtggccggctttaacctgctgatgaccctgcggctgtggtccagctaa

SEQ ID NO: 33898 - DNA, 1890 bp, synthetic construct
  source 1..1890: mol_type = other DNA
atggccttaccagtgaccgccttgctcctgccgctggccttgctgctccacgccgccaggccggacatccagatgacacagagccctagcagcctgtctgccagcgtgggagacagagtgaccatcacatgcaaggccagcgaccacatcaacaactggctggcctggtatcagcagaagcctggacaggcccctaagctgctgatctacggcgctaccacactggaaacaggcgtgcccagcagattttctggcagcggctctggcaccgactacaccctgacaatatccagcctccagcctgaggacttcgccacctactactgtcagcagagctggaacaccccttggacattcggccagggcaccaagctggaaatcaagagactcgaggacaagcagctggacgccgacgtgtcccccaagcctaccatcttcctgccctctatcgccgagacaaagctccagaaggccggcacctacctgtgcctgctggaaaagttcttcccagatgtgattaagatccactggcaggaaaagaagtccaacaccatcctgggcagccaggaaggcaacaccatgaagaccaacgacacctacatgaagttcagctggctgaccgtgcccgagaagtccctggacaaagaacacagatgcatcgtgcggcacgaaaacaacaagaacggcgtggaccaggaaatcatcttcccacccatcaagaccgatgtgattacaatggaccccaaggacaactgctccaaggacgccaacgataccctgctgctccagctgaccaacaccagcgccaccatcctgtacgagatcctgctgggcaaggccaccctgtacgccgtgctggtgtctgccctggtgctgatggctatggtcaagcggaaggacagccggggaagggccaagcgatctggatctggagcaacaaacttctcactactcaaacaagcaggtgacgtggaggagaatcccgggcctactagtatggactggatttggcgcatccttttccttgtcggcgctgctaccggcgcgcattccttcgaacaagttcagcttcaacagcctggcgctgagctggtcaaacctggcgcttctgtgaagatgagctgcaaagccagcggctacaccttcagcagctactggatcaactggatgaagcagaaacccggccagggactcgaatggatcggccaaatctatcccggcgacggcgacaccaactacaacggcaagttcaagggcagagccacactgaccgccgatacctctagcagcacagcctacatgcagctgagcagcctgaccagcgaagatagcgccgtgtacttctgtgcccggtccatcacaacagtcgtgggctgcgctatggactattggggccagggaacaagcgtgaccgtgtctagtacgcgtagccagcctcacaccaagcccagcgtgttcgtgatgaagaacggcaccaacgtggcctgcctcgtgaaagagttctaccccaaggacatcaggatcaacctggtgtccagcaagaagatcaccgagttcgaccccgccatcgtgatctcccccagcggcaagtacaacgccgtgaagctggggaagtacgaggacagcaacagcgtgacctgctccgtgcagcacgacaacaagaccgtgcacagcaccgactttgaagtgaaaaccgactccaccgaccacgtgaagcccaaagagacagagaacaccaagcagcccagcaagagctgccacaagcccaaggccatcgtgcacaccgagaaagtgaacatgatgagcctgaccgtgctgggcttcagaatcctgctgctgaaagtggccggctttaacctgctgatgaccctgcggctgtggtccagctaa

SEQ ID NO: 33899 - DNA, 1872 bp, synthetic construct
  source 1..1872: mol_type = other DNA
atggccttaccagtgaccgccttgctcctgccgctggccttgctgctccacgccgccaggccggacatccagatgacacagagccctagcagcctgtctgccagcgtgggagacagagtgaccatcacatgcaaggccagcgaccacatcaacaactggctggcctggtatcagcagaagcctggacaggcccctaagctgctgatctacggcgctaccacactggaaacaggcgtgcccagcagattttctggcagcggctctggcaccgactacaccctgacaatatccagcctccagcctgaggacttcgccacctactactgtcagcagagctggaacaccccttggacattcggccagggcaccaagctggaaatcaagagactcgaggacctgaagaacgtgttcccacctgaggtggccgtgttcgagcctagcgaggccgagatcagccacacccagaaagccaccctcgtgtgcctggctaccggcttctaccccgaccatgtggaactgtcttggtgggtcaacggcaaagaggtgcacagcggcgtgtgtaccgacccccagccactgaaagaacagcccgccctgaacgacagccggtactgcctgagcagcagactgagagtgtccgccaccttctggcagaacccccggaaccacttcagatgccaggtgcagttctacggcctgagcgagaacgacgagtggacccaggacagagccaagcccgtgacccagatcgtgtctgccgaagcctggggcagagccgattgcggctttaccagcgagagctaccagcagggcgtgctgagcgccaccatcctgtacttgttgctgctgctgaagtccgtggtgtacttcgccatcatcacatgctgcctgctgcggagaaccgccttctgctgcaacggcgagaagtctagggccaagcgatctggatctggagcaacaaacttctcactactcaaacaagcaggtgacgtggaggagaatcccgggcctactagtatggactggatttggcgcatccttttccttgtcggcgctgctaccggcgcgcattccttcgaacaagttcagcttcaacagcctggcgctgagctggtcaaacctggcgcttctgtgaagatgagctgcaaagccagcggctacaccttcagcagctactggatcaactggatgaagcagaaacccggccagggactcgaatggatcggccaaatctatcccggcgacggcgacaccaactacaacggcaagttcaagggcagagccacactgaccgccgatacctctagcagcacagcctacatgcagctgagcagcctgaccagcgaagatagcgccgtgtacttctgtgcccggtccatcacaacagtcgtgggctgcgctatggactattggggccagggaacaagcgtgaccgtgtctagtacgcgtatccagaaccctgatcctgccgtgtaccagctgcgggatagcaagagcagcgacaagagcgtgtgtctgttcaccgacttcgacagccagaccaacgtgtcccagagcaaggactccgacgtgtacatcaccgataagtgcgtgctggacatgcggagcatggacttcaagagcaactccgccgtggcctggtccaacaagtccgatttcgcctgcgccaacgccttcaacaacagcattatccccgaggacacattcttcccaagccccgagagcagctgcgacgtgaagctggtggaaaagagcttcgagacagacaccaacctgaacttccagaacctgagcgtgatcggcctgcggatgctgttcgccaaaaccgtggccgtgaacttcctgctgaccgccaagctgttcttcctctaa

SEQ ID NO: 33900 - DNA, 1959 bp, synthetic construct
  source 1..1959: mol_type = other DNA
atggccttaccagtgaccgccttgctcctgccgctggccttgctgctccacgccgccaggccggacatccagatgacacagagccctagcagcctgtctgccagcgtgggagacagagtgaccatcacatgcaaggccagcgaccacatcaacaactggctggcctggtatcagcagaagcctggacaggcccctaagctgctgatctacggcgctaccacactggaaacaggcgtgcccagcagattttctggcagcggctctggcaccgactacaccctgacaatatccagcctccagcctgaggacttcgccacctactactgtcagcagagctggaacaccccttggacattcggccagggcaccaagctggaaatcaagagactcgaggacctgaagaacgtgttcccacctgaggtggccgtgttcgagcctagcgaggccgagatcagccacacccagaaagccaccctcgtgtgcctggctaccggcttctaccccgaccatgtggaactgtcttggtgggtcaacggcaaagaggtgcacagcggcgtgtctaccgacccccagccactgaaagaacagcccgccctgaacgacagccggtactgcctgagcagcagactgagagtgtccgccaccttctggcagaacccccggaaccacttcagatgccaggtgcagttctacggcctgagcgagaacgacgagtggacccaggacagagccaagcccgtgacccagatcgtgtctgccgaagcctggggcagagccgattgcggatcctccaaggacgccaacgataccctgctgctccagctgaccaacaccagcgcctactacatgtacttgttgctgctgctgaagtccgtggtgtacttcgccatcatcacatgctgcctgctgcggagaaccgccttctgctgcaacggcgagaagtctagggccaagcgatctggatctggagcaacaaacttctcactactcaaacaagcaggtgacgtggaggagaatcccgggcctactagtatggactggatttggcgcatccttttccttgtcggcgctgctaccggcgcgcattccttcgaacaagttcagcttcaacagcctggcgctgagctggtcaaacctggcgcttctgtgaagatgagctgcaaagccagcggctacaccttcagcagctactggatcaactggatgaagcagaaacccggccagggactcgaatggatcggccaaatctatcccggcgacggcgacaccaactacaacggcaagttcaagggcagagccacactgaccgccgatacctctagcagcacagcctacatgcagctgagcagcctgaccagcgaagatagcgccgtgtacttctgtgcccggtccatcacaacagtcgtgggctgcgctatggactattggggccagggaacaagcgtgaccgtgtctagtacgcgtatccagaaccctgatcctgccgtgtaccagctgcgggatagcaagagcagcgacaagagcgtgtgtctgttcaccgacttcgacagccagaccaacgtgtcccagagcaaggactccgacgtgtacatcaccgataagaccgtgctggacatgcggagcatggacttcaagagcaactccgccgtggcctggtccaacaagtccgatttcgcctgcgccaacgccttcaacaacagcattatccccgaggacacattcttcccaagccccgagagcagctgcggtaccgaagtgaaaaccgactccaccgaccacgtgaagcccaaagagacagagaacaccaagcagcccagcaagagctgccacaagcccaaggccatcgtgcacaccgagaaagtgaacatgatgagcctgaccgtgctgggcctgcggatgctgttcgccaaaaccgtggccgtgaacttcctgctgaccgccaagctgttcttcctctaa

SEQ ID NO: 33901 - DNA, 1869 bp, synthetic construct
  source 1..1869: mol_type = other DNA
atggccttaccagtgaccgccttgctcctgccgctggccttgctgctccacgccgccaggccggacatccagatgacacagagccctagcagcctgtctgccagcgtgggagacagagtgaccatcacatgcaaggccagcgaccacatcaacaactggctggcctggtatcagcagaagcctggacaggcccctaagctgctgatctacggcgctaccacactggaaacaggcgtgcccagcagattttctggcagcggctctggcaccgactacaccctgacaatatccagcctccagcctgaggacttcgccacctactactgtcagcagagctggaacaccccttggacattcggccagggcaccaagctggaaatcaagagactcgaggacctgaagaacgtgttcccacctgaggtggccgtgttcgagcctagcgaggccgagatcagccacacccagaaagccaccctcgtgtgcctggctaccggcttctaccccgaccatgtggaactgtcttggtgggtcaacggcaaagaggtgcacagcggcgtgtgtaccgacccccagccactgaaagaacagcccgccctgaacgacagccggtactgcctgagcagcagactgagagtgtccgccaccttctggcagaacccccggaaccacttcagatgccaggtgcagttctacggcctgagcgagaacgacgagtggacccaggacagagccaagcccgtgacccagatcgtgtctgccgaagcctggggcagagccgattgcgacgtgaagctggtggaaaagagcttcgagacagacaccaacctgaacttccagaacctgagcgtgatcggcttcagaatcctgctgctgaaagtggccggctttaacctgctgatgaccctgcggctgtggtccagcagggccaagcgatctggatctggagcaacaaacttctcactactcaaacaagcaggtgacgtggaggagaatcccgggcctactagtatggactggatttggcgcatccttttccttgtcggcgctgctaccggcgcgcattccttcgaacaagttcagcttcaacagcctggcgctgagctggtcaaacctggcgcttctgtgaagatgagctgcaaagccagcggctacaccttcagcagctactggatcaactggatgaagcagaaacccggccagggactcgaatggatcggccaaatctatcccggcgacggcgacaccaactacaacggcaagttcaagggcagagccacactgaccgccgatacctctagcagcacagcctacatgcagctgagcagcctgaccagcgaagatagcgccgtgtacttctgtgcccggtccatcacaacagtcgtgggctgcgctatggactattggggccagggaacaagcgtgaccgtgtctagtacgcgtatccagaaccctgatcctgccgtgtaccagctgcgggatagcaagagcagcgacaagagcgtgtgtctgttcaccgacttcgacagccagaccaacgtgtcccagagcaaggactccgacgtgtacatcaccgataagtgcgtgctggacatgcggagcatggacttcaagagcaactccgccgtggcctggtccaacaagtccgatttcgcctgcgccaacgccttcaacaacagcattatccccgaggacacattcttcccaagccccgagagcagctgcggctttaccagcgagagctaccagcagggcgtgctgagcgccaccatcctgtacgagatcctgctgggcaaggccaccctgtacgccgtgctggtgtctgccctggtgctgatggctatggtcaagcggaaggacagccggggataa

SEQ ID NO: 33902 - DNA, 1869 bp, synthetic construct
  source 1..1869: mol_type = other DNA
atggccttaccagtgaccgccttgctcctgccgctggccttgctgctccacgccgccaggccggacatccagatgacacagagccctagcagcctgtctgccagcgtgggagacagagtgaccatcacatgcaaggccagcgaccacatcaacaactggctggcctggtatcagcagaagcctggacaggcccctaagctgctgatctacggcgctaccacactggaaacaggcgtgcccagcagattttctggcagcggctctggcaccgactacaccctgacaatatccagcctccagcctgaggacttcgccacctactactgtcagcagagctggaacaccccttggacattcggccagggcaccaagctggaaatcaagagactcgaggacctgaagaacgtgttcccacctgaggtggccgtgttcgagcctagcgaggccgagatcagccacacccagaaagccaccctcgtgtgcctggctaccggcttctaccccgaccatgtggaactgtcttggtgggtcaacggcaaagaggtgcacagcggcgtgtgtaccgacccccagccactgaaagaacagcccgccctgaacgacagccggtactgcctgagcagcagactgagagtgtccgccaccttctggcagaacccccggaaccacttcagatgccaggtgcagttctacggcctgagcgagaacgacgagtggacccaggacagagccaagcccgtgacccagatcgtgtctgccgaagcctggggcagagccgattgcggctttaccagcgagagctaccagcagggcgtgctgagcgccaccaacctgagcgtgatcggcttcagaatcctgctgctgaaagtggccggctttaacctgctgatgaccctgcggctgtggtccagcagggccaagcgatctggatctggagcaacaaacttctcactactcaaacaagcaggtgacgtggaggagaatcccgggcctactagtatggactggatttggcgcatccttttccttgtcggcgctgctaccggcgcgcattccttcgaacaagttcagcttcaacagcctggcgctgagctggtcaaacctggcgcttctgtgaagatgagctgcaaagccagcggctacaccttcagcagctactggatcaactggatgaagcagaaacccggccagggactcgaatggatcggccaaatctatcccggcgacggcgacaccaactacaacggcaagttcaagggcagagccacactgaccgccgatacctctagcagcacagcctacatgcagctgagcagcctgaccagcgaagatagcgccgtgtacttctgtgcccggtccatcacaacagtcgtgggctgcgctatggactattggggccagggaacaagcgtgaccgtgtctagtacgcgtatccagaaccctgatcctgccgtgtaccagctgcgggatagcaagagcagcgacaagagcgtgtgtctgttcaccgacttcgacagccagaccaacgtgtcccagagcaaggactccgacgtgtacatcaccgataagtgcgtgctggacatgcggagcatggacttcaagagcaactccgccgtggcctggtccaacaagtccgatttcgcctgcgccaacgccttcaacaacagcattatccccgaggacacattcttcccaagccccgagagcagctgcgacgtgaagctggtggaaaagagcttcgagacagacaccaacctgaacttccagatcctgtacgagatcctgctgggcaaggccaccctgtacgccgtgctggtgtctgccctggtgctgatggctatggtcaagcggaaggacagccggggataa

SEQ ID NO: 33903 - DNA, 1869 bp, synthetic construct; identical to SEQ ID NO: 33901
  source 1..1869: mol_type = other DNA

SEQ ID NO: 33904 - DNA, 1869 bp, synthetic construct; identical to SEQ ID NO: 33902
  source 1..1869: mol_type = other DNA

SEQ ID NO: 33905 - DNA, 1866 bp, synthetic construct
  source 1..1866: mol_type = other DNA
atggccttaccagtgaccgccttgctcctgccgctggccttgctgctccacgccgccaggccggacatccagatgacacagagccctagcagcctgtctgccagcgtgggagacagagtgaccatcacatgcaaggccagcgaccacatcaacaactggctggcctggtatcagcagaagcctggacaggcccctaagctgctgatctacggcgctaccacactggaaacaggcgtgcccagcagattttctggcagcggctctggcaccgactacaccctgacaatatccagcctccagcctgaggacttcgccacctactactgtcagcagagctggaacaccccttggacattcggccagggcaccaagctggaaatcaagagactcgaggacctgaagaacgtgttcccacctgaggtggccgtgttcgagcctagcgaggccgagatcagccacacccagaaagccaccctcgtgtgcctggctaccggcttctaccccgaccatgtggaactgtcttggtgggtcaacggcaaagaggtgcacagcggcgtgtgtaccgacccccagccactgaaagaacagcccgccctgaacgacagccggtactgcctgagcagcagactgagagtgtccgccaccttctggcagaacccccggaaccacttcagatgccaggtgcagttctacggcctgagcgagaacgacgagtggacccaggacagagccaagcccgtgacccagatcgtgtctgccgaagcctggggcagagccgattgcgacgtgaagctggtggaaaagagcttcgagacagacaccaacctgaacttccagaacctgagcgtgatcggcttcagaatcctgctgctgaaagtggccggctttaacctgctgatgaccctgcggctgtggtccagcagggccaagcgatctggatctggagcaacaaacttctcactactcaaacaagcaggtgacgtggaggagaatcccgggcctactagtatggactggatttggcgcatccttttccttgtcggcgctgctaccggcgcgcattccttcgaacaagttcagcttcaacagcctggcgctgagctggtcaaacctggcgcttctgtgaagatgagctgcaaagccagcggctacaccttcagcagctactggatcaactggatgaagcagaaacccggccagggactcgaatggatcggccaaatctatcccggcgacggcgacaccaactacaacggcaagttcaagggcagagccacactgaccgccgatacctctagcagcacagcctacatgcagctgagcagcctgaccagcgaagatagcgccgtgtacttctgtgcccggtccatcacaacagtcgtgggctgcgctatggactattggggccagggaacaagcgtgaccgtgtctagtacgcgtatccagaaccctgatcctgccgtgtaccagctgcgggatagcaagagcagcgacaagagcgtgtgtctgttcaccgacttcgacagccagaccaacgtgtcccagagcaaggactccgacgtgtacatcaccgataagtgcgtgctggacatgcggagcatggacttcaagagcaactccgccgtggcctggtccaacaagtccgatttcgcctgcgccaacgccttcaacaacagcattatccccgaggacacattcttcccaagccccgagagcagctgcggctttaccagcgagagctaccagcagggcgtgctgagcgccaccatcctgtacgagatcctgctgggcaaggccaccctgtacgccgtgctggtgtctgccctggtgctgatggctatggtcaagcggaaggacagccgggga

SEQ ID NO: 33906 - DNA, 1878 bp, synthetic construct
  source 1..1878: mol_type = other DNA
atggccttaccagtgaccgccttgctcctgccgctggccttgctgctccacgccgccaggccggacatccagatgacacagagccctagcagcctgtctgccagcgtgggagacagagtgaccatcacatgcaaggccagcgaccacatcaacaactggctggcctggtatcagcagaagcctggacaggcccctaagctgctgatctacggcgctaccacactggaaacaggcgtgcccagcagattttctggcagcggctctggcaccgactacaccctgacaatatccagcctccagcctgaggacttcgccacctactactgtcagcagagctggaacaccccttggacattcggccagggcaccaagctggaaatcaagagactcgaggccgacgtgtcccccaagcctaccatcttcctgccctctatcgccgagacaaagctccagaaggccggcacctacctgtgcctgctggaaaagttcttcccagatgtgattaagatccactggcaggaaaagaagtccaacaccatcctgggcagccaggaaggcaacaccatgaagaccaacgacacctacatgaagttcagctggctgaccgtgcccgagaagtccctggacaaagaacacagatgcatcgtgcggcacgaaaacaacaagaacggcgtggaccaggaaatcatcttcccacccatcaagaccgatgtgattacaatggaccccaaggacaactgctccaaggacgccaacgataccctgctgctccagctgaccaacaccagcgcctactacatgtacttgttgctgctgctgaagtccgtggtgtacttcgccatcatcacatgctgcctgctgcggagaaccgccttctgctgcaacggcgagaagtctagggccaagcgatctggatctggagcaacaaacttctcactactcaaacaagcaggtgacgtggaggagaatcccgggcctactagtatggactggatttggcgcatccttttccttgtcggcgctgctaccggcgcgcattccttcgaacaagttcagcttcaacagcctggcgctgagctggtcaaacctggcgcttctgtgaagatgagctgcaaagccagcggctacaccttcagcagctactggatcaactggatgaagcagaaacccggccagggactcgaatggatcggccaaatctatcccggcgacggcgacaccaactacaacggcaagttcaagggcagagccacactgaccgccgatacctctagcagcacagcctacatgcagctgagcagcctgaccagcgaagatagcgccgtgtacttctgtgcccggtccatcacaacagtcgtgggctgcgctatggactattggggccagggaacaagcgtgaccgtgtctagtacgcgtagccagcctcacaccaagcccagcgtgttcgtgatgaagaacggcaccaacgtggcctgcctcgtgaaagagttctaccccaaggacatcaggatcaacctggtgtccagcaagaagatcaccgagttcgaccccgccatcgtgatctcccccagcggcaagtacaacgccgtgaagctggggaagtatgaggacagcaacagcgtgacctgctccgtgcagcacgacaacaagaccgtgcacagcaccgactttgaagtgaaaaccgactccaccgaccacgtgaagcccaaagagacagagaacaccaagcagcccagcaagagctgccacaagcccaaggccatcgtgcacaccgagaaagtgaacatgatgagcctgaccgtgatcggcttcagaatcctgctgctgaaagtggccggctttaacctgctgatgaccctgcggctgtggtccagctaa

SEQ ID NO: 33907 - DNA, 1878 bp, synthetic construct
  source 1..1878: mol_type = other DNA
atggccttaccagtgaccgccttgctcctgccgctggccttgctgctccacgccgccaggccggacatccagatgacacagagccctagcagcctgtctgccagcgtgggagacagagtgaccatcacatgcaaggccagcgaccacatcaacaactggctggcctggtatcagcagaagcctggacaggcccctaagctgctgatctacggcgctaccacactggaaacaggcgtgcccagcagattttctggcagcggctctggcaccgactacaccctgacaatatccagcctccagcctgaggacttcgccacctactactgtcagcagagctggaacaccccttggacattcggccagggcaccaagctggaaatcaagagactcgaggccgacgtgtcccccaagcctaccatcttcctgccctctatcgccgagacaaagctccagaaggccggcacctacctgtgcctgctggaaaagttcttcccagatgtgattaagatccactggcaggaaaagaagtccaacaccatcctgggcagccaggaaggcaacaccatgaagaccaacgacacctacatgaagttcagctggctgaccgtgcccgagaagtccctggacaaagaacacagatgcatcgtgcggcacgaaaacaacaagaacggcgtggaccaggaaatcatcttcccacccatcaagaccgatgtgattacaatggaccccaaggacaactgctccaaggacgccaacgataccctgctgctccagctgaccaacaccagcgcctactacatgtacttgttgctgctgctgaagtccgtggtgtacttcgccatcatcacatgctgcctgctgcggagaaccgccttctgctgcaacggcgagaagtctagggccaagcgatctggatctggagcaacaaacttctcactactcaaacaagcaggtgacgtggaggagaatcccgggcctactagtatggactggatttggcgcatccttttccttgtcggcgctgctaccggcgcgcattccttcgaacaagttcagcttcaacagcctggcgctgagctggtcaaacctggcgcttctgtgaagatgagctgcaaagccagcggctacaccttcagcagctactggatcaactggatgaagcagaaacccggccagggactcgaatggatcggccaaatctatcccggcgacggcgacaccaactacaacggcaagttcaagggcagagccacactgaccgccgatacctctagcagcacagcctacatgcagctgagcagcctgaccagcgaagatagcgccgtgtacttctgtgcccggtccatcacaacagtcgtgggctgcgctatggactattggggccagggaacaagcgtgaccgtgtctagtacgcgtagccagcctcacaccaagcccagcgtgttcgtgatgaagaacggcaccaacgtggcctgcctcgtgaaagagttctaccccaaggacatcaggatcaacctggtgtccagcaagaagatcaccgagttcgaccccgccatcgtgatctcccccagcggcaagtacaacgccgtgaagctggggaagtacgaggacagcaacagcgtgacctgctccgtgcagcacgacaacaagaccgtgcacagcaccgactttgaagtgaaaaccgactccaccgaccacgtgaagcccaaagagacagagaacaccaagcagcccagcaagagctgccacaagcccaaggccatcgtgcacaccgagaaagtgaacatgatgagcctgaccgtgctgggcttcagaatcctgctgctgaaagtggccggctttaacctgctgatgaccctgcggctgtggtccagctaa

SEQ ID NO: 33908 - DNA, 1866 bp, synthetic construct; identical to SEQ ID NO: 33905
  source 1..1866: mol_type = other DNA

SEQ ID NO: 33909 - DNA, 1878 bp, synthetic construct
  source 1..1878: mol_type = other DNA
atggccttaccagtgaccgccttgctcctgccgctggccttgctgctccacgccgccaggccggacatccagatgacacagagccctagcagcctgtctgccagcgtgggagacagagtgaccatcacatgcaaggccagcgaccacatcaacaactggctggcctggtatcagcagaagcctggacaggcccctaagctgctgatctacggcgctaccacactggaaacaggcgtgcccagcagattttctggcagcggctctggcaccgactacaccctgacaatatccagcctccagcctgaggacttcgccacctactactgtcagcagagctggaacaccccttggacattcggccagggcaccaagctggaaatcaagagactcgagatccagaaccctgatcctgccgtgtaccagctgcgggatagcaagagcagcgacaagagcgtgtgtctgttcaccgacttcgacagccagaccaacgtgtcccagagcaaggactccgacgtgtacatcaccgataagtgcgtgctggacatgcggagcatggacttcaagagcaactccgccgtggcctggtccaacaagtccgatttcgcctgcgccaacgccttcaacaacagcattatccccgaggacacattcttcccaagccccgagagcagctgcggctttaccagcgagagctaccagcagggcgtgctgagcgccaccatcctgtacgagatcctgctgggcaaggccaccctgtacgccgtgctggtgtctgccctggtgctgatggctatggtcaagcggaaggacagccggggacgcgccaagagaagcggatctggcgtgaagcagaccctgaatttcgacctgctgaagctggctggcgacgtggaatccaacccaggccctactagtatggactggatttggcgcatccttttccttgtcggcgctgctaccggcgcgcattccttcgaacaagttcagcttcaacagcctggcgctgagctggtcaaacctggcgcttctgtgaagatgagctgcaaagccagcggctacaccttcagcagctactggatcaactggatgaagcagaaacccggccagggactcgaatggatcggccaaatctatcccggcgacggcgacaccaactacaacggcaagttcaagggcagagccacactgaccgccgatacctctagcagcacagcctacatgcagctgagcagcctgaccagcgaagatagcgccgtgtacttctgtgcccggtccatcacaacagtcgtgggctgcgctatggactattggggccagggaacaagcgtgaccgtgtctagtacgcgtgaggacctgaagaacgtgttcccacctgaggtggccgtgttcgagcctagcgaggccgagatcagccacacccagaaagccaccctcgtgtgcctggctaccggcttctaccccgaccatgtggaactgtcttggtgggtcaacggcaaagaggtgcacagcggcgtgtgtaccgacccccagccactgaaagaacagcccgccctgaacgacagccggtactgcctgagcagcagactgagagtgtccgccaccttctggcagaacccccggaaccacttcagatgccaggtgcagttctacggcctgagcgagaacgacgagtggacccaggacagagccaagcccgtgacccagatcgtgtctgccgaagcctggggcagagccgattgcgacgtgaagctggtggaaaagagcttcgagacagacaccaacctgaacttccagaacctgagcgtgatcggcttcagaatcctgctgctgaaagtggccggctttaacctgctgatgaccctgcggctgtggtccagc

SEQ ID NO: 33910 - DNA, 2271 bp, synthetic construct
  source 1..2271: mol_type = other DNA
atggccttaccagtgaccgccttgctcctgccgctggccttgctgctccacgccgccaggccggaagtgcagctggttgaatctggcggaggactggttcagcctggcggatctctgagactgtcttgtgccgccagcggcttcagcttcagcgacttttggatgagctgggtccgacaggcccctggcaaaggacttgaatgggtcgccacaatcagccaggccggcagcgagaaggactacgtggactctgtgaagggcagattcaccatcagccgggacaacgccaagaagtccctgtacctccagatgaacagcctgagagccgaggacaccgccgtgtactattgtgcctctggcgtgtacagcttcgactacagaggccagggcaccctggtcacagtctcttctggtaccggcggaggcggatctggcggcggaggtagcggtggcggaggatctgaattcgacatccagatgacacagagccctagcagcctgtctgccagcgtgggagacagagtgaccatcacatgcaaggccagcgaccacatcaacaactggctggcctggtatcagcagaagcctggacaggcccctaagctgctgatctacggcgctaccacactggaaacaggcgtgcccagcagattttctggcagcggctctggcaccgactacaccctgacaatatccagcctccagcctgaggacttcgccacctactactgtcagcagagctggaacaccccttggacattcggccagggcaccaagctggaaatcaagagactcgaggacctgaagaacgtgttcccacctgaggtggccgtgttcgagcctagcgaggccgagatcagccacacccagaaagccaccctcgtgtgcctggctaccggcttctaccccgaccatgtggaactgtcttggtgggtcaacggcaaagaggtgcacagcggcgtgtgtaccgacccccagccactgaaagaacagcccgccctgaacgacagccggtactgcctgagcagcagactgagagtgtccgccaccttctggcagaacccccggaaccacttcagatgccaggtgcagttctacggcctgagcgagaacgacgagtggacccaggacagagccaagcccgtgacccagatcgtgtctgccgaagcctggggcagagccgattgcgacgtgaagctggtggaaaagagcttcgagacagacaccaacctgaacttccagaacctgagcgtgatcggcttcagaatcctgctgctgaaagtggccggctttaacctgctgatgaccctgcggctgtggtccagcagggccaagcgatctggatctggagcaacaaacttctcactactcaaacaagcaggtgacgtggaggagaatcccgggcctactagtatggactggatttggcgcatccttttccttgtcggcgctgctaccggcgcgcattccttcgaacaagttcagcttcaacagcctggcgctgagctggtcaaacctggcgcttctgtgaagatgagctgcaaagccagcggctacaccttcagcagctactggatcaactggatgaagcagaaacccggccagggactcgaatggatcggccaaatctatcccggcgacggcgacaccaactacaacggcaagttcaagggcagagccacactgaccgccgatacctctagcagcacagcctacatgcagctgagcagcctgaccagcgaagatagcgccgtgtacttctgtgcccggtccatcacaacagtcgtgggctgcgctatggactattggggccagggaacaagcgtgaccgtgtctagtacgcgtatccagaaccctgatcctgccgtgtaccagctgcgggatagcaagagcagcgacaagagcgtgtgtctgttcaccgacttcgacagccagaccaacgtgtcccagagcaaggactccgacgtgtacatcaccgataagtgcgtgctggacatgcggagcatggacttcaagagcaactccgccgtggcctggtccaacaagtccgatttcgcctgcgccaacgccttcaacaacagcattatccccgaggacacattcttcccaagccccgagagcagctgcggctttaccagcgagagctaccagcagggcgtgctgagcgccaccatcctgtacgagatcctgctgggcaaggccaccctgtacgccgtgctggtgtctgccctggtgctgatggctatggtcaagcggaaggacagccgggga

SEQ ID NO: 33911 - DNA, 2283 bp, synthetic construct
  source 1..2283: mol_type = other DNA
atggccttaccagtgaccgccttgctcctgccgctggccttgctgctccacgccgccaggccggaagtgcagctggttgaatctggcggaggactggttcagcctggcggatctctgagactgtcttgtgccgccagcggcttcagcttcagcgacttttggatgagctgggtccgacaggcccctggcaaaggacttgaatgggtcgccacaatcagccaggccggcagcgagaaggactacgtggactctgtgaagggcagattcaccatcagccgggacaacgccaagaagtccctgtacctccagatgaacagcctgagagccgaggacaccgccgtgtactattgtgcctctggcgtgtacagcttcgactacagaggccagggcaccctggtcacagtctcttctggtaccggcggaggcggatctggcggcggaggtagcggtggcggaggatctgaattcgacatccagatgacacagagccctagcagcctgtctgccagcgtgggagacagagtgaccatcacatgcaaggccagcgaccacatcaacaactggctggcctggtatcagcagaagcctggacaggcccctaagctgctgatctacggcgctaccacactggaaacaggcgtgcccagcagattttctggcagcggctctggcaccgactacaccctgacaatatccagcctccagcctgaggacttcgccacctactactgtcagcagagctggaacaccccttggacattcggccagggcaccaagctggaaatcaagagactcgagatccagaaccctgatcctgccgtgtaccagctgcgggatagcaagagcagcgacaagagcgtgtgtctgttcaccgacttcgacagccagaccaacgtgtcccagagcaaggactccgacgtgtacatcaccgataagtgcgtgctggacatgcggagcatggacttcaagagcaactccgccgtggcctggtccaacaagtccgatttcgcctgcgccaacgccttcaacaacagcattatccccgaggacacattcttcccaagccccgagagcagctgcggctttaccagcgagagctaccagcagggcgtgctgagcgccaccatcctgtacgagatcctgctgggcaaggccaccctgtacgccgtgctggtgtctgccctggtgctgatggctatggtcaagcggaaggacagccggggacgcgccaagagaagcggatctggcgtgaagcagaccctgaatttcgacctgctgaagctggctggcgacgtggaatccaacccaggccctactagtatggactggatttggcgcatccttttccttgtcggcgctgctaccggcgcgcattccttcgaacaagttcagcttcaacagcctggcgctgagctggtcaaacctggcgcttctgtgaagatgagctgcaaagccagcggctacaccttcagcagctactggatcaactggatgaagcagaaacccggccagggactcgaatggatcggccaaatctatcccggcgacggcgacaccaactacaacggcaagttcaagggcagagccacactgaccgccgatacctctagcagcacagcctacatgcagctgagcagcctgaccagcgaagatagcgccgtgtacttctgtgcccggtccatcacaacagtcgtgggctgcgctatggactattggggccagggaacaagcgtgaccgtgtctagtacgcgtgaggacctgaagaacgtgttcccacctgaggtggccgtgttcgagcctagcgaggccgagatcagccacacccagaaagccaccctcgtgtgcctggctaccggcttctaccccgaccatgtggaactgtcttggtgggtcaacggcaaagaggtgcacagcggcgtgtgtaccgacccccagccactgaaagaacagcccgccctgaacgacagccggtactgcctgagcagcagactgagagtgtccgccaccttctggcagaacccccggaaccacttcagatgccaggtgcagttctacggcctgagcgagaacgacgagtggacccaggacagagccaagcccgtgacccagatcgtgtctgccgaagcctggggcagagccgattgcgacgtgaagctggtggaaaagagcttcgagacagacaccaacctgaacttccagaacctgagcgtgatcggcttcagaatcctgctgctgaaagtggccggctttaacctgctgatgaccctgcggctgtggtccagc

SEQ ID NO: 33912 - DNA, 2682 bp, synthetic construct
  source 1..2682: mol_type = other DNA
atggccttaccagtgaccgccttgctcctgccgctggccttgctgctccacgccgccaggccggaagtgcagctggttgaatctggcggaggactggttcagcctggcggatctctgagactgtcttgtgccgccagcggcttcagcttcagcgacttttggatgagctgggtccgacaggcccctggcaaaggacttgaatgggtcgccacaatcagccaggccggcagcgagaaggactacgtggactctgtgaagggcagattcaccatcagccgggacaacgccaagaagtccctgtacctccagatgaacagcctgagagccgaggacaccgccgtgtactattgtgcctctggcgtgtacagcttcgactacagaggccagggcaccctggtcacagtctcttctggtaccggcggaggcggatctggcggcggaggtagcggtggcggaggatctgaattcgacatccagatgacacagagccctagcagcctgtctgccagcgtgggagacagagtgaccatcacatgcaaggccagcgaccacatcaacaactggctggcctggtatcagcagaagcctggacaggcccctaagctgctgatctacggcgctaccacactggaaacaggcgtgcccagcagattttctggcagcggctctggcaccgactacaccctgacaatatccagcctccagcctgaggacttcgccacctactactgtcagcagagctggaacaccccttggacattcggccagggcaccaagctggaaatcaagagactcgaggacctgaagaacgtgttcccacctgaggtggccgtgttcgagcctagcgaggccgagatcagccacacccagaaagccaccctcgtgtgcctggctaccggcttctaccccgaccatgtggaactgtcttggtgggtcaacggcaaagaggtgcacagcggcgtgtgtaccgacccccagccactgaaagaacagcccgccctgaacgacagccggtactgcctgagcagcagactgagagtgtccgccaccttctggcagaacccccggaaccacttcagatgccaggtgcagttctacggcctgagcgagaacgacgagtggacccaggacagagccaagcccgtgacccagatcgtgtctgccgaagcctggggcagagccgattgcgacgtgaagctggtggaaaagagcttcgagacagacaccaacctgaacttccagaacctgagcgtgatcggcttcagaatcctgctgctgaaagtggccggctttaacctgctgatgaccctgcggctgtggtccagcagggccaagcgatctggatctggagcaacaaacttctcactactcaaacaagcaggtgacgtggaggagaatcccgggcctactagtatggactggatttggcgcatccttttccttgtcggcgctgctaccggcgcgcattccgggccccagctccagctgcaagagtctggacctggcctggtcaagcctagcgagacactgagcctgacctgtaccgtgtccggcgatagcatcagcagcggcgattactactggggctggatcagacagcctcctggcaaaggactggaatggatcggccacatctactacagcggcgtgacctactacaaccccagcctgaagtccagagtgaccatcagcgtggacaccagccggaaccagttctccctgaagctgtctagcgtgacagccgccgataccgccgtgtactactgcaccagagaggacagcagcaactggcggagtagaggccagggaacactggtcacagttagctctggatccggcggaggcggaagtggaggcggaggatctggcggcggaggctctttcgaacaagttcagcttcaacagcctggcgctgagctggtcaaacctggcgcttctgtgaagatgagctgcaaagccagcggctacaccttcagcagctactggatcaactggatgaagcagaaacccggccagggactcgaatggatcggccaaatctatcccggcgacggcgacaccaactacaacggcaagttcaagggcagagccacactgaccgccgatacctctagcagcacagcctacatgcagctgagcagcctgaccagcgaagatagcgccgtgtacttctgtgcccggtccatcacaacagtcgtgggctgcgctatggactattggggccagggaacaagcgtgaccgtgtctagtacgcgtatccagaaccctgatcctgccgtgtaccagctgcgggatagcaagagcagcgacaagagcgtgtgtctgttcaccgacttcgacagccagaccaacgtgtcccagagcaaggactccgacgtgtacatcaccgataagtgcgtgctggacatgcggagcatggacttcaagagcaactccgccgtggcctggtccaacaagtccgatttcgcctgcgccaacgccttcaacaacagcattatccccgaggacacattcttcccaagccccgagagcagctgcggctttaccagcgagagctaccagcagggcgtgctgagcgccaccatcctgtacgagatcctgctgggcaaggccaccctgtacgccgtgctggtgtctgccctggtgctgatggctatggtcaagcggaaggacagccgggga

SEQ ID NO: 33913 - DNA, 2694 bp, synthetic construct
  source 1..2694: mol_type = other DNA
atggccttaccagtgaccgccttgctcctgccgctggccttgctgctccacgccgccaggccggaagtgcagctggttgaatctggcggaggactggttcagcctggcggatctctgagactgtcttgtgccgccagcggcttcagcttcagcgacttttggatgagctgggtccgacaggcccctggcaaaggacttgaatgggtcgccacaatcagccaggccggcagcgagaaggactacgtggactctgtgaagggcagattcaccatcagccgggacaacgccaagaagtccctgtacctccagatgaacagcctgagagccgaggacaccgccgtgtactattgtgcctctggcgtgtacagcttcgactacagaggccagggcaccctggtcacagtctcttctggtaccggcggaggcggatctggcggcggaggtagcggtggcggaggatctgaattcgacatccagatgacacagagccctagcagcctgtctgccagcgtgggagacagagtgaccatcacatgcaaggccagcgaccacatcaacaactggctggcctggtatcagcagaagcctggacaggcccctaagctgctgatctacggcgctaccacactggaaacaggcgtgcccagcagattttctggcagcggctctggcaccgactacaccctgacaatatccagcctccagcctgaggacttcgccacctactactgtcagcagagctggaacaccccttggacattcggccagggcaccaagctggaaatcaagagactcgagatccagaaccctgatcctgccgtgtaccagctgcgggatagcaagagcagcgacaagagcgtgtgtctgttcaccgacttcgacagccagaccaacgtgtcccagagcaaggactccgacgtgtacatcaccgataagtgcgtgctggacatgcggagcatggacttcaagagcaactccgccgtggcctggtccaacaagtccgatttcgcctgcgccaacgccttcaacaacagcattatccccgaggacacattcttcccaagccccgagagcagctgcggctttaccagcgagagctaccagcagggcgtgctgagcgccaccatcctgtacgagatcctgctgggcaaggccaccctgtacgccgtgctggtgtctgccctggtgctgatggctatggtcaagcggaaggacagccggggacgcgccaagagaagcggatctggcgtgaagcagaccctgaatttcgacctgctgaagctggctggcgacgtggaatccaacccaggccctactagtatggactggatttggcgcatccttttccttgtcggcgctgctaccggcgcgcattccgggccccagctccagctgcaagagtctggacctggcctggtcaagcctagcgagacactgagcctgacctgtaccgtgtccggcgatagcatcagcagcggcgattactactggggctggatcagacagcctcctggcaaaggactggaatggatcggccacatctactacagcggcgtgacctactacaaccccagcctgaagtccagagtgaccatcagcgtggacaccagccggaaccagttctccctgaagctgtctagcgtgacagccgccgataccgccgtgtactactgcaccagagaggacagcagcaactggcggagtagaggccagggaacactggtcacagttagctctggatccggcggaggcggaagtggaggcggaggatctggcggcggaggctctttcgaacaagttcagcttcaacagcctggcgctgagctggtcaaacctggcgcttctgtgaagatgagctgcaaagccagcggctacaccttcagcagctactggatcaactggatgaagcagaaacccggccagggactcgaatggatcggccaaatctatcccggcgacggcgacaccaactacaacggcaagttcaagggcagagccacactgaccgccgatacctctagcagcacagcctacatgcagctgagcagcctgaccagcgaagatagcgccgtgtacttctgtgcccggtccatcacaacagtcgtgggctgcgctatggactattggggccagggaacaagcgtgaccgtgtctagtacgcgtgaggacctgaagaacgtgttcccacctgaggtggccgtgttcgagcctagcgaggccgagatcagccacacccagaaagccaccctcgtgtgcctggctaccggcttctaccccgaccatgtggaactgtcttggtgggtcaacggcaaagaggtgcacagcggcgtgtgtaccgacccccagccactgaaagaacagcccgccctgaacgacagccggtactgcctgagcagcagactgagagtgtccgccaccttctggcagaacccccggaaccacttcagatgccaggtgcagttctacggcctgagcgagaacgacgagtggacccaggacagagccaagcccgtgacccagatcgtgtctgccgaagcctggggcagagccgattgcgacgtgaagctggtggaaaagagcttcgagacagacaccaacctgaacttccagaacctgagcgtgatcggcttcagaatcctgctgctgaaagtggccggctttaacctgctgatgaccctgcggctgtggtccagc

SEQ ID NO: 33914 - DNA, 2076 bp, synthetic construct
  source 1..2076: mol_type = other DNA
atggccttaccagtgaccgccttgctcctgccgctggccttgctgctccacgccgccaggccggacatccagatgacacagagccctagcagcctgtctgccagcgtgggagacagagtgaccatcacatgcaaggccagcgaccacatcaacaactggctggcctggtatcagcagaagcctggacaggcccctaagctgctgatctacggcgctaccacactggaaacaggcgtgcccagcagattttctggcagcggctctggcaccgactacaccctgacaatatccagcctccagcctgaggacttcgccacctactactgtcagcagagctggaacaccccttggacattcggccagggcaccaagctggaaatcaagagactcgaggacctgaagaacgtgttcccacctgaggtggccgtgttcgagcctagcgaggccgagatcagccacacccagaaagccaccctcgtgtgcctggctaccggcttctaccccgaccatgtggaactgtcttggtgggtcaacggcaaagaggtgcacagcggcgtgtgtaccgacccccagccactgaaagaacagcccgccctgaacgacagccggtactgcctgagcagcagactgagagtgtccgccaccttctggcagaacccccggaaccacttcagatgccaggtgcagttctacggcctgagcgagaacgacgagtggacccaggacagagccaagcccgtgacccagatcgtgtctgccgaagcctggggcagagccgattgcgacgtgaagctggtggaaaagagcttcgagacagacaccaacctgaacttccagaacctgagcgtgatcggcttcagaatcctgctgctgaaagtggccggctttaacctgctgatgaccctgcggctgtggtccagcagggccaagcgatctggatctggagcaacaaacttctcactactcaaacaagcaggtgacgtggaggagaatcccgggcctactagtatggactggatttggcgcatccttttccttgtcggcgctgctaccggcgcccattccgggcccatggaccccgacctggaaatcagagccgccttcctgcggcagagaaacacagccctgagaacagaggtggccgagctggaacaagaggtgcagcggctggaaaacgaggtgtcccagtacgagacaagatacggccctctcggaggcggaaaaggatccggcggcggaggatctggcggaggcggatctgggggcggaggctctttcgaacaagttcagcttcaacagcctggcgctgagctggtcaaacctggcgcttctgtgaagatgagctgcaaagccagcggctacaccttcagcagctactggatcaactggatgaagcagaaacccggccagggactcgaatggatcggccaaatctatcccggcgacggcgacaccaactacaacggcaagttcaagggcagagccacactgaccgccgatacctctagcagcacagcctacatgcagctgagcagcctgaccagcgaagatagcgccgtgtacttctgtgcccggtccatcacaacagtcgtgggctgcgctatggactattggggccagggaacaagcgtgaccgtgtctagtacgcgtatccagaaccctgatcctgccgtgtaccagctgcgggatagcaagagcagcgacaagagcgtgtgtctgttcaccgacttcgacagccagaccaacgtgtcccagagcaaggactccgacgtgtacatcaccgataagtgcgtgctggacatgcggagcatggacttcaagagcaactccgccgtggcctggtccaacaagtccgatttcgcctgcgccaacgccttcaacaacagcattatccccgaggacacattcttcccaagccccgagagcagctgcggctttaccagcgagagctaccagcagggcgtgctgagcgccaccatcctgtacgagatcctgctgggcaaggccaccctgtacgccgtgctggtgtctgccctggtgctgatggctatggtcaagcggaaggacagccgggga

SEQ ID NO: 33915 - DNA, 2088 bp, synthetic construct
  source 1..2088: mol_type = other DNA
atggccttaccagtgaccgccttgctcctgccgctggccttgctgctccacgccgccaggccggacatccagatgacacagagccctagcagcctgtctgccagcgtgggagacagagtgaccatcacatgcaaggccagcgaccacatcaacaactggctggcctggtatcagcagaagcctggacaggcccctaagctgctgatctacggcgctaccacactggaaacaggcgtgcccagcagattttctggcagcggctctggcaccgactacaccctgacaatatccagcctccagcctgaggacttcgccacctactactgtcagcagagctggaacaccccttggacattcggccagggcaccaagctggaaatcaagagactcgagatccagaaccctgatcctgccgtgtaccagctgcgggatagcaagagcagcgacaagagcgtgtgtctgttcaccgacttcgacagccagaccaacgtgtcccagagcaaggactccgacgtgtacatcaccgataagtgcgtgctggacatgcggagcatggacttcaagagcaactccgccgtggcctggtccaacaagtccgatttcgcctgcgccaacgccttcaacaacagcattatccccgaggacacattcttcccaagccccgagagcagctgcggctttaccagcgagagctaccagcagggcgtgctgagcgccaccatcctgtacgagatcctgctgggcaaggccaccctgtacgccgtgctggtgtctgccctggtgctgatggctatggtcaagcggaaggacagccggggacgcgccaagagaagcggatctggcgtgaagcagaccctgaatttcgacctgctgaagctggctggcgacgtggaatccaacccaggccctactagtatggactggatttggcgcatccttttccttgtcggcgctgctaccggcgcccattccgggcccatggaccccgacctggaaatcagagccgccttcctgcggcagagaaacacagccctgagaacagaggtggccgagctggaacaagaggtgcagcggctggaaaacgaggtgtcccagtacgagacaagatacggccctctcggaggcggaaaaggatccggcggcggaggatctggcggaggcggatctgggggcggaggctctttcgaacaagttcagcttcaacagcctggcgctgagctggtcaaacctggcgcttctgtgaagatgagctgcaaagccagcggctacaccttcagcagctactggatcaactggatgaagcagaaacccggccagggactcgaatggatcggccaaatctatcccggcgacggcgacaccaactacaacggcaagttcaagggcagagccacactgaccgccgatacctctagcagcacagcctacatgcagctgagcagcctgaccagcgaagatagcgccgtgtacttctgtgcccggtccatcacaacagtcgtgggctgcgctatggactattggggccagggaacaagcgtgaccgtgtctagtacgcgtgaggacctgaagaacgtgttcccacctgaggtggccgtgttcgagcctagcgaggccgagatcagccacacccagaaagccaccctcgtgtgcctggctaccggcttctaccccgaccatgtggaactgtcttggtgggtcaacggcaaagaggtgcacagcggcgtgtgtaccgacccccagccactgaaagaacagcccgccctgaacgacagccggtactgcctgagcagcagactgagagtgtccgccaccttctggcagaacccccggaaccacttcagatgccaggtgcagttctacggcctgagcgagaacgacgagtggacccaggacagagccaagcccgtgacccagatcgtgtctgccgaagcctggggcagagccgattgcgacgtgaagctggtggaaaagagcttcgagacagacaccaacctgaacttccagaacctgagcgtgatcggcttcagaatcctgctgctgaaagtggccggctttaacctgctgatgaccctgcggctgtggtccagc

SEQ ID NO: 33916 - DNA, 2007 bp, synthetic construct
  source 1..2007: mol_type = other DNA
atggccttaccagtgaccgccttgctcctgccgctggccttgctgctccacgccgccaggccggacatccagatgacacagagccctagcagcctgtctgccagcgtgggagacagagtgaccatcacatgcaaggccagcgaccacatcaacaactggctggcctggtatcagcagaagcctggacaggcccctaagctgctgatctacggcgctaccacactggaaacaggcgtgcccagcagattttctggcagcggctctggcaccgactacaccctgacaatatccagcctccagcctgaggacttcgccacctactactgtcagcagagctggaacaccccttggacattcggccagggcaccaagctggaaatcaagagactcgaggacctgaagaacgtgttcccacctgaggtggccgtgttcgagcctagcgaggccgagatcagccacacccagaaagccaccctcgtgtgcctggctaccggcttctaccccgaccatgtggaactgtcttggtgggtcaacggcaaagaggtgcacagcggcgtgtgtaccgacccccagccactgaaagaacagcccgccctgaacgacagccggtactgcctgagcagcagactgagagtgtccgccaccttctggcagaacccccggaaccacttcagatgccaggtgcagttctacggcctgagcgagaacgacgagtggacccaggacagagccaagcccgtgacccagatcgtgtctgccgaagcctggggcagagccgattgcgacgtgaagctggtggaaaagagcttcgagacagacaccaacctgaacttccagaacctgagcgtgatcggcttcagaatcctgctgctgaaagtggccggctttaacctgctgatgaccctgcggctgtggtccagcagggccaagcgatctggatctggagcaacaaacttctcactactcaaacaagcaggtgacgtggaggagaatcccgggcctactagtatggactggatttggcgcatccttttccttgtcggcgctgctaccggcgcccattccgggcccgaagttgctgccctcgagaaggaggtagcagctttggaaaaagaagtcgcagcccttgagaaagaagttgcggctctggagaagggatccggcggcggaggatctggcggaggcggatctgggggcggaggctctttcgaacaagttcagcttcaacagcctggcgctgagctggtcaaacctggcgcttctgtgaagatgagctgcaaagccagcggctacaccttcagcagctactggatcaactggatgaagcagaaacccggccagggactcgaatggatcggccaaatctatcccggcgacggcgacaccaactacaacggcaagttcaagggcagagccacactgaccgccgatacctctagcagcacagcctacatgcagctgagcagcctgaccagcgaagatagcgccgtgtacttctgtgcccggtccatcacaacagtcgtgggctgcgctatggactattggggccagggaacaagcgtgaccgtgtctagtacgcgtatccagaaccctgatcctgccgtgtaccagctgcgggatagcaagagcagcgacaagagcgtgtgtctgttcaccgacttcgacagccagaccaacgtgtcccagagcaaggactccgacgtgtacatcaccgataagtgcgtgctggacatgcggagcatggacttcaagagcaactccgccgtggcctggtccaacaagtccgatttcgcctgcgccaacgccttcaacaacagcattatccccgaggacacattcttcccaagccccgagagcagctgcggctttaccagcgagagctaccagcagggcgtgctgagcgccaccatcctgtacgagatcctgctgggcaaggccaccctgtacgccgtgctggtgtctgccctggtgctgatggctatggtcaagcggaaggacagccgggga

SEQ ID NO: 33917 - DNA, 2019 bp, synthetic construct
  source 1..2019: mol_type = other DNA
atggccttaccagtgaccgccttgctcctgccgctggccttgctgctccacgccgccaggccggacatccagatgacacagagccctagcagcctgtctgccagcgtgggagacagagtgaccatcacatgcaaggccagcgaccacatcaacaactggctggcctggtatcagcagaagcctggacaggcccctaagctgctgatctacggcgctaccacactggaaacaggcgtgcccagcagattttctggcagcggctctggcaccgactacaccctgacaatatccagcctccagcctgaggacttcgccacctactactgtcagcagagctggaacaccccttggacattcggccagggcaccaagctggaaatcaagagactcgagatccagaaccctgatcctgccgtgtaccagctgcgggatagcaagagcagcgacaagagcgtgtgtctgttcaccgacttcgacagccagaccaacgtgtcccagagcaaggactccgacgtgtacatcaccgataagtgcgtgctggacatgcggagcatggacttcaagagcaactccgccgtggcctggtccaacaagtccgatttcgcctgcgccaacgccttcaacaacagcattatccccgaggacacattcttcccaagccccgagagcagctgcggctttaccagcgagagctaccagcagggcgtgctgagcgccaccatcctgtacgagatcctgctgggcaaggccaccctgtacgccgtgctggtgtctgccctggtgctgatggctatggtcaagcggaaggacagccggggacgcgccaagagaagcggatctggcgtgaagcagaccctgaatttcgacctgctgaagctggctggcgacgtggaatccaacccaggccctactagtatggactggatttggcgcatccttttccttgtcggcgctgctaccggcgcccattccgggcccgaagttgctgccctcgagaaggaggtagcagctttggaaaaagaagtcgcagcccttgagaaagaagttgcggctctggagaagggatccggcggcggaggatctggcggaggcggatctgggggcggaggctctttcgaacaagttcagcttcaacagcctggcgctgagctggtcaaacctggcgcttctgtgaagatgagctgcaaagccagcggctacaccttcagcagctactggatcaactggatgaagcagaaacccggccagggactcgaatggatcggccaaatctatcccggcgacggcgacaccaactacaacggcaagttcaagggcagagccacactgaccgccgatacctctagcagcacagcctacatgcagctgagcagcctgaccagcgaagatagcgccgtgtacttctgtgcccggtccatcacaacagtcgtgggctgcgctatggactattggggccagggaacaagcgtgaccgtgtctagtacgcgtgaggacctgaagaacgtgttcccacctgaggtggccgtgttcgagcctagcgaggccgagatcagccacacccagaaagccaccctcgtgtgcctggctaccggcttctaccccgaccatgtggaactgtcttggtgggtcaacggcaaagaggtgcacagcggcgtgtgtaccgacccccagccactgaaagaacagcccgccctgaacgacagccggtactgcctgagcagcagactgagagtgtccgccaccttctggcagaacccccggaaccacttcagatgccaggtgcagttctacggcctgagcgagaacgacgagtggacccaggacagagccaagcccgtgacccagatcgtgtctgccgaagcctggggcagagccgattgcgacgtgaagctggtggaaaagagcttcgagacagacaccaacctgaacttccagaacctgagcgtgatcggcttcagaatcctgctgctgaaagtggccggctttaacctgctgatgaccctgcggctgtggtccagc

SEQ ID NO: 33918 - DNA, 2277 bp, synthetic construct
  source 1..2277: mol_type = other DNA
atggccttaccagtgaccgccttgctcctgccgctggccttgctgctccacgccgccaggccggacatccagatgacacagagccctagcagcctgtctgccagcgtgggagacagagtgaccatcacatgcaaggccagcgaccacatcaacaactggctggcctggtatcagcagaagcctggacaggcccctaagctgctgatctacggcgctaccacactggaaacaggcgtgcccagcagattttctggcagcggctctggcaccgactacaccctgacaatatccagcctccagcctgaggacttcgccacctactactgtcagcagagctggaacaccccttggacattcggccagggcaccaagctggaaatcaagagactcgaggacctgaagaacgtgttcccacctgaggtggccgtgttcgagcctagcgaggccgagatcagccacacccagaaagccaccctcgtgtgcctggctaccggcttctaccccgaccatgtggaactgtcttggtgggtcaacggcaaagaggtgcacagcggcgtgtgtaccgacccccagccactgaaagaacagcccgccctgaacgacagccggtactgcctgagcagcagactgagagtgtccgccaccttctggcagaacccccggaaccacttcagatgccaggtgcagttctacggcctgagcgagaacgacgagtggacccaggacagagccaagcccgtgacccagatcgtgtctgccgaagcctggggcagagccgattgcgacgtgaagctggtggaaaagagcttcgagacagacaccaacctgaacttccagaacctgagcgtgatcggcttcagaatcctgctgctgaaagtggccggctttaacctgctgatgaccctgcggctgtggtccagcagggccaagcgatctggatctggagcaacaaacttctcactactcaaacaagcaggtgacgtggaggagaatcccgggcctactagtatggactggatttggcgcatccttttccttgtcggcgctgctaccggcgcccattccgggccccaggttcagctgcaagagtctggcggaggacttgctcaagctggcggaagcctgagactgtcttgtgccgcctctggcagaaccttcagcatgggctggtttagacaggcccctggcaaagagagagagttcgtcgccgccatcacatacagcggcggcagcccttactacgcctcttctgtcagaggccggttcaccatcagccgggacaacgccaagaacaccgtgtacctccagatgaacagcctgaagccagaggacaccgccgtgtactactgtgccgccaatccaacctacggcagcgactggaatgccgagaattggggccagggcacccaagtgacagtgtctagtggatccggcggcggaggatctggcggaggcggatctgggggcggaggctctttcgaacaagttcagcttcaacagcctggcgctgagctggtcaaacctggcgcttctgtgaagatgagctgcaaagccagcggctacaccttcagcagctactggatcaactggatgaagcagaaacccggccagggactcgaatggatcggccaaatctatcccggcgacggcgacaccaactacaacggcaagttcaagggcagagccacactgaccgccgatacctctagcagcacagcctacatgcagctgagcagcctgaccagcgaagatagcgccgtgtacttctgtgcccggtccatcacaacagtcgtgggctgcgctatggactattggggccagggaacaagcgtgaccgtgtctagtacgcgtatccagaaccctgatcctgccgtgtaccagctgcgggatagcaagagcagcgacaagagcgtgtgtctgttcaccgacttcgacagccagaccaacgtgtcccagagcaaggactccgacgtgtacatcaccgataagtgcgtgctggacatgcggagcatggacttcaagagcaactccgccgtggcctggtccaacaagtccgatttcgcctgcgccaacgccttcaacaacagcattatccccgaggacacattcttcccaagccccgagagcagctgcggctttaccagcgagagctaccagcagggcgtgctgagcgccaccatcctgtacgagatcctgctgggcaaggccaccctgtacgccgtgctggtgtctgccctggtgctgatggctatggtcaagcggaaggacagccgggga

SEQ ID NO: 33919 - DNA, 2289 bp, synthetic construct
  source 1..2289: mol_type = other DNA
atggccttaccagtgaccgccttgctcctgccgctggccttgctgctccacgccgccaggccggacatccagatgacacagagccctagcagcctgtctgccagcgtgggagacagagtgaccatcacatgcaaggccagcgaccacatcaacaactggctggcctggtatcagcagaagcctggacaggcccctaagctgctgatctacggcgctaccacactggaaacaggcgtgcccagcagattttctggcagcggctctggcaccgactacaccctgacaatatccagcctccagcctgaggacttcgccacctactactgtcagcagagctggaacaccccttggacattcggccagggcaccaagctggaaatcaagagactcgagatccagaaccctgatcctgccgtgtaccagctgcgggatagcaagagcagcgacaagagcgtgtgtctgttcaccgacttcgacagccagaccaacgtgtcccagagcaaggactccgacgtgtacatcaccgataagtgcgtgctggacatgcggagcatggacttcaagagcaactccgccgtggcctggtccaacaagtccgatttcgcctgcgccaacgccttcaacaacagcattatccccgaggacacattcttcccaagccccgagagcagctgcggctttaccagcgagagctaccagcagggcgtgctgagcgccaccatcctgtacgagatcctgctgggcaaggccaccctgtacgccgtgctggtgtctgccctggtgctgatggctatggtcaagcggaaggacagccggggacgcgccaagagaagcggatctggcgtgaagcagaccctgaatttcgacctgctgaagctggctggcgacgtggaatccaacccaggccctactagtatggactggatttggcgcatccttttccttgtcggcgctgctaccggcgcccattccgggccccaggttcagctgcaagagtctggcggaggacttgctcaagctggcggaagcctgagactgtcttgtgccgcctctggcagaaccttcagcatgggctggtttagacaggcccctggcaaagagagagagttcgtcgccgccatcacatacagcggcggcagcccttactacgcctcttctgtcagaggccggttcaccatcagccgggacaacgccaagaacaccgtgtacctccagatgaacagcctgaagccagaggacaccgccgtgtactactgtgccgccaatccaacctacggcagcgactggaatgccgagaattggggccagggcacccaagtgacagtgtctagtggatccggcggcggaggatctggcggaggcggatctgggggcggaggctctttcgaacaagttcagcttcaacagcctggcgctgagctggtcaaacctggcgcttctgtgaagatgagctgcaaagccagcggctacaccttcagcagctactggatcaactggatgaagcagaaacccggccagggactcgaatggatcggccaaatctatcccggcgacggcgacaccaactacaacggcaagttcaagggcagagccacactgaccgccgatacctctagcagcacagcctacatgcagctgagcagcctgaccagcgaagatagcgccgtgtacttctgtgcccggtccatcacaacagtcgtgggctgcgctatggactattggggccagggaacaagcgtgaccgtgtctagtacgcgtgaggacctgaagaacgtgttcccacctgaggtggccgtgttcgagcctagcgaggccgagatcagccacacccagaaagccaccctcgtgtgcctggctaccggcttctaccccgaccatgtggaactgtcttggtgggtcaacggcaaagaggtgcacagcggcgtgtgtaccgacccccagccactgaaagaacagcccgccctgaacgacagccggtactgcctgagcagcagactgagagtgtccgccaccttctggcagaacccccggaaccacttcagatgccaggtgcagttctacggcctgagcgagaacgacgagtggacccaggacagagccaagcccgtgacccagatcgtgtctgccgaagcctggggcagagccgattgcgacgtgaagctggtggaaaagagcttcgagacagacaccaacctgaacttccagaacctgagcgtgatcggcttcagaatcctgctgctgaaagtggccggctttaacctgctgatgaccctgcggctgtggtccagc

SEQ ID NO: 33920 - DNA, 2295 bp, synthetic construct
  source 1..2295: mol_type = other DNA
atggccttaccagtgaccgccttgctcctgccgctggccttgctgctccacgccgccaggccggaagtgcaactggtggaatctggaggctctctggtgcagccagggggaagcctgagactgtcttgtgccgcttccggcttcaccttcgacgactacgccatgagctgggtgcgccaggtgccaggcaaaggcctggaatgggtgtccagcatcaactggagcggcacccacaccgattacgccgactccgtgaaaggcagattcacaatcagcagaaacaacgccaacaataccctgtacctgcagatgaactccctgaagtctgaggatacagcagtgtattattgcgccaagaactggcgggacgccggcaccacttggtttgagaaaagcggctctgccggacagggaacccaagtgacagtgtcctccggtaccggcggaggcggatctggcggcggaggtagcggtggcggaggatctgaattcgacatccagatgacacagagccctagcagcctgtctgccagcgtgggagacagagtgaccatcacatgcaaggccagcgaccacatcaacaactggctggcctggtatcagcagaagcctggacaggcccctaagctgctgatctacggcgctaccacactggaaacaggcgtgcccagcagattttctggcagcggctctggcaccgactacaccctgacaatatccagcctccagcctgaggacttcgccacctactactgtcagcagagctggaacaccccttggacattcggccagggcaccaagctggaaatcaagagactcgaggacctgaagaacgtgttcccacctgaggtggccgtgttcgagcctagcgaggccgagatcagccacacccagaaagccaccctcgtgtgcctggctaccggcttctaccccgaccatgtggaactgtcttggtgggtcaacggcaaagaggtgcacagcggcgtgtgtaccgacccccagccactgaaagaacagcccgccctgaacgacagccggtactgcctgagcagcagactgagagtgtccgccaccttctggcagaacccccggaaccacttcagatgccaggtgcagttctacggcctgagcgagaacgacgagtggacccaggacagagccaagcccgtgacccagatcgtgtctgccgaagcctggggcagagccgattgcgacgtgaagctggtggaaaagagcttcgagacagacaccaacctgaacttccagaacctgagcgtgatcggcttcagaatcctgctgctgaaagtggccggctttaacctgctgatgaccctgcggctgtggtccagcagggccaagcgatctggatctggagcaacaaacttctcactactcaaacaagcaggtgacgtggaggagaatcccgggcctactagtatggactggatttggcgcatccttttccttgtcggcgctgctaccggcgcgcattccttcgaacaagttcagcttcaacagcctggcgctgagctggtcaaacctggcgcttctgtgaagatgagctgcaaagccagcggctacaccttcagcagctactggatcaactggatgaagcagaaacccggccagggactcgaatggatcggccaaatctatcccggcgacggcgacaccaactacaacggcaagttcaagggcagagccacactgaccgccgatacctctagcagcacagcctacatgcagctgagcagcctgaccagcgaagatagcgccgtgtacttctgtgcccggtccatcacaacagtcgtgggctgcgctatggactattggggccagggaacaagcgtgaccgtgtctagtacgcgtatccagaaccctgatcctgccgtgtaccagctgcgggatagcaagagcagcgacaagagcgtgtgtctgttcaccgacttcgacagccagaccaacgtgtcccagagcaaggactccgacgtgtacatcaccgataagtgcgtgctggacatgcggagcatggacttcaagagcaactccgccgtggcctggtccaacaagtccgatttcgcctgcgccaacgccttcaacaacagcattatccccgaggacacattcttcccaagccccgagagcagctgcggctttaccagcgagagctaccagcagggcgtgctgagcgccaccatcctgtacgagatcctgctgggcaaggccaccctgtacgccgtgctggtgtctgccctggtgctgatggctatggtcaagcggaaggacagccgggga

SEQ ID NO: 33921 - DNA, 2307 bp, synthetic construct
  source 1..2307: mol_type = other DNA
atggccttaccagtgaccgccttgctcctgccgctggccttgctgctccacgccgccaggccggaagtgcaactggtggaatctggaggctctctggtgcagccagggggaagcctgagactgtcttgtgccgcttccggcttcaccttcgacgactacgccatgagctgggtgcgccaggtgccaggcaaaggcctggaatgggtgtccagcatcaactggagcggcacccacaccgattacgccgactccgtgaaaggcagattcacaatcagcagaaacaacgccaacaataccctgtacctgcagatgaactccctgaagtctgaggatacagcagtgtattattgcgccaagaactggcgggacgccggcaccacttggtttgagaaaagcggctctgccggacagggaacccaagtgacagtgtcctccggtaccggcggaggcggatctggcggcggaggtagcggtggcggaggatctgaattcgacatccagatgacacagagccctagcagcctgtctgccagcgtgggagacagagtgaccatcacatgcaaggccagcgaccacatcaacaactggctggcctggtatcagcagaagcctggacaggcccctaagctgctgatctacggcgctaccacactggaaacaggcgtgcccagcagattttctggcagcggctctggcaccgactacaccctgacaatatccagcctccagcctgaggacttcgccacctactactgtcagcagagctggaacaccccttggacattcggccagggcaccaagctggaaatcaagagactcgagatccagaaccctgatcctgccgtgtaccagctgcgggatagcaagagcagcgacaagagcgtgtgtctgttcaccgacttcgacagccagaccaacgtgtcccagagcaaggactccgacgtgtacatcaccgataagtgcgtgctggacatgcggagcatggacttcaagagcaactccgccgtggcctggtccaacaagtccgatttcgcctgcgccaacgccttcaacaacagcattatccccgaggacacattcttcccaagccccgagagcagctgcggctttaccagcgagagctaccagcagggcgtgctgagcgccaccatcctgtacgagatcctgctgggcaaggccaccctgtacgccgtgctggtgtctgccctggtgctgatggctatggtcaagcggaaggacagccggggacgcgccaagagaagcggatctggcgtgaagcagaccctgaatttcgacctgctgaagctggctggcgacgtggaatccaacccaggccctactagtatggactggatttggcgcatccttttccttgtcggcgctgctaccggcgcgcattccttcgaacaagttcagcttcaacagcctggcgctgagctggtcaaacctggcgcttctgtgaagatgagctgcaaagccagcggctacaccttcagcagctactggatcaactggatgaagcagaaacccggccagggactcgaatggatcggccaaatctatcccggcgacggcgacaccaactacaacggcaagttcaagggcagagccacactgaccgccgatacctctagcagcacagcctacatgcagctgagcagcctgaccagcgaagatagcgccgtgtacttctgtgcccggtccatcacaacagtcgtgggctgcgctatggactattggggccagggaacaagcgtgaccgtgtctagtacgcgtgaggacctgaagaacgtgttcccacctgaggtggccgtgttcgagcctagcgaggccgagatcagccacacccagaaagccaccctcgtgtgcctggctaccggcttctaccccgaccatgtggaactgtcttggtgggtcaacggcaaagaggtgcacagcggcgtgtgtaccgacccccagccactgaaagaacagcccgccctgaacgacagccggtactgcctgagcagcagactgagagtgtccgccaccttctggcagaacccccggaaccacttcagatgccaggtgcagttctacggcctgagcgagaacgacgagtggacccaggacagagccaagcccgtgacccagatcgtgtctgccgaagcctggggcagagccgattgcgacgtgaagctggtggaaaagagcttcgagacagacaccaacctgaacttccagaacctgagcgtgatcggcttcagaatcctgctgctgaaagtggccggctttaacctgctgatgaccctgcggctgtggtccagc

SEQ ID NO: 33922 - DNA, 2289 bp, synthetic construct
  source 1..2289: mol_type = other DNA
atggccttaccagtgaccgccttgctcctgccgctggccttgctgctccacgccgccaggccggaagttcagctgcttgagtctggcggaggactggttcaacctggcggaagcctgagactgtcttgtgccgccagcggcttcatcttcagcagctacgccatgagctgggtccgacaggctcctggaaagggccaagaatgggtttccggcgttagcggcacaggcgtgaacacctactacgccgatagcgtgaagggcagattcaccatcagccgggacaacagcaagaacaccctgtacctccagatgaacagcctgagagccgaggacaccgccgtgtactattgtgcctctggcaaaggctgggacagcggctcttggtacgaggactatagaggccagggcaccctggtcacagtttcttcaggtaccggcggaggcggatctggcggcggaggtagcggtggcggaggatctgaattcgacatccagatgacacagagccctagcagcctgtctgccagcgtgggagacagagtgaccatcacatgcaaggccagcgaccacatcaacaactggctggcctggtatcagcagaagcctggacaggcccctaagctgctgatctacggcgctaccacactggaaacaggcgtgcccagcagattttctggcagcggctctggcaccgactacaccctgacaatatccagcctccagcctgaggacttcgccacctactactgtcagcagagctggaacaccccttggacattcggccagggcaccaagctggaaatcaagagactcgaggacctgaagaacgtgttcccacctgaggtggccgtgttcgagcctagcgaggccgagatcagccacacccagaaagccaccctcgtgtgcctggctaccggcttctaccccgaccatgtggaactgtcttggtgggtcaacggcaaagaggtgcacagcggcgtgtgtaccgacccccagccactgaaagaacagcccgccctgaacgacagccggtactgcctgagcagcagactgagagtgtccgccaccttctggcagaacccccggaaccacttcagatgccaggtgcagttctacggcctgagcgagaacgacgagtggacccaggacagagccaagcccgtgacccagatcgtgtctgccgaagcctggggcagagccgattgcgacgtgaagctggtggaaaagagcttcgagacagacaccaacctgaacttccagaacctgagcgtgatcggcttcagaatcctgctgctgaaagtggccggctttaacctgctgatgaccctgcggctgtggtccagcagggccaagcgatctggatctggagcaacaaacttctcactactcaaacaagcaggtgacgtggaggagaatcccgggcctactagtatggactggatttggcgcatccttttccttgtcggcgctgctaccggcgcgcattccttcgaacaagttcagcttcaacagcctggcgctgagctggtcaaacctggcgcttctgtgaagatgagctgcaaagccagcggctacaccttcagcagctactggatcaactggatgaagcagaaacccggccagggactcgaatggatcggccaaatctatcccggcgacggcgacaccaactacaacggcaagttcaagggcagagccacactgaccgccgatacctctagcagcacagcctacatgcagctgagcagcctgaccagcgaagatagcgccgtgtacttctgtgcccggtccatcacaacagtcgtgggctgcgctatggactattggggccagggaacaagcgtgaccgtgtctagtacgcgtatccagaaccctgatcctgccgtgtaccagctgcgggatagcaagagcagcgacaagagcgtgtgtctgttcaccgacttcgacagccagaccaacgtgtcccagagcaaggactccgacgtgtacatcaccgataagtgcgtgctggacatgcggagcatggacttcaagagcaactccgccgtggcctggtccaacaagtccgatttcgcctgcgccaacgccttcaacaacagcattatccccgaggacacattcttcccaagccccgagagcagctgcggctttaccagcgagagctaccagcagggcgtgctgagcgccaccatcctgtacgagatcctgctgggcaaggccaccctgtacgccgtgctggtgtctgccctggtgctgatggctatggtcaagcggaaggacagccgggga

SEQ ID NO: 33923 - DNA, 2301 bp, synthetic construct
  source 1..2301: mol_type = other DNA
atggccttaccagtgaccgccttgctcctgccgctggccttgctgctccacgccgccaggccggaagttcagctgcttgagtctggcggaggactggttcaacctggcggaagcctgagactgtcttgtgccgccagcggcttcatcttcagcagctacgccatgagctgggtccgacaggctcctggaaagggccaagaatgggtttccggcgttagcggcacaggcgtgaacacctactacgccgatagcgtgaagggcagattcaccatcagccgggacaacagcaagaacaccctgtacctccagatgaacagcctgagagccgaggacaccgccgtgtactattgtgcctctggcaaaggctgggacagcggctcttggtacgaggactatagaggccagggcaccctggtcacagtttcttcaggtaccggcggaggcggatctggcggcggaggtagcggtggcggaggatctgaattcgacatccagatgacacagagccctagcagcctgtctgccagcgtgggagacagagtgaccatcacatgcaaggccagcgaccacatcaacaactggctggcctggtatcagcagaagcctggacaggcccctaagctgctgatctacggcgctaccacactggaaacaggcgtgcccagcagattttctggcagcggctctggcaccgactacaccctgacaatatccagcctccagcctgaggacttcgccacctactactgtcagcagagctggaacaccccttggacattcggccagggcaccaagctggaaatcaagagactcgagatccagaaccctgatcctgccgtgtaccagctgcgggatagcaagagcagcgacaagagcgtgtgtctgttcaccgacttcgacagccagaccaacgtgtcccagagcaaggactccgacgtgtacatcaccgataagtgcgtgctggacatgcggagcatggacttcaagagcaactccgccgtggcctggtccaacaagtccgatttcgcctgcgccaacgccttcaacaacagcattatccccgaggacacattcttcccaagccccgagagcagctgcggctttaccagcgagagctaccagcagggcgtgctgagcgccaccatcctgtacgagatcctgctgggcaaggccaccctgtacgccgtgctggtgtctgccctggtgctgatggctatggtcaagcggaaggacagccggggacgcgccaagagaagcggatctggcgtgaagcagaccctgaatttcgacctgctgaagctggctggcgacgtggaatccaacccaggccctactagtatggactggatttggcgcatccttttccttgtcggcgctgctaccggcgcgcattccttcgaacaagttcagcttcaacagcctggcgctgagctggtcaaacctggcgcttctgtgaagatgagctgcaaagccagcggctacaccttcagcagctactggatcaactggatgaagcagaaacccggccagggactcgaatggatcggccaaatctatcccggcgacggcgacaccaactacaacggcaagttcaagggcagagccacactgaccgccgatacctctagcagcacagcctacatgcagctgagcagcctgaccagcgaagatagcgccgtgtacttctgtgcccggtccatcacaacagtcgtgggctgcgctatggactattggggccagggaacaagcgtgaccgtgtctagtacgcgtgaggacctgaagaacgtgttcccacctgaggtggccgtgttcgagcctagcgaggccgagatcagccacacccagaaagccaccctcgtgtgcctggctaccggcttctaccccgaccatgtggaactgtcttggtgggtcaacggcaaagaggtgcacagcggcgtgtgtaccgacccccagccactgaaagaacagcccgccctgaacgacagccggtactgcctgagcagcagactgagagtgtccgccaccttctggcagaacccccggaaccacttcagatgccaggtgcagttctacggcctgagcgagaacgacgagtggacccaggacagagccaagcccgtgacccagatcgtgtctgccgaagcctggggcagagccgattgcgacgtgaagctggtggaaaagagcttcgagacagacaccaacctgaacttccagaacctgagcgtgatcggcttcagaatcctgctgctgaaagtggccggctttaacctgctgatgaccctgcggctgtggtccagc

SEQ ID NO: 33924 - DNA, 2193 bp, synthetic construct
  source 1..2193: mol_type = other DNA
atggccttaccagtgaccgccttgctcctgccgctggccttgctgctccacgccgccaggccgatgctgcccgctcctaagaatctggtggtgtccagaatcaccgaggacagcgccagactgtcttggacagctcctgatgccgccttcgacagcttccccatccggtacatcgagacactgatctggggcgaagccatctggctggatgtgcctggaagcgagagaagctacgacctgaccggactgaagcctggcacagagtatgccgtggtcatcaccggcgtgaaaggcggcagattctctagccctctggtggcctctttcaccaccggtaccggcggaggcggatctggcggcggaggtagcggtggcggaggatctgaattcgacatccagatgacacagagccctagcagcctgtctgccagcgtgggagacagagtgaccatcacatgcaaggccagcgaccacatcaacaactggctggcctggtatcagcagaagcctggacaggcccctaagctgctgatctacggcgctaccacactggaaacaggcgtgcccagcagattttctggcagcggctctggcaccgactacaccctgacaatatccagcctccagcctgaggacttcgccacctactactgtcagcagagctggaacaccccttggacattcggccagggcaccaagctggaaatcaagagactcgaggacctgaagaacgtgttcccacctgaggtggccgtgttcgagcctagcgaggccgagatcagccacacccagaaagccaccctcgtgtgcctggctaccggcttctaccccgaccatgtggaactgtcttggtgggtcaacggcaaagaggtgcacagcggcgtgtgtaccgacccccagccactgaaagaacagcccgccctgaacgacagccggtactgcctgagcagcagactgagagtgtccgccaccttctggcagaacccccggaaccacttcagatgccaggtgcagttctacggcctgagcgagaacgacgagtggacccaggacagagccaagcccgtgacccagatcgtgtctgccgaagcctggggcagagccgattgcgacgtgaagctggtggaaaagagcttcgagacagacaccaacctgaacttccagaacctgagcgtgatcggcttcagaatcctgctgctgaaagtggccggctttaacctgctgatgaccctgcggctgtggtccagcagggccaagcgatctggatctggagcaacaaacttctcactactcaaacaagcaggtgacgtggaggagaatcccgggcctactagtatggactggatttggcgcatccttttccttgtcggcgctgctaccggcgcgcattccttcgaacaagttcagcttcaacagcctggcgctgagctggtcaaacctggcgcttctgtgaagatgagctgcaaagccagcggctacaccttcagcagctactggatcaactggatgaagcagaaacccggccagggactcgaatggatcggccaaatctatcccggcgacggcgacaccaactacaacggcaagttcaagggcagagccacactgaccgccgatacctctagcagcacagcctacatgcagctgagcagcctgaccagcgaagatagcgccgtgtacttctgtgcccggtccatcacaacagtcgtgggctgcgctatggactattggggccagggaacaagcgtgaccgtgtctagtacgcgtatccagaaccctgatcctgccgtgtaccagctgcgggatagcaagagcagcgacaagagcgtgtgtctgttcaccgacttcgacagccagaccaacgtgtcccagagcaaggactccgacgtgtacatcaccgataagtgcgtgctggacatgcggagcatggacttcaagagcaactccgccgtggcctggtccaacaagtccgatttcgcctgcgccaacgccttcaacaacagcattatccccgaggacacattcttcccaagccccgagagcagctgcggctttaccagcgagagctaccagcagggcgtgctgagcgccaccatcctgtacgagatcctgctgggcaaggccaccctgtacgccgtgctggtgtctgccctggtgctgatggctatggtcaagcggaaggacagccgggga

SEQ ID NO: 33925 - DNA, 2205 bp, synthetic construct
  source 1..2205: mol_type = other DNA
atggccttaccagtgaccgccttgctcctgccgctggccttgctgctccacgccgccaggccgatgctgcccgctcctaagaatctggtggtgtccagaatcaccgaggacagcgccagactgtcttggacagctcctgatgccgccttcgacagcttccccatccggtacatcgagacactgatctggggcgaagccatctggctggatgtgcctggaagcgagagaagctacgacctgaccggactgaagcctggcacagagtatgccgtggtcatcaccggcgtgaaaggcggcagattctctagccctctggtggcctctttcaccaccggtaccggcggaggcggatctggcggcggaggtagcggtggcggaggatctgaattcgacatccagatgacacagagccctagcagcctgtctgccagcgtgggagacagagtgaccatcacatgcaaggccagcgaccacatcaacaactggctggcctggtatcagcagaagcctggacaggcccctaagctgctgatctacggcgctaccacactggaaacaggcgtgcccagcagattttctggcagcggctctggcaccgactacaccctgacaatatccagcctccagcctgaggacttcgccacctactactgtcagcagagctggaacaccccttggacattcggccagggcaccaagctggaaatcaagagactcgagatccagaaccctgatcctgccgtgtaccagctgcgggatagcaagagcagcgacaagagcgtgtgtctgttcaccgacttcgacagccagaccaacgtgtcccagagcaaggactccgacgtgtacatcaccgataagtgcgtgctggacatgcggagcatggacttcaagagcaactccgccgtggcctggtccaacaagtccgatttcgcctgcgccaacgccttcaacaacagcattatccccgaggacacattcttcccaagccccgagagcagctgcggctttaccagcgagagctaccagcagggcgtgctgagcgccaccatcctgtacgagatcctgctgggcaaggccaccctgtacgccgtgctggtgtctgccctggtgctgatggctatggtcaagcggaaggacagccggggacgcgccaagagaagcggatctggcgtgaagcagaccctgaatttcgacctgctgaagctggctggcgacgtggaatccaacccaggccctactagtatggactggatttggcgcatccttttccttgtcggcgctgctaccggcgcgcattccttcgaacaagttcagcttcaacagcctggcgctgagctggtcaaacctggcgcttctgtgaagatgagctgcaaagccagcggctacaccttcagcagctactggatcaactggatgaagcagaaacccggccagggactcgaatggatcggccaaatctatcccggcgacggcgacaccaactacaacggcaagttcaagggcagagccacactgaccgccgatacctctagcagcacagcctacatgcagctgagcagcctgaccagcgaagatagcgccgtgtacttctgtgcccggtccatcacaacagtcgtgggctgcgctatggactattggggccagggaacaagcgtgaccgtgtctagtacgcgtgaggacctgaagaacgtgttcccacctgaggtggccgtgttcgagcctagcgaggccgagatcagccacacccagaaagccaccctcgtgtgcctggctaccggcttctaccccgaccatgtggaactgtcttggtgggtcaacggcaaagaggtgcacagcggcgtgtgtaccgacccccagccactgaaagaacagcccgccctgaacgacagccggtactgcctgagcagcagactgagagtgtccgccaccttctggcagaacccccggaaccacttcagatgccaggtgcagttctacggcctgagcgagaacgacgagtggacccaggacagagccaagcccgtgacccagatcgtgtctgccgaagcctggggcagagccgattgcgacgtgaagctggtggaaaagagcttcgagacagacaccaacctgaacttccagaacctgagcgtgatcggcttcagaatcctgctgctgaaagtggccggctttaacctgctgatgaccctgcggctgtggtccagc

SEQ ID NO: 33926 - DNA, 2280 bp, synthetic construct
  source 1..2280: mol_type = other DNA
atggccttaccagtgaccgccttgctcctgccgctggccttgctgctccacgccgccaggccggaggtgcagctggttgaatctggcggaggactggttcagcctggcggatctctgagactgtcttgtgccgccagcggcttcaacatcaaggatacctgtatcggctgggttcgcagagcccctggcaaagaggaagaactggtcgccaaaatctgcaagtacagcggccacaccagatacgccgacagcgtgaagggcagattcaccatcagcgccgacaccagcaagaacaccgcctacctccagatgaacagcctgagagccgaggacaccgccgtgtactattgtgccgctgtgtccgtcagagatgggcactacaattactggggccagggcaccaccgtgaccgtttcttcaggtaccggcggaggcggatctggcggcggaggtagcggtggcggaggatctgaattcgacatccagatgacacagagccctagcagcctgtctgccagcgtgggagacagagtgaccatcacatgcaaggccagcgaccacatcaacaactggctggcctggtatcagcagaagcctggacaggcccctaagctgctgatctacggcgctaccacactggaaacaggcgtgcccagcagattttctggcagcggctctggcaccgactacaccctgacaatatccagcctccagcctgaggacttcgccacctactactgtcagcagagctggaacaccccttggacattcggccagggcaccaagctggaaatcaagagactcgaggacctgaagaacgtgttcccacctgaggtggccgtgttcgagcctagcgaggccgagatcagccacacccagaaagccaccctcgtgtgcctggctaccggcttctaccccgaccatgtggaactgtcttggtgggtcaacggcaaagaggtgcacagcggcgtgtgtaccgacccccagccactgaaagaacagcccgccctgaacgacagccggtactgcctgagcagcagactgagagtgtccgccaccttctggcagaacccccggaaccacttcagatgccaggtgcagttctacggcctgagcgagaacgacgagtggacccaggacagagccaagcccgtgacccagatcgtgtctgccgaagcctggggcagagccgattgcgacgtgaagctggtggaaaagagcttcgagacagacaccaacctgaacttccagaacctgagcgtgatcggcttcagaatcctgctgctgaaagtggccggctttaacctgctgatgaccctgcggctgtggtccagcagggccaagcgatctggatctggagcaacaaacttctcactactcaaacaagcaggtgacgtggaggagaatcccgggcctactagtatggactggatttggcgcatccttttccttgtcggcgctgctaccggcgcgcattccttcgaacaagttcagcttcaacagcctggcgctgagctggtcaaacctggcgcttctgtgaagatgagctgcaaagccagcggctacaccttcagcagctactggatcaactggatgaagcagaaacccggccagggactcgaatggatcggccaaatctatcccggcgacggcgacaccaactacaacggcaagttcaagggcagagccacactgaccgccgatacctctagcagcacagcctacatgcagctgagcagcctgaccagcgaagatagcgccgtgtacttctgtgcccggtccatcacaacagtcgtgggctgcgctatggactattggggccagggaacaagcgtgaccgtgtctagtacgcgtatccagaaccctgatcctgccgtgtaccagctgcgggatagcaagagcagcgacaagagcgtgtgtctgttcaccgacttcgacagccagaccaacgtgtcccagagcaaggactccgacgtgtacatcaccgataagtgcgtgctggacatgcggagcatggacttcaagagcaactccgccgtggcctggtccaacaagtccgatttcgcctgcgccaacgccttcaacaacagcattatccccgaggacacattcttcccaagccccgagagcagctgcggctttaccagcgagagctaccagcagggcgtgctgagcgccaccatcctgtacgagatcctgctgggcaaggccaccctgtacgccgtgctggtgtctgccctggtgctgatggctatggtcaagcggaaggacagccgggga

SEQ ID NO: 33927 - DNA, 2292 bp, synthetic construct
  source 1..2292: mol_type = other DNA
atggccttaccagtgaccgccttgctcctgccgctggccttgctgctccacgccgccaggccggaggtgcagctggttgaatctggcggaggactggttcagcctggcggatctctgagactgtcttgtgccgccagcggcttcaacatcaaggatacctgtatcggctgggttcgcagagcccctggcaaagaggaagaactggtcgccaaaatctgcaagtacagcggccacaccagatacgccgacagcgtgaagggcagattcaccatcagcgccgacaccagcaagaacaccgcctacctccagatgaacagcctgagagccgaggacaccgccgtgtactattgtgccgctgtgtccgtcagagatgggcactacaattactggggccagggcaccaccgtgaccgtttcttcaggtaccggcggaggcggatctggcggcggaggtagcggtggcggaggatctgaattcgacatccagatgacacagagccctagcagcctgtctgccagcgtgggagacagagtgaccatcacatgcaaggccagcgaccacatcaacaactggctggcctggtatcagcagaagcctggacaggcccctaagctgctgatctacggcgctaccacactggaaacaggcgtgcccagcagattttctggcagcggctctggcaccgactacaccctgacaatatccagcctccagcctgaggacttcgccacctactactgtcagcagagctggaacaccccttggacattcggccagggcaccaagctggaaatcaagagactcgagatccagaaccctgatcctgccgtgtaccagctgcgggatagcaagagcagcgacaagagcgtgtgtctgttcaccgacttcgacagccagaccaacgtgtcccagagcaaggactccgacgtgtacatcaccgataagtgcgtgctggacatgcggagcatggacttcaagagcaactccgccgtggcctggtccaacaagtccgatttcgcctgcgccaacgccttcaacaacagcattatccccgaggacacattcttcccaagccccgagagcagctgcggctttaccagcgagagctaccagcagggcgtgctgagcgccaccatcctgtacgagatcctgctgggcaaggccaccctgtacgccgtgctggtgtctgccctggtgctgatggctatggtcaagcggaaggacagccggggacgcgccaagagaagcggatctggcgtgaagcagaccctgaatttcgacctgctgaagctggctggcgacgtggaatccaacccaggccctactagtatggactggatttggcgcatccttttccttgtcggcgctgctaccggcgcgcattccttcgaacaagttcagcttcaacagcctggcgctgagctggtcaaacctggcgcttctgtgaagatgagctgcaaagccagcggctacaccttcagcagctactggatcaactggatgaagcagaaacccggccagggactcgaatggatcggccaaatctatcccggcgacggcgacaccaactacaacggcaagttcaagggcagagccacactgaccgccgatacctctagcagcacagcctacatgcagctgagcagcctgaccagcgaagatagcgccgtgtacttctgtgcccggtccatcacaacagtcgtgggctgcgctatggactattggggccagggaacaagcgtgaccgtgtctagtacgcgtgaggacctgaagaacgtgttcccacctgaggtggccgtgttcgagcctagcgaggccgagatcagccacacccagaaagccaccctcgtgtgcctggctaccggcttctaccccgaccatgtggaactgtcttggtgggtcaacggcaaagaggtgcacagcggcgtgtgtaccgacccccagccactgaaagaacagcccgccctgaacgacagccggtactgcctgagcagcagactgagagtgtccgccaccttctggcagaacccccggaaccacttcagatgccaggtgcagttctacggcctgagcgagaacgacgagtggacccaggacagagccaagcccgtgacccagatcgtgtctgccgaagcctggggcagagccgattgcgacgtgaagctggtggaaaagagcttcgagacagacaccaacctgaacttccagaacctgagcgtgatcggcttcagaatcctgctgctgaaagtggccggctttaacctgctgatgaccctgcggctgtggtccagc

SEQ ID NO: 33928 - DNA, 3396 bp, synthetic construct
  source 1..3396: mol_type = other DNA
atggccttaccagtgaccgccttgctcctgccgctggccttgctgctccacgccgccaggccggaagtgcagctggttgaatctggcggaggactggttcaggctggcggatctctgagactgtcttgtgccgccagcggcagaacctttagcatgggctggtttagacaggcccctggcaaagagagagagttcgtcgccgccatcacatactctggcggcagcccttactacgccgactctgtgaagggcagattcaccatcagccgggacaacgccaagaacaccgtgtacctccagatgaacagcctgaagcctgaggacaccgccgtgtactactgcgccgccaatccaacatacggcagcgactggaacgccgagaattggggccagggaacccaagtgacagtgtctagcggtaccggcggaggcggatctggcggcggaggtagcggtggcggaggatctgaattcgacatccagatgacacagagccctagcagcctgtctgccagcgtgggagacagagtgaccatcacatgcaaggccagcgaccacatcaacaactggctggcctggtatcagcagaagcctggacaggcccctaagctgctgatctacggcgctaccacactggaaacaggcgtgcccagcagattttctggcagcggctctggcaccgactacaccctgacaatatccagcctccagcctgaggacttcgccacctactactgtcagcagagctggaacaccccttggacattcggccagggcaccaagctggaaatcaagagactcgaggacctgaagaacgtgttcccacctgaggtggccgtgttcgagcctagcgaggccgagatcagccacacccagaaagccaccctcgtgtgcctggctaccggcttctaccccgaccatgtggaactgtcttggtgggtcaacggcaaagaggtgcacagcggcgtgtgtaccgacccccagccactgaaagaacagcccgccctgaacgacagccggtactgcctgagcagcagactgagagtgtccgccaccttctggcagaacccccggaaccacttcagatgccaggtgcagttctacggcctgagcgagaacgacgagtggacccaggacagagccaagcccgtgacccagatcgtgtctgccgaagcctggggcagagccgattgcgacgtgaagctggtggaaaagagcttcgagacagacaccaacctgaacttccagaacctgagcgtgatcggcttcagaatcctgctgctgaaagtggccggctttaacctgctgatgaccctgcggctgtggtccagcagggccaagcgatctggatctggagcaacaaacttctcactactcaaacaagcaggtgacgtggaggagaatcccgggcctactagtgccaccatggactggatttggcgcatccttttccttgtcggcgctgctaccggcgcccattccgggcccgaagtgcaactggttgaatccggtggcggcctggtgcaagcaggcggatctctcagacttagctgtgccgcctccggcagaaccttcacaatgggatggtttaggcaggctccagggaaagagagagagttcgtcgccgccatctctctgtctcccacactggcctactacgccgactctgtgaaaggccggttcaccatctccagagataatgccaagaacaccgtggtgctgcaaatgaactctctgaaacccgaggatacagccctgtactattgtgccgctgaccggaagtccgtgatgagcatcagacccgattactggggacagggcacacaagtcacagtgtcctctggatccggcggcggaggatctggcggaggcggatctgggggcggaggctctttcgaacaagttcagcttcaacagcctggcgctgagctggtcaaacctggcgcttctgtgaagatgagctgcaaagccagcggctacaccttcagcagctactggatcaactggatgaagcagaaacccggccagggactcgaatggatcggccaaatctatcccggcgacggcgacaccaactacaacggcaagttcaagggcagagccacactgaccgccgatacctctagcagcacagcctacatgcagctgagcagcctgaccagcgaagatagcgccgtgtacttctgtgcccggtccatcacaacagtcgtgggctgcgctatggactattggggccagggaacaagcgtgaccgtgtctagtacgcgtatccagaaccctgatcctgccgtgtaccagctgcgggatagcaagagcagcgacaagagcgtgtgtctgttcaccgacttcgacagccagaccaacgtgtcccagagcaaggactccgacgtgtacatcaccgataagtgcgtgctggacatgcggagcatggacttcaagagcaactccgccgtggcctggtccaacaagtccgatttcgcctgcgccaacgccttcaacaacagcattatccccgaggacacattcttcccaagccccgagagcagctgcggctttaccagcgagagctaccagcagggcgtgctgagcgccaccatcctgtacgagatcctgctgggcaaggccaccctgtacgccgtgctggtgtctgccctggtgctgatggctatggtcaagcggaaggacagccggggacgcgccaagagaagcggatctggcgtgaagcagaccctgaatttcgacctgctgaagctggctggcgacgtggaatccaacccaggcccttctagaggccatatgaccgagtacaagcccacggtgcgcctcgccacccgcgacgacgtccccagggccgtacgcaccctcgccgccgcgttcgccgactaccccgccacgcgccacaccgtcgatccggaccgccacatcgagcgggtcaccgagctgcaagaactcttcctcacgcgcgtcgggctcgacatcggcaaggtgtgggtcgcggacgacggcgccgcggtggcggtctggaccacgccggagagcgtcgaagcgggggcggtgttcgccgagatcggcccgcgcatggccgagttgagcggttcccggctggccgcgcagcaacagatggaaggcctcctggcgccgcaccggcccaaggagcccgcgtggttcctggccaccgtcggcgtctcgcccgaccaccagggcaagggtctgggcagcgccgtcgtgctccccggagtggaggcggccgagcgcgccggggtgcccgccttcctggagacctccgcgccccgcaacctccccttctacgagcggctcggcttcaccgtcaccgccgacgtcgaggtgcccgaaggaccgcgcacctggtgcatgacccgcaagcccggtgcctga

SEQ ID NO: 33929 - DNA, 2310 bp, synthetic construct
  source 1..2310: mol_type = other DNA
atggccttaccagtgaccgccttgctcctgccgctggccttgctgctccacgccgccaggccggaagtgcagctggttgaatctggcggaggactggttcagcctggcggatctctgagactgtcttgtgccgcctctggcttcgccagcgactactatatcatcggctggttcagacaggcccctggcaaagagagagagggcgtcagctgtatcagcagcagatacgccaacaccaactacgccgacagcgtgaagggcagattcaccatcagccgggacaacgccaagaacaccgtgtacctccagatgaacagcctgaagcctgaggacaccgccgtgtactactgtgccgccgacaccagaagatacacctgtcctgacattgccaccatgcaccggaacttcgattcttggggccagggcacactggtcaccgtttcttctggtaccggcggaggcggatctggcggcggaggtagcggtggcggaggatctgaattcgacatccagatgacacagagccctagcagcctgtctgccagcgtgggagacagagtgaccatcacatgcaaggccagcgaccacatcaacaactggctggcctggtatcagcagaagcctggacaggcccctaagctgctgatctacggcgctaccacactggaaacaggcgtgcccagcagattttctggcagcggctctggcaccgactacaccctgacaatatccagcctccagcctgaggacttcgccacctactactgtcagcagagctggaacaccccttggacattcggccagggcaccaagctggaaatcaagagactcgaggacctgaagaacgtgttcccacctgaggtggccgtgttcgagcctagcgaggccgagatcagccacacccagaaagccaccctcgtgtgcctggctaccggcttctaccccgaccatgtggaactgtcttggtgggtcaacggcaaagaggtgcacagcggcgtgtgtaccgacccccagccactgaaagaacagcccgccctgaacgacagccggtactgcctgagcagcagactgagagtgtccgccaccttctggcagaacccccggaaccacttcagatgccaggtgcagttctacggcctgagcgagaacgacgagtggacccaggacagagccaagcccgtgacccagatcgtgtctgccgaagcctggggcagagccgattgcgacgtgaagctggtggaaaagagcttcgagacagacaccaacctgaacttccagaacctgagcgtgatcggcttcagaatcctgctgctgaaagtggccggctttaacctgctgatgaccctgcggctgtggtccagcagggccaagcgatctggatctggagcaacaaacttctcactactcaaacaagcaggtgacgtggaggagaatcccgggcctactagtatggactggatttggcgcatccttttccttgtcggcgctgctaccggcgcgcattccttcgaacaagttcagcttcaacagcctggcgctgagctggtcaaacctggcgcttctgtgaagatgagctgcaaagccagcggctacaccttcagcagctactggatcaactggatgaagcagaaacccggccagggactcgaatggatcggccaaatctatcccggcgacggcgacaccaactacaacggcaagttcaagggcagagccacactgaccgccgatacctctagcagcacagcctacatgcagctgagcagcctgaccagcgaagatagcgccgtgtacttctgtgcccggtccatcacaacagtcgtgggctgcgctatggactattggggccagggaacaagcgtgaccgtgtctagtacgcgtatccagaaccctgatcctgccgtgtaccagctgcgggatagcaagagcagcgacaagagcgtgtgtctgttcaccgacttcgacagccagaccaacgtgtcccagagcaaggactccgacgtgtacatcaccgataagtgcgtgctggacatgcggagcatggacttcaagagcaactccgccgtggcctggtccaacaagtccgatttcgcctgcgccaacgccttcaacaacagcattatccccgaggacacattcttcccaagccccgagagcagctgcggctttaccagcgagagctaccagcagggcgtgctgagcgccaccatcctgtacgagatcctgctgggcaaggccaccctgtacgccgtgctggtgtctgccctggtgctgatggctatggtcaagcggaaggacagccggggataa

SEQ ID NO: 33930 - DNA, 2310 bp, synthetic construct
  source 1..2310: mol_type = other DNA
atggccttaccagtgaccgccttgctcctgccgctggccttgctgctccacgccgccaggccggaagtgcagctggttgaatctggcggaggactggttcagcctggcggatctctgagactgagctgtgaagccagcggcttcgccagcgacgattacatcatcggctggttcagacaggcccctggcaaagagagagagggcgtcagctgcatcagctctaagtacgccaacaccgtgtacaccgacagcgtgaagggcagattcagactgagcagaggcaccgccaagaataccgtgtacctccagatgagcgccctgaagcctgaggataccgccgtgtactactgcgctatggacagccgcagagtgacatgccctgagatcagcaccatgcaccggaacttcgattcttggggccagggcacactggtcacagtgtcatctggtaccggcggaggcggatctggcggcggaggtagcggtggcggaggatctgaattcgacatccagatgacacagagccctagcagcctgtctgccagcgtgggagacagagtgaccatcacatgcaaggccagcgaccacatcaacaactggctggcctggtatcagcagaagcctggacaggcccctaagctgctgatctacggcgctaccacactggaaacaggcgtgcccagcagattttctggcagcggctctggcaccgactacaccctgacaatatccagcctccagcctgaggacttcgccacctactactgtcagcagagctggaacaccccttggacattcggccagggcaccaagctggaaatcaagagactcgaggacctgaagaacgtgttcccacctgaggtggccgtgttcgagcctagcgaggccgagatcagccacacccagaaagccaccctcgtgtgcctggctaccggcttctaccccgaccatgtggaactgtcttggtgggtcaacggcaaagaggtgcacagcggcgtgtgtaccgacccccagccactgaaagaacagcccgccctgaacgacagccggtactgcctgagcagcagactgagagtgtccgccaccttctggcagaacccccggaaccacttcagatgccaggtgcagttctacggcctgagcgagaacgacgagtggacccaggacagagccaagcccgtgacccagatcgtgtctgccgaagcctggggcagagccgattgcgacgtgaagctggtggaaaagagcttcgagacagacaccaacctgaacttccagaacctgagcgtgatcggcttcagaatcctgctgctgaaagtggccggctttaacctgctgatgaccctgcggctgtggtccagcagggccaagcgatctggatctggagcaacaaacttctcactactcaaacaagcaggtgacgtggaggagaatcccgggcctactagtatggactggatttggcgcatccttttccttgtcggcgctgctaccggcgcgcattccttcgaacaagttcagcttcaacagcctggcgctgagctggtcaaacctggcgcttctgtgaagatgagctgcaaagccagcggctacaccttcagcagctactggatcaactggatgaagcagaaacccggccagggactcgaatggatcggccaaatctatcccggcgacggcgacaccaactacaacggcaagttcaagggcagagccacactgaccgccgatacctctagcagcacagcctacatgcagctgagcagcctgaccagcgaagatagcgccgtgtacttctgtgcccggtccatcacaacagtcgtgggctgcgctatggactattggggccagggaacaagcgtgaccgtgtctagtacgcgtatccagaaccctgatcctgccgtgtaccagctgcgggatagcaagagcagcgacaagagcgtgtgtctgttcaccgacttcgacagccagaccaacgtgtcccagagcaaggactccgacgtgtacatcaccgataagtgcgtgctggacatgcggagcatggacttcaagagcaactccgccgtggcctggtccaacaagtccgatttcgcctgcgccaacgccttcaacaacagcattatccccgaggacacattcttcccaagccccgagagcagctgcggctttaccagcgagagctaccagcagggcgtgctgagcgccaccatcctgtacgagatcctgctgggcaaggccaccctgtacgccgtgctggtgtctgccctggtgctgatggctatggtcaagcggaaggacagccggggataa

SEQ ID NO: 33931 - DNA, 2307 bp, synthetic construct
  source 1..2307: mol_type = other DNA
atggccttaccagtgaccgccttgctcctgccgctggccttgctgctccacgccgccaggccggaagtgcagctggttgaatctggcggaggactggttcagcctggcggatctctgagactgtcttgtgccgcctctggcttcgccagcgactactatatcatcggctggttcagacaggcccctggcaaagagagagagggcgtcagctgtatcagcagcagatacgccaacaccaactacgccgacagcgtgaagggcagattcaccatcagccgggacaacgccaagaacaccgtgtacctccagatgaacagcctgaagcctgaggacaccgccgtgtactactgtgccgccgacaccagaagatacacctgtcctgacattgccaccatgcaccggaacttcgattcttggggccagggcacactggtcaccgtttcttctggtaccggcggaggcggatctggcggcggaggtagcggtggcggaggatctgaattcgacatccagatgacacagagccctagcagcctgtctgccagcgtgggagacagagtgaccatcacatgcaaggccagcgaccacatcaacaactggctggcctggtatcagcagaagcctggacaggcccctaagctgctgatctacggcgctaccacactggaaacaggcgtgcccagcagattttctggcagcggctctggcaccgactacaccctgacaatatccagcctccagcctgaggacttcgccacctactactgtcagcagagctggaacaccccttggacattcggccagggcaccaagctggaaatcaagagactcgagatccagaaccctgatcctgccgtgtaccagctgcgggatagcaagagcagcgacaagagcgtgtgtctgttcaccgacttcgacagccagaccaacgtgtcccagagcaaggactccgacgtgtacatcaccgataagtgcgtgctggacatgcggagcatggacttcaagagcaactccgccgtggcctggtccaacaagtccgatttcgcctgcgccaacgccttcaacaacagcattatccccgaggacacattcttcccaagccccgagagcagctgcggctttaccagcgagagctaccagcagggcgtgctgagcgccaccatcctgtacgagatcctgctgggcaaggccaccctgtacgccgtgctggtgtctgccctggtgctgatggctatggtcaagcggaaggacagccggggaagggccaagcgatctggatctggagcaacaaacttctcactactcaaacaagcaggtgacgtggaggagaatcccgggcctactagtatggactggatttggcgcatccttttccttgtcggcgctgctaccggcgcgcattccttcgaacaagttcagcttcaacagcctggcgctgagctggtcaaacctggcgcttctgtgaagatgagctgcaaagccagcggctacaccttcagcagctactggatcaactggatgaagcagaaacccggccagggactcgaatggatcggccaaatctatcccggcgacggcgacaccaactacaacggcaagttcaagggcagagccacactgaccgccgatacctctagcagcacagcctacatgcagctgagcagcctgaccagcgaagatagcgccgtgtacttctgtgcccggtccatcacaacagtcgtgggctgcgctatggactattggggccagggaacaagcgtgaccgtgtctagtacgcgtgacctgaagaacgtgttcccacctgaggtggccgtgttcgagcctagcgaggccgagatcagccacacccagaaagccaccctcgtgtgcctggctaccggcttctaccccgaccatgtggaactgtcttggtgggtcaacggcaaagaggtgcacagcggcgtgtgtaccgacccccagccactgaaagaacagcccgccctgaacgacagccggtactgcctgagcagcagactgagagtgtccgccaccttctggcagaacccccggaaccacttcagatgccaggtgcagttctacggcctgagcgagaacgacgagtggacccaggacagagccaagcccgtgacccagatcgtgtctgccgaagcctggggcagagccgattgcgacgtgaagctggtggaaaagagcttcgagacagacaccaacctgaacttccagaacctgagcgtgatcggcttcagaatcctgctgctgaaagtggccggctttaacctgctgatgaccctgcggctgtggtccagc

SEQ ID NO: 33932 - DNA, 2307 bp, synthetic construct
  source 1..2307: mol_type = other DNA
atggccttaccagtgaccgccttgctcctgccgctggccttgctgctccacgccgccaggccggaagtgcagctggttgaatctggcggaggactggttcagcctggcggatctctgagactgagctgtgaagccagcggcttcgccagcgacgattacatcatcggctggttcagacaggcccctggcaaagagagagagggcgtcagctgcatcagctctaagtacgccaacaccgtgtacaccgacagcgtgaagggcagattcagactgagcagaggcaccgccaagaataccgtgtacctccagatgagcgccctgaagcctgaggataccgccgtgtactactgcgctatggacagccgcagagtgacatgccctgagatcagcaccatgcaccggaacttcgattcttggggccagggcacactggtcacagtgtcatctggtaccggcggaggcggatctggcggcggaggtagcggtggcggaggatctgaattcgacatccagatgacacagagccctagcagcctgtctgccagcgtgggagacagagtgaccatcacatgcaaggccagcgaccacatcaacaactggctggcctggtatcagcagaagcctggacaggcccctaagctgctgatctacggcgctaccacactggaaacaggcgtgcccagcagattttctggcagcggctctggcaccgactacaccctgacaatatccagcctccagcctgaggacttcgccacctactactgtcagcagagctggaacaccccttggacattcggccagggcaccaagctggaaatcaagagactcgagatccagaaccctgatcctgccgtgtaccagctgcgggatagcaagagcagcgacaagagcgtgtgtctgttcaccgacttcgacagccagaccaacgtgtcccagagcaaggactccgacgtgtacatcaccgataagtgcgtgctggacatgcggagcatggacttcaagagcaactccgccgtggcctggtccaacaagtccgatttcgcctgcgccaacgccttcaacaacagcattatccccgaggacacattcttcccaagccccgagagcagctgcggctttaccagcgagagctaccagcagggcgtgctgagcgccaccatcctgtacgagatcctgctgggcaaggccaccctgtacgccgtgctggtgtctgccctggtgctgatggctatggtcaagcggaaggacagccggggaagggccaagcgatctggatctggagcaacaaacttctcactactcaaacaagcaggtgacgtggaggagaatcccgggcctactagtatggactggatttggcgcatccttttccttgtcggcgctgctaccggcgcgcattccttcgaacaagttcagcttcaacagcctggcgctgagctggtcaaacctggcgcttctgtgaagatgagctgcaaagccagcggctacaccttcagcagctactggatcaactggatgaagcagaaacccggccagggactcgaatggatcggccaaatctatcccggcgacggcgacaccaactacaacggcaagttcaagggcagagccacactgaccgccgatacctctagcagcacagcctacatgcagctgagcagcctgaccagcgaagatagcgccgtgtacttctgtgcccggtccatcacaacagtcgtgggctgcgctatggactattggggccagggaacaagcgtgaccgtgtctagtacgcgtgacctgaagaacgtgttcccacctgaggtggccgtgttcgagcctagcgaggccgagatcagccacacccagaaagccaccctcgtgtgcctggctaccggcttctaccccgaccatgtggaactgtcttggtgggtcaacggcaaagaggtgcacagcggcgtgtgtaccgacccccagccactgaaagaacagcccgccctgaacgacagccggtactgcctgagcagcagactgagagtgtccgccaccttctggcagaacccccggaaccacttcagatgccaggtgcagttctacggcctgagcgagaacgacgagtggacccaggacagagccaagcccgtgacccagatcgtgtctgccgaagcctggggcagagccgattgcgacgtgaagctggtggaaaagagcttcgagacagacaccaacctgaacttccagaacctgagcgtgatcggcttcagaatcctgctgctgaaagtggccggctttaacctgctgatgaccctgcggctgtggtccagc

SEQ ID NO: 33933 - DNA, 2280 bp, synthetic construct
  source 1..2280: mol_type = other DNA
atggccttaccagtgaccgccttgctcctgccgctggccttgctgctccacgccgccaggccgcaagtcaaactggaagaaagcggtggcggcctggtgcaacctggcgaatctctgagactgagctgtagcgccagcggctccatcttcaaggtgttcagagtgttcgccatgagctggtacaggcaaggccctggcaagcagagagagctggtcgcctctatcagcagcggcgagacaaccacatacgccgaatctgtgaaaggccggttcaccatcagccgggataatgccaagaataccgcctatctccagatggactccctgaagcctgaagatacagctgtgtactactgcaacgccgaccataccttcaccggcgatttttggggccagggaacccaagtgaccgtgtctagtggtaccggcggaggcggatctggcggcggaggtagcggtggcggaggatctgaattcgacatccagatgacacagagccctagcagcctgtctgccagcgtgggagacagagtgaccatcacatgcaaggccagcgaccacatcaacaactggctggcctggtatcagcagaagcctggacaggcccctaagctgctgatctacggcgctaccacactggaaacaggcgtgcccagcagattttctggcagcggctctggcaccgactacaccctgacaatatccagcctccagcctgaggacttcgccacctactactgtcagcagagctggaacaccccttggacattcggccagggcaccaagctggaaatcaagagactcgagatccagaaccctgatcctgccgtgtaccagctgcgggatagcaagagcagcgacaagagcgtgtgtctgttcaccgacttcgacagccagaccaacgtgtcccagagcaaggactccgacgtgtacatcaccgataagtgcgtgctggacatgcggagcatggacttcaagagcaactccgccgtggcctggtccaacaagtccgatttcgcctgcgccaacgccttcaacaacagcattatccccgaggacacattcttcccaagccccgagagcagctgcggctttaccagcgagagctaccagcagggcgtgctgagcgccaccatcctgtacgagatcctgctgggcaaggccaccctgtacgccgtgctggtgtctgccctggtgctgatggctatggtcaagcggaaggacagccggggaagggccaagcgatctggatctggagcaacaaacttctcactactcaaacaagcaggtgacgtggaggagaatcccgggcctactagtatggactggatttggcgcatccttttccttgtcggcgctgctaccggcgcgcattccttcgaacaagttcagcttcaacagcctggcgctgagctggtcaaacctggcgcttctgtgaagatgagctgcaaagccagcggctacaccttcagcagctactggatcaactggatgaagcagaaacccggccagggactcgaatggatcggccaaatctatcccggcgacggcgacaccaactacaacggcaagttcaagggcagagccacactgaccgccgatacctctagcagcacagcctacatgcagctgagcagcctgaccagcgaagatagcgccgtgtacttctgtgcccggtccatcacaacagtcgtgggctgcgctatggactattggggccagggaacaagcgtgaccgtgtctagtacgcgtgacctgaagaacgtgttcccacctgaggtggccgtgttcgagcctagcgaggccgagatcagccacacccagaaagccaccctcgtgtgcctggctaccggcttctaccccgaccatgtggaactgtcttggtgggtcaacggcaaagaggtgcacagcggcgtgtgtaccgacccccagccactgaaagaacagcccgccctgaacgacagccggtactgcctgagcagcagactgagagtgtccgccaccttctggcagaacccccggaaccacttcagatgccaggtgcagttctacggcctgagcgagaacgacgagtggacccaggacagagccaagcccgtgacccagatcgtgtctgccgaagcctggggcagagccgattgcgacgtgaagctggtggaaaagagcttcgagacagacaccaacctgaacttccagaacctgagcgtgatcggcttcagaatcctgctgctgaaagtggccggctttaacctgctgatgaccctgcggctgtggtccagc

SEQ ID NO: 33934 - DNA, 2286 bp, synthetic construct
  source 1..2286: mol_type = other DNA
atggccttaccagtgaccgccttgctcctgccgctggccttgctgctccacgccgccaggccggacatccagatgacacagagccctagcagcctgtctgccagcgtgggagacagagtgaccatcacatgcaaggccagcgaccacatcaacaactggctggcctggtatcagcagaagcctggacaggcccctaagctgctgatctacggcgctaccacactggaaacaggcgtgcccagcagattttctggcagcggctctggcaccgactacaccctgacaatatccagcctccagcctgaggacttcgccacctactactgtcagcagagctggaacaccccttggacattcggccagggcaccaagctggaaatcaagagactcgaggacctgaagaacgtgttcccacctgaggtggccgtgttcgagcctagcgaggccgagatcagccacacccagaaagccaccctcgtgtgcctggctaccggcttctaccccgaccatgtggaactgtcttggtgggtcaacggcaaagaggtgcacagcggcgtgtgtaccgacccccagccactgaaagaacagcccgccctgaacgacagccggtactgcctgagcagcagactgagagtgtccgccaccttctggcagaacccccggaaccacttcagatgccaggtgcagttctacggcctgagcgagaacgacgagtggacccaggacagagccaagcccgtgacccagatcgtgtctgccgaagcctggggcagagccgattgcgacgtgaagctggtggaaaagagcttcgagacagacaccaacctgaacttccagaacctgagcgtgatcggcttcagaatcctgctgctgaaagtggccggctttaacctgctgatgaccctgcggctgtggtccagcagggccaagcgatctggatctggagcaacaaacttctcactactcaaacaagcaggtgacgtggaggagaatcccgggcctactagtgccaccatggactggatttggcgcatccttttccttgtcggcgctgctaccggcgcccattccgggcccgaagtgcagctggttgaatctggcggaggactggttcaggctggcggatctctgagactgtcttgtgccgccagcggcagaacctttagcatgggctggtttagacaggcccctggcaaagagagagagttcgtcgccgccatcacatactctggcggcagcccttactacgccgactctgtgaagggcagattcaccatcagccgggacaacgccaagaacaccgtgtacctccagatgaacagcctgaagcctgaggacaccgccgtgtactactgcgccgccaatccaacatacggcagcgactggaacgccgagaattggggccagggaacccaagtgacagtgtctagcggatccggcggcggaggatctggcggaggcggatctgggggcggaggctctttcgaacaagttcagcttcaacagcctggcgctgagctggtcaaacctggcgcttctgtgaagatgagctgcaaagccagcggctacaccttcagcagctactggatcaactggatgaagcagaaacccggccagggactcgaatggatcggccaaatctatcccggcgacggcgacaccaactacaacggcaagttcaagggcagagccacactgaccgccgatacctctagcagcacagcctacatgcagctgagcagcctgaccagcgaagatagcgccgtgtacttctgtgcccggtccatcacaacagtcgtgggctgcgctatggactattggggccagggaacaagcgtgaccgtgtctagtacgcgtatccagaaccctgatcctgccgtgtaccagctgcgggatagcaagagcagcgacaagagcgtgtgtctgttcaccgacttcgacagccagaccaacgtgtcccagagcaaggactccgacgtgtacatcaccgataagtgcgtgctggacatgcggagcatggacttcaagagcaactccgccgtggcctggtccaacaagtccgatttcgcctgcgccaacgccttcaacaacagcattatccccgaggacacattcttcccaagccccgagagcagctgcggctttaccagcgagagctaccagcagggcgtgctgagcgccaccatcctgtacgagatcctgctgggcaaggccaccctgtacgccgtgctggtgtctgccctggtgctgatggctatggtcaagcggaaggacagccggggataa

SEQ ID NO: 33935 - DNA, 2289 bp, synthetic construct
  source 1..2289: mol_type = other DNA
atggccttaccagtgaccgccttgctcctgccgctggccttgctgctccacgccgccaggccggacatccagatgacacagagccctagcagcctgtctgccagcgtgggagacagagtgaccatcacatgcaaggccagcgaccacatcaacaactggctggcctggtatcagcagaagcctggacaggcccctaagctgctgatctacggcgctaccacactggaaacaggcgtgcccagcagattttctggcagcggctctggcaccgactacaccctgacaatatccagcctccagcctgaggacttcgccacctactactgtcagcagagctggaacaccccttggacattcggccagggcaccaagctggaaatcaagagactcgaggacctgaagaacgtgttcccacctgaggtggccgtgttcgagcctagcgaggccgagatcagccacacccagaaagccaccctcgtgtgcctggctaccggcttctaccccgaccatgtggaactgtcttggtgggtcaacggcaaagaggtgcacagcggcgtgtgtaccgacccccagccactgaaagaacagcccgccctgaacgacagccggtactgcctgagcagcagactgagagtgtccgccaccttctggcagaacccccggaaccacttcagatgccaggtgcagttctacggcctgagcgagaacgacgagtggacccaggacagagccaagcccgtgacccagatcgtgtctgccgaagcctggggcagagccgattgcgacgtgaagctggtggaaaagagcttcgagacagacaccaacctgaacttccagaacctgagcgtgatcggcttcagaatcctgctgctgaaagtggccggctttaacctgctgatgaccctgcggctgtggtccagcagggccaagcgatctggatctggagcaacaaacttctcactactcaaacaagcaggtgacgtggaggagaatcccgggcctactagtgccaccatggactggatttggcgcatccttttccttgtcggcgctgctaccggcgcccattccgggcccgaagtgcaactggtggaatctgggggcggactggtgcagccaggcggaagtctgaggctgtcttgtgccgcctccggcagcatcttcggcttcaacgacatggcctggtatcggcaggctcccggaaaacagcgcgagctggtggctctgattagcagagtgggcgtgaccagcagcgccgactctgtgaagggcagattcacaatctccagagtgaacgccaaggatacagtgtacctccagatgaactctctgaaacctgaggatacagcagtgtactattgctacatggaccagcggctggacggcagcacactggcctactggggacagggaactcaagtgacagtgtctagcggatccggcggcggaggatctggcggaggcggatctgggggcggaggctctttcgaacaagttcagcttcaacagcctggcgctgagctggtcaaacctggcgcttctgtgaagatgagctgcaaagccagcggctacaccttcagcagctactggatcaactggatgaagcagaaacccggccagggactcgaatggatcggccaaatctatcccggcgacggcgacaccaactacaacggcaagttcaagggcagagccacactgaccgccgatacctctagcagcacagcctacatgcagctgagcagcctgaccagcgaagatagcgccgtgtacttctgtgcccggtccatcacaacagtcgtgggctgcgctatggactattggggccagggaacaagcgtgaccgtgtctagtacgcgtatccagaaccctgatcctgccgtgtaccagctgcgggatagcaagagcagcgacaagagcgtgtgtctgttcaccgacttcgacagccagaccaacgtgtcccagagcaaggactccgacgtgtacatcaccgataagtgcgtgctggacatgcggagcatggacttcaagagcaactccgccgtggcctggtccaacaagtccgatttcgcctgcgccaacgccttcaacaacagcattatccccgaggacacattcttcccaagccccgagagcagctgcggctttaccagcgagagctaccagcagggcgtgctgagcgccaccatcctgtacgagatcctgctgggcaaggccaccctgtacgccgtgctggtgtctgccctggtgctgatggctatggtcaagcggaaggacagccggggataa

SEQ ID NO: 33936 - DNA, 2277 bp, synthetic construct
  source 1..2277: mol_type = other DNA
atggccttaccagtgaccgccttgctcctgccgctggccttgctgctccacgccgccaggccggacatccagatgacacagagccctagcagcctgtctgccagcgtgggagacagagtgaccatcacatgcaaggccagcgaccacatcaacaactggctggcctggtatcagcagaagcctggacaggcccctaagctgctgatctacggcgctaccacactggaaacaggcgtgcccagcagattttctggcagcggctctggcaccgactacaccctgacaatatccagcctccagcctgaggacttcgccacctactactgtcagcagagctggaacaccccttggacattcggccagggcaccaagctggaaatcaagagactcgaggacctgaagaacgtgttcccacctgaggtggccgtgttcgagcctagcgaggccgagatcagccacacccagaaagccaccctcgtgtgcctggctaccggcttctaccccgaccatgtggaactgtcttggtgggtcaacggcaaagaggtgcacagcggcgtgtgtaccgacccccagccactgaaagaacagcccgccctgaacgacagccggtactgcctgagcagcagactgagagtgtccgccaccttctggcagaacccccggaaccacttcagatgccaggtgcagttctacggcctgagcgagaacgacgagtggacccaggacagagccaagcccgtgacccagatcgtgtctgccgaagcctggggcagagccgattgcgacgtgaagctggtggaaaagagcttcgagacagacaccaacctgaacttccagaacctgagcgtgatcggcttcagaatcctgctgctgaaagtggccggctttaacctgctgatgaccctgcggctgtggtccagcagggccaagcgatctggatctggagcaacaaacttctcactactcaaacaagcaggtgacgtggaggagaatcccgggcctactagtgccaccatggactggatttggcgcatccttttccttgtcggcgctgctaccggcgcccattccgggcccgaggtgcagctggttgaatctggcggaggactggttcaggctggcggatctctgagactgtcttgtgccgccagcggctctgtgttcagcggcaatgtgatgggctggtacagacaggcccctggcaaagaaagagagtgggttgccgccattgccagcggcggcagcatctactacagagactctgtgaagggcagattcaccatcagccgggacaacgccaagaacaccgtgtacctccagatgaacagcctgaagcctgaggacaccgccgtgtactactgcaactctcaccctcctacactgccctattggggcctgggaacccaagtgacagtgtcctctggatccggcggcggaggatctggcggaggcggatctgggggcggaggctctttcgaacaagttcagcttcaacagcctggcgctgagctggtcaaacctggcgcttctgtgaagatgagctgcaaagccagcggctacaccttcagcagctactggatcaactggatgaagcagaaacccggccagggactcgaatggatcggccaaatctatcccggcgacggcgacaccaactacaacggcaagttcaagggcagagccacactgaccgccgatacctctagcagcacagcctacatgcagctgagcagcctgaccagcgaagatagcgccgtgtacttctgtgcccggtccatcacaacagtcgtgggctgcgctatggactattggggccagggaacaagcgtgaccgtgtctagtacgcgtatccagaaccctgatcctgccgtgtaccagctgcgggatagcaagagcagcgacaagagcgtgtgtctgttcaccgacttcgacagccagaccaacgtgtcccagagcaaggactccgacgtgtacatcaccgataagtgcgtgctggacatgcggagcatggacttcaagagcaactccgccgtggcctggtccaacaagtccgatttcgcctgcgccaacgccttcaacaacagcattatccccgaggacacattcttcccaagccccgagagcagctgcggctttaccagcgagagctaccagcagggcgtgctgagcgccaccatcctgtacgagatcctgctgggcaaggccaccctgtacgccgtgctggtgtctgccctggtgctgatggctatggtcaagcggaaggacagccggggataa

SEQ ID NO: 33937 - DNA, 2271 bp, synthetic construct
  source 1..2271: mol_type = other DNA
atggccttaccagtgaccgccttgctcctgccgctggccttgctgctccacgccgccaggccggacatccagatgacacagagccctagcagcctgtctgccagcgtgggagacagagtgaccatcacatgcaaggccagcgaccacatcaacaactggctggcctggtatcagcagaagcctggacaggcccctaagctgctgatctacggcgctaccacactggaaacaggcgtgcccagcagattttctggcagcggctctggcaccgactacaccctgacaatatccagcctccagcctgaggacttcgccacctactactgtcagcagagctggaacaccccttggacattcggccagggcaccaagctggaaatcaagagactcgaggacctgaagaacgtgttcccacctgaggtggccgtgttcgagcctagcgaggccgagatcagccacacccagaaagccaccctcgtgtgcctggctaccggcttctaccccgaccatgtggaactgtcttggtgggtcaacggcaaagaggtgcacagcggcgtgtgtaccgacccccagccactgaaagaacagcccgccctgaacgacagccggtactgcctgagcagcagactgagagtgtccgccaccttctggcagaacccccggaaccacttcagatgccaggtgcagttctacggcctgagcgagaacgacgagtggacccaggacagagccaagcccgtgacccagatcgtgtctgccgaagcctggggcagagccgattgcgacgtgaagctggtggaaaagagcttcgagacagacaccaacctgaacttccagaacctgagcgtgatcggcttcagaatcctgctgctgaaagtggccggctttaacctgctgatgaccctgcggctgtggtccagcagggccaagcgatctggatctggagcaacaaacttctcactactcaaacaagcaggtgacgtggaggagaatcccgggcctactagtgccaccatggactggatttggcgcatccttttccttgtcggcgctgctaccggcgcccattccgggcccgaagttcagctgctggaatctggcggaggactcgttcaacctggcggctctctgagactgagctgtgccgcttctggcttcagcttctctagctacgccctgagctgggttcgacaagctcccggaaagggccttgaatgggtgtccagcatcggcgagaatgacggcaccacagactatgccgatgccgtgaaaggccggtttaccatcagcagagacaattccaagaacacgctctatctgcaaatgaactccctgcgcgtggaagatacagccgtgtattattgcgtgaaggacggcatccactggggacagggaaccctggttacagtgtctagcggatccggcggcggaggatctggcggaggcggatctgggggcggaggctctttcgaacaagttcagcttcaacagcctggcgctgagctggtcaaacctggcgcttctgtgaagatgagctgcaaagccagcggctacaccttcagcagctactggatcaactggatgaagcagaaacccggccagggactcgaatggatcggccaaatctatcccggcgacggcgacaccaactacaacggcaagttcaagggcagagccacactgaccgccgatacctctagcagcacagcctacatgcagctgagcagcctgaccagcgaagatagcgccgtgtacttctgtgcccggtccatcacaacagtcgtgggctgcgctatggactattggggccagggaacaagcgtgaccgtgtctagtacgcgtatccagaaccctgatcctgccgtgtaccagctgcgggatagcaagagcagcgacaagagcgtgtgtctgttcaccgacttcgacagccagaccaacgtgtcccagagcaaggactccgacgtgtacatcaccgataagtgcgtgctggacatgcggagcatggacttcaagagcaactccgccgtggcctggtccaacaagtccgatttcgcctgcgccaacgccttcaacaacagcattatccccgaggacacattcttcccaagccccgagagcagctgcggctttaccagcgagagctaccagcagggcgtgctgagcgccaccatcctgtacgagatcctgctgggcaaggccaccctgtacgccgtgctggtgtctgccctggtgctgatggctatggtcaagcggaaggacagccggggataa

SEQ ID NO: 33938 - DNA, 3378 bp, synthetic construct
  source 1..3378: mol_type = other DNA
atgggacccagactgctgttttgggctctgctgtgtctgctcggcacaggacctgttgaagctggcgtgacacagagccccacacacctgattaagaccagaggccagcaggccacactgagatgcagccctatcagcggccacaccagcgtgtactggtatcagcaggctctcggactgggcctccagttcctgctttggtacgacgagggcgaagagagaaaccggggcaacttccctcctcggttttccggcagacagttccccaactacagcagcgagctgaacgtgaacgccctggaactggaagatagcgccctgtacctgtgtgcctcttctcttggtggacctcgcggactggctggactgagaggggatgagcagtttttcggccctggcaccagactgaccgtgctggaaggtaccggcggaggcggatctggcggcggagaattcgacatccagatgacacagagccctagcagcctgtctgccagcgtgggagacagagtgaccatcacatgcaaggccagcgaccacatcaacaactggctggcctggtatcagcagaagcctggacaggcccctaagctgctgatctacggcgctaccacactggaaacaggcgtgcccagcagattttctggcagcggctctggcaccgactacaccctgacaatatccagcctccagcctgaggacttcgccacctactactgtcagcagagctggaacaccccttggacattcggccagggcaccaagctggaaatcaagagactcgaggacctgaagaacgtgttcccacctgaggtggccgtgttcgagcctagcgaggccgagatcagccacacccagaaagccaccctcgtgtgcctggctaccggcttctaccccgaccatgtggaactgtcttggtgggtcaacggcaaagaggtgcacagcggcgtgtgtaccgacccccagccactgaaagaacagcccgccctgaacgacagccggtactgcctgagcagcagactgagagtgtccgccaccttctggcagaacccccggaaccacttcagatgccaggtgcagttctacggcctgagcgagaacgacgagtggacccaggacagagccaagcccgtgacccagatcgtgtctgccgaagcctggggcagagccgattgcgacgtgaagctggtggaaaagagcttcgagacagacaccaacctgaacttccagaacctgagcgtgatcggcttcagaatcctgctgctgaaagtggccggctttaacctgctgatgaccctgcggctgtggtccagcagggccaagcgatctggatctggagcaacaaacttctcactactcaaacaagcaggtgacgtggaggagaatcccgggcctactagtgccaccatggactggatttggcgcatccttttccttgtcggcgctgctaccggcgcccattccgggcccgaagtgcagctggttgaatctggcggaggactggttcaggctggcggatctctgagactgtcttgtgccgccagcggcagaacctttagcatgggctggtttagacaggcccctggcaaagagagagagttcgtcgccgccatcacatactctggcggcagcccttactacgccgactctgtgaagggcagattcaccatcagccgggacaacgccaagaacaccgtgtacctccagatgaacagcctgaagcctgaggacaccgccgtgtactactgcgccgccaatccaacatacggcagcgactggaacgccgagaattggggccagggaacccaagtgacagtgtctagcggatccggcggcggaggatctggcggaggcggatctgggggcggaggctctttcgaacaagttcagcttcaacagcctggcgctgagctggtcaaacctggcgcttctgtgaagatgagctgcaaagccagcggctacaccttcagcagctactggatcaactggatgaagcagaaacccggccagggactcgaatggatcggccaaatctatcccggcgacggcgacaccaactacaacggcaagttcaagggcagagccacactgaccgccgatacctctagcagcacagcctacatgcagctgagcagcctgaccagcgaagatagcgccgtgtacttctgtgcccggtccatcacaacagtcgtgggctgcgctatggactattggggccagggaacaagcgtgaccgtgtctagtacgcgtatccagaaccctgatcctgccgtgtaccagctgcgggatagcaagagcagcgacaagagcgtgtgtctgttcaccgacttcgacagccagaccaacgtgtcccagagcaaggactccgacgtgtacatcaccgataagtgcgtgctggacatgcggagcatggacttcaagagcaactccgccgtggcctggtccaacaagtccgatttcgcctgcgccaacgccttcaacaacagcattatccccgaggacacattcttcccaagccccgagagcagctgcggctttaccagcgagagctaccagcagggcgtgctgagcgccaccatcctgtacgagatcctgctgggcaaggccaccctgtacgccgtgctggtgtctgccctggtgctgatggctatggtcaagcggaaggacagccggggacgcgccaagagaagcggatctggcgtgaagcagaccctgaatttcgacctgctgaagctggctggcgacgtggaatccaacccaggcccttctagaggccatatgaccgagtacaagcccacggtgcgcctcgccacccgcgacgacgtccccagggccgtacgcaccctcgccgccgcgttcgccgactaccccgccacgcgccacaccgtcgatccggaccgccacatcgagcgggtcaccgagctgcaagaactcttcctcacgcgcgtcgggctcgacatcggcaaggtgtgggtcgcggacgacggcgccgcggtggcggtctggaccacgccggagagcgtcgaagcgggggcggtgttcgccgagatcggcccgcgcatggccgagttgagcggttcccggctggccgcgcagcaacagatggaaggcctcctggcgccgcaccggcccaaggagcccgcgtggttcctggccaccgtcggcgtctcgcccgaccaccagggcaagggtctgggcagcgccgtcgtgctccccggagtggaggcggccgagcgcgccggggtgcccgccttcctggagacctccgcgccccgcaacctccccttctacgagcggctcggcttcaccgtcaccgccgacgtcgaggtgcccgaaggaccgcgcacctggtgcatgacccgcaagcccggtgcctga

SEQ ID NO: 33939 - DNA, 3375 bp, synthetic construct
  source 1..3375: mol_type = other DNA
atgggacccagactgctgttttgggctctgctgtgtctgctcggcacaggacctgttgaagctggcgtgacacagagccccacacacctgattaagaccagaggccagcaggccacactgagatgcagccctatcagcggccacaccagcgtgtactggtatcagcaggctctcggactgggcctccagttcctgctttggtacgacgagggcgaagagagaaaccggggcaacttccctcctcggttttccggcagacagttccccaactacagcagcgagctgaacgtgaacgccctggaactggaagatagcgccctgtacctgtgtgccagctctctcggcggagatgaactgggagccgatggcaacgagcagttctttggccctggcaccagactgaccgtgctggaaggtaccggcggaggcggatctggcggcggaagcgaattcgacatccagatgacacagagccctagcagcctgtctgccagcgtgggagacagagtgaccatcacatgcaaggccagcgaccacatcaacaactggctggcctggtatcagcagaagcctggacaggcccctaagctgctgatctacggcgctaccacactggaaacaggcgtgcccagcagattttctggcagcggctctggcaccgactacaccctgacaatatccagcctccagcctgaggacttcgccacctactactgtcagcagagctggaacaccccttggacattcggccagggcaccaagctggaaatcaagagactcgaggacctgaagaacgtgttcccacctgaggtggccgtgttcgagcctagcgaggccgagatcagccacacccagaaagccaccctcgtgtgcctggctaccggcttctaccccgaccatgtggaactgtcttggtgggtcaacggcaaagaggtgcacagcggcgtgtgtaccgacccccagccactgaaagaacagcccgccctgaacgacagccggtactgcctgagcagcagactgagagtgtccgccaccttctggcagaacccccggaaccacttcagatgccaggtgcagttctacggcctgagcgagaacgacgagtggacccaggacagagccaagcccgtgacccagatcgtgtctgccgaagcctggggcagagccgattgcgacgtgaagctggtggaaaagagcttcgagacagacaccaacctgaacttccagaacctgagcgtgatcggcttcagaatcctgctgctgaaagtggccggctttaacctgctgatgaccctgcggctgtggtccagcagggccaagcgatctggatctggagcaacaaacttctcactactcaaacaagcaggtgacgtggaggagaatcccgggcctactagtgccaccatggactggatttggcgcatccttttccttgtcggcgctgctaccggcgcccattccgggcccgaagtgcagctggttgaatctggcggaggactggttcaggctggcggatctctgagactgtcttgtgccgccagcggcagaacctttagcatgggctggtttagacaggcccctggcaaagagagagagttcgtcgccgccatcacatactctggcggcagcccttactacgccgactctgtgaagggcagattcaccatcagccgggacaacgccaagaacaccgtgtacctccagatgaacagcctgaagcctgaggacaccgccgtgtactactgcgccgccaatccaacatacggcagcgactggaacgccgagaattggggccagggaacccaagtgacagtgtctagcggatccggcggcggaggatctggcggaggcggatctgggggcggaggctctttcgaacaagttcagcttcaacagcctggcgctgagctggtcaaacctggcgcttctgtgaagatgagctgcaaagccagcggctacaccttcagcagctactggatcaactggatgaagcagaaacccggccagggactcgaatggatcggccaaatctatcccggcgacggcgacaccaactacaacggcaagttcaagggcagagccacactgaccgccgatacctctagcagcacagcctacatgcagctgagcagcctgaccagcgaagatagcgccgtgtacttctgtgcccggtccatcacaacagtcgtgggctgcgctatggactattggggccagggaacaagcgtgaccgtgtctagtacgcgtatccagaaccctgatcctgccgtgtaccagctgcgggatagcaagagcagcgacaagagcgtgtgtctgttcaccgacttcgacagccagaccaacgtgtcccagagcaaggactccgacgtgtacatcaccgataagtgcgtgctggacatgcggagcatggacttcaagagcaactccgccgtggcctggtccaacaagtccgatttcgcctgcgccaacgccttcaacaacagcattatccccgaggacacattcttcccaagccccgagagcagctgcggctttaccagcgagagctaccagcagggcgtgctgagcgccaccatcctgtacgagatcctgctgggcaaggccaccctgtacgccgtgctggtgtctgccctggtgctgatggctatggtcaagcggaaggacagccggggacgcgccaagagaagcggatctggcgtgaagcagaccctgaatttcgacctgctgaagctggctggcgacgtggaatccaacccaggcccttctagaggccatatgaccgagtacaagcccacggtgcgcctcgccacccgcgacgacgtccccagggccgtacgcaccctcgccgccgcgttcgccgactaccccgccacgcgccacaccgtcgatccggaccgccacatcgagcgggtcaccgagctgcaagaactcttcctcacgcgcgtcgggctcgacatcggcaaggtgtgggtcgcggacgacggcgccgcggtggcggtctggaccacgccggagagcgtcgaagcgggggcggtgttcgccgagatcggcccgcgcatggccgagttgagcggttcccggctggccgcgcagcaacagatggaaggcctcctggcgccgcaccggcccaaggagcccgcgtggttcctggccaccgtcggcgtctcgcccgaccaccagggcaagggtctgggcagcgccgtcgtgctccccggagtggaggcggccgagcgcgccggggtgcccgccttcctggagacctccgcgccccgcaacctccccttctacgagcggctcggcttcaccgtcaccgccgacgtcgaggtgcccgaaggaccgcgcacctggtgcatgacccgcaagcccggtgcctga

SEQ ID NO: 33940 - DNA, 2850 bp, synthetic construct
  source 1..2850: mol_type = other DNA
atggccttaccagtgaccgccttgctcctgccgctggccttgctgctccacgccgccaggccggacatccagatgacacagagccctagcagcctgtctgccagcgtgggagacagagtgaccatcacatgcaaggccagcgaccacatcaacaactggctggcctggtatcagcagaagcctggacaggcccctaagctgctgatctacggcgctaccacactggaaacaggcgtgcccagcagattttctggcagcggctctggcaccgactacaccctgacaatatccagcctccagcctgaggacttcgccacctactactgtcagcagagctggaacaccccttggacattcggccagggcaccaagctggaaatcaagagactcgaggacctgaagaacgtgttcccacctgaggtggccgtgttcgagcctagcgaggccgagatcagccacacccagaaagccaccctcgtgtgcctggctaccggcttctaccccgaccatgtggaactgtcttggtgggtcaacggcaaagaggtgcacagcggcgtgtgtaccgacccccagccactgaaagaacagcccgccctgaacgacagccggtactgcctgagcagcagactgagagtgtccgccaccttctggcagaacccccggaaccacttcagatgccaggtgcagttctacggcctgagcgagaacgacgagtggacccaggacagagccaagcccgtgacccagatcgtgtctgccgaagcctggggcagagccgattgcgacgtgaagctggtggaaaagagcttcgagacagacaccaacctgaacttccagaacctgagcgtgatcggcttcagaatcctgctgctgaaagtggccggctttaacctgctgatgaccctgcggctgtggtccagcagggccaagcgatctggatctggagcaacaaacttctcactactcaaacaagcaggtgacgtggaggagaatcccgggcctactagtgccaccatggactggatttggcgcatccttttccttgtcggcgctgctaccggcgcccattccgggcccatgggaagctggcttgagttctaccacagactcaacgccattgacagcaggctgtgggcacttggcggaagcgaagctgaactcgccgcttttgaaaaagaaattgccgctttcgagtccgagcttcaggcttacaaaggcaaagggaatcctgaggtcgagagcctgagagatcacgctgcccacattagagagtggttgcaggcataccggcacaatggatccggcggcggaggatctggcggaggcggatctgggggcggaggctctttcgaacaagttcagcttcaacagcctggcgctgagctggtcaaacctggcgcttctgtgaagatgagctgcaaagccagcggctacaccttcagcagctactggatcaactggatgaagcagaaacccggccagggactcgaatggatcggccaaatctatcccggcgacggcgacaccaactacaacggcaagttcaagggcagagccacactgaccgccgatacctctagcagcacagcctacatgcagctgagcagcctgaccagcgaagatagcgccgtgtacttctgtgcccggtccatcacaacagtcgtgggctgcgctatggactattggggccagggaacaagcgtgaccgtgtctagtacgcgtatccagaaccctgatcctgccgtgtaccagctgcgggatagcaagagcagcgacaagagcgtgtgtctgttcaccgacttcgacagccagaccaacgtgtcccagagcaaggactccgacgtgtacatcaccgataagtgcgtgctggacatgcggagcatggacttcaagagcaactccgccgtggcctggtccaacaagtccgatttcgcctgcgccaacgccttcaacaacagcattatccccgaggacacattcttcccaagccccgagagcagctgcggctttaccagcgagagctaccagcagggcgtgctgagcgccaccatcctgtacgagatcctgctgggcaaggccaccctgtacgccgtgctggtgtctgccctggtgctgatggctatggtcaagcggaaggacagccggggacgcgccaagagaagcggatctggcgtgaagcagaccctgaatttcgacctgctgaagctggctggcgacgtggaatccaacccaggcccttctagaggccatatgaccgagtacaagcccacggtgcgcctcgccacccgcgacgacgtccccagggccgtacgcaccctcgccgccgcgttcgccgactaccccgccacgcgccacaccgtcgatccggaccgccacatcgagcgggtcaccgagctgcaagaactcttcctcacgcgcgtcgggctcgacatcggcaaggtgtgggtcgcggacgacggcgccgcggtggcggtctggaccacgccggagagcgtcgaagcgggggcggtgttcgccgagatcggcccgcgcatggccgagttgagcggttcccggctggccgcgcagcaacagatggaaggcctcctggcgccgcaccggcccaaggagcccgcgtggttcctggccaccgtcggcgtctcgcccgaccaccagggcaagggtctgggcagcgccgtcgtgctccccggagtggaggcggccgagcgcgccggggtgcccgccttcctggagacctccgcgccccgcaacctccccttctacgagcggctcggcttcaccgtcaccgccgacgtcgaggtgcccgaaggaccgcgcacctggtgcatgacccgcaagcccggtgcctga

SEQ ID NO: 33941 - DNA, 2850 bp, synthetic construct
  source 1..2850: mol_type = other DNA
atggccttaccagtgaccgccttgctcctgccgctggccttgctgctccacgccgccaggccggcatgcatgggcagttggttcgagttctacgaccggctgaatgccatcgacgccagactgtgggctctcggaggatctgaagctgagctggccgccttcgagaaagagatcgccgcctttgagagcgagctgcaagcctacaaaggcaagggcaaccccgaggtggaaaacctgagagtgcacgccgctgccatcagagaatggctccaggcttacagacacaacggtaccggcggaggcggatctggcggcggaggtagcggtggcggaggatctgaattcgacatccagatgacacagagccctagcagcctgtctgccagcgtgggagacagagtgaccatcacatgcaaggccagcgaccacatcaacaactggctggcctggtatcagcagaagcctggacaggcccctaagctgctgatctacggcgctaccacactggaaacaggcgtgcccagcagattttctggcagcggctctggcaccgactacaccctgacaatatccagcctccagcctgaggacttcgccacctactactgtcagcagagctggaacaccccttggacattcggccagggcaccaagctggaaatcaagagactcgaggacctgaagaacgtgttcccacctgaggtggccgtgttcgagcctagcgaggccgagatcagccacacccagaaagccaccctcgtgtgcctggctaccggcttctaccccgaccatgtggaactgtcttggtgggtcaacggcaaagaggtgcacagcggcgtgtgtaccgacccccagccactgaaagaacagcccgccctgaacgacagccggtactgcctgagcagcagactgagagtgtccgccaccttctggcagaacccccggaaccacttcagatgccaggtgcagttctacggcctgagcgagaacgacgagtggacccaggacagagccaagcccgtgacccagatcgtgtctgccgaagcctggggcagagccgattgcgacgtgaagctggtggaaaagagcttcgagacagacaccaacctgaacttccagaacctgagcgtgatcggcttcagaatcctgctgctgaaagtggccggctttaacctgctgatgaccctgcggctgtggtccagcagggccaagcgatctggatctggagcaacaaacttctcactactcaaacaagcaggtgacgtggaggagaatcccgggcctactagtatggactggatttggcgcatccttttccttgtcggcgctgctaccggcgcgcattccttcgaacaagttcagcttcaacagcctggcgctgagctggtcaaacctggcgcttctgtgaagatgagctgcaaagccagcggctacaccttcagcagctactggatcaactggatgaagcagaaacccggccagggactcgaatggatcggccaaatctatcccggcgacggcgacaccaactacaacggcaagttcaagggcagagccacactgaccgccgatacctctagcagcacagcctacatgcagctgagcagcctgaccagcgaagatagcgccgtgtacttctgtgcccggtccatcacaacagtcgtgggctgcgctatggactattggggccagggaacaagcgtgaccgtgtctagtacgcgtatccagaaccctgatcctgccgtgtaccagctgcgggatagcaagagcagcgacaagagcgtgtgtctgttcaccgacttcgacagccagaccaacgtgtcccagagcaaggactccgacgtgtacatcaccgataagtgcgtgctggacatgcggagcatggacttcaagagcaactccgccgtggcctggtccaacaagtccgatttcgcctgcgccaacgccttcaacaacagcattatccccgaggacacattcttcccaagccccgagagcagctgcggctttaccagcgagagctaccagcagggcgtgctgagcgccaccatcctgtacgagatcctgctgggcaaggccaccctgtacgccgtgctggtgtctgccctggtgctgatggctatggtcaagcggaaggacagccggggacgcgccaagagaagcggatctggcgtgaagcagaccctgaatttcgacctgctgaagctggctggcgacgtggaatccaacccaggcccttctagaggccatatgaccgagtacaagcccacggtgcgcctcgccacccgcgacgacgtccccagggccgtacgcaccctcgccgccgcgttcgccgactaccccgccacgcgccacaccgtcgatccggaccgccacatcgagcgggtcaccgagctgcaagaactcttcctcacgcgcgtcgggctcgacatcggcaaggtgtgggtcgcggacgacggcgccgcggtggcggtctggaccacgccggagagcgtcgaagcgggggcggtgttcgccgagatcggcccgcgcatggccgagttgagcggttcccggctggccgcgcagcaacagatggaaggcctcctggcgccgcaccggcccaaggagcccgcgtggttcctggccaccgtcggcgtctcgcccgaccaccagggcaagggtctgggcagcgccgtcgtgctccccggagtggaggcggccgagcgcgccggggtgcccgccttcctggagacctccgcgccccgcaacctccccttctacgagcggctcggcttcaccgtcaccgccgacgtcgaggtgcccgaaggaccgcgcacctggtgcatgacccgcaagcccggtgcctga

SEQ ID NO: 33942 - DNA, 3201 bp, synthetic construct
  source 1..3201: mol_type = other DNA
atggccttaccagtgaccgccttgctcctgccgctggccttgctgctccacgccgccaggccggcatgcatggaccccgacctggaaatcagagccgccttcctgcggcagagaaacacagccctgagaacagaggtggccgagctggaacaagaggtgcagcggctggaaaacgaggtgtcccagtacgagacaagatacggccctctcggaggcggaaaaggtaccggcggaggcggatctggcggcggaggtagcggtggcggaggatctgaattcgacatccagatgacacagagccctagcagcctgtctgccagcgtgggagacagagtgaccatcacatgcaaggccagcgaccacatcaacaactggctggcctggtatcagcagaagcctggacaggcccctaagctgctgatctacggcgctaccacactggaaacaggcgtgcccagcagattttctggcagcggctctggcaccgactacaccctgacaatatccagcctccagcctgaggacttcgccacctactactgtcagcagagctggaacaccccttggacattcggccagggcaccaagctggaaatcaagagactcgaggacctgaagaacgtgttcccacctgaggtggccgtgttcgagcctagcgaggccgagatcagccacacccagaaagccaccctcgtgtgcctggctaccggcttctaccccgaccatgtggaactgtcttggtgggtcaacggcaaagaggtgcacagcggcgtgtgtaccgacccccagccactgaaagaacagcccgccctgaacgacagccggtactgcctgagcagcagactgagagtgtccgccaccttctggcagaacccccggaaccacttcagatgccaggtgcagttctacggcctgagcgagaacgacgagtggacccaggacagagccaagcccgtgacccagatcgtgtctgccgaagcctggggcagagccgattgcgacgtgaagctggtggaaaagagcttcgagacagacaccaacctgaacttccagaacctgagcgtgatcggcttcagaatcctgctgctgaaagtggccggctttaacctgctgatgaccctgcggctgtggtccagcagggccaagcgatctggatctggagcaacaaacttctcactactcaaacaagcaggtgacgtggaggagaatcccgggcctactagtgccaccatggactggatttggcgcatccttttccttgtcggcgctgctaccggcgcccattccgggcccgaagtgcagctggttgaatctggcggaggactggttcaggctggcggatctctgagactgtcttgtgccgccagcggcagaacctttagcatgggctggtttagacaggcccctggcaaagagagagagttcgtcgccgccatcacatactctggcggcagcccttactacgccgactctgtgaagggcagattcaccatcagccgggacaacgccaagaacaccgtgtacctccagatgaacagcctgaagcctgaggacaccgccgtgtactactgcgccgccaatccaacatacggcagcgactggaacgccgagaattggggccagggaacccaagtgacagtgtctagcggatccggcggcggaggatctggcggaggcggatctgggggcggaggctctttcgaacaagttcagcttcaacagcctggcgctgagctggtcaaacctggcgcttctgtgaagatgagctgcaaagccagcggctacaccttcagcagctactggatcaactggatgaagcagaaacccggccagggactcgaatggatcggccaaatctatcccggcgacggcgacaccaactacaacggcaagttcaagggcagagccacactgaccgccgatacctctagcagcacagcctacatgcagctgagcagcctgaccagcgaagatagcgccgtgtacttctgtgcccggtccatcacaacagtcgtgggctgcgctatggactattggggccagggaacaagcgtgaccgtgtctagtacgcgtatccagaaccctgatcctgccgtgtaccagctgcgggatagcaagagcagcgacaagagcgtgtgtctgttcaccgacttcgacagccagaccaacgtgtcccagagcaaggactccgacgtgtacatcaccgataagtgcgtgctggacatgcggagcatggacttcaagagcaactccgccgtggcctggtccaacaagtccgatttcgcctgcgccaacgccttcaacaacagcattatccccgaggacacattcttcccaagccccgagagcagctgcggctttaccagcgagagctaccagcagggcgtgctgagcgccaccatcctgtacgagatcctgctgggcaaggccaccctgtacgccgtgctggtgtctgccctggtgctgatggctatggtcaagcggaaggacagccggggacgcgccaagagaagcggatctggcgtgaagcagaccctgaatttcgacctgctgaagctggctggcgacgtggaatccaacccaggcccttctagaggccatatgaccgagtacaagcccacggtgcgcctcgccacccgcgacgacgtccccagggccgtacgcaccctcgccgccgcgttcgccgactaccccgccacgcgccacaccgtcgatccggaccgccacatcgagcgggtcaccgagctgcaagaactcttcctcacgcgcgtcgggctcgacatcggcaaggtgtgggtcgcggacgacggcgccgcggtggcggtctggaccacgccggagagcgtcgaagcgggggcggtgttcgccgagatcggcccgcgcatggccgagttgagcggttcccggctggccgcgcagcaacagatggaaggcctcctggcgccgcaccggcccaaggagcccgcgtggttcctggccaccgtcggcgtctcgcccgaccaccagggcaagggtctgggcagcgccgtcgtgctccccggagtggaggcggccgagcgcgccggggtgcccgccttcctggagacctccgcgccccgcaacctccccttctacgagcggctcggcttcaccgtcaccgccgacgtcgaggtgcccgaaggaccgcgcacctggtgcatgacccgcaagcccggtgcctga

SEQ ID NO: 33943 - DNA, 2850 bp, synthetic construct
  source 1..2850: mol_type = other DNA
atggccttaccagtgaccgccttgctcctgccgctggccttgctgctccacgccgccaggccggacatccagatgacacagagccctagcagcctgtctgccagcgtgggagacagagtgaccatcacatgcaaggccagcgaccacatcaacaactggctggcctggtatcagcagaagcctggacaggcccctaagctgctgatctacggcgctaccacactggaaacaggcgtgcccagcagattttctggcagcggctctggcaccgactacaccctgacaatatccagcctccagcctgaggacttcgccacctactactgtcagcagagctggaacaccccttggacattcggccagggcaccaagctggaaatcaagagactcgaggacctgaagaacgtgttcccacctgaggtggccgtgttcgagcctagcgaggccgagatcagccacacccagaaagccaccctcgtgtgcctggctaccggcttctaccccgaccatgtggaactgtcttggtgggtcaacggcaaagaggtgcacagcggcgtgtgtaccgacccccagccactgaaagaacagcccgccctgaacgacagccggtactgcctgagcagcagactgagagtgtccgccaccttctggcagaacccccggaaccacttcagatgccaggtgcagttctacggcctgagcgagaacgacgagtggacccaggacagagccaagcccgtgacccagatcgtgtctgccgaagcctggggcagagccgattgcgacgtgaagctggtggaaaagagcttcgagacagacaccaacctgaacttccagaacctgagcgtgatcggcttcagaatcctgctgctgaaagtggccggctttaacctgctgatgaccctgcggctgtggtccagcagggccaagcgatctggatctggagcaacaaacttctcactactcaaacaagcaggtgacgtggaggagaatcccgggcctactagtgccaccatggactggatttggcgcatccttttccttgtcggcgctgctaccggcgcccattccgggcccatgggatcttggagcgagttttacgatcggctgcacgccattcaccaccggctgtatgctctcggaggaagcgaagctgagctggccgcttttgaaaaagaaattgccgctttcgagtccgagcttcaggcttacaaaggcaaagggaatcctgaggtcgaggccctgagagataccgccgccttcatcagaacccggttgcaggcataccggcacaacggatccggcggcggaggatctggcggaggcggatctgggggcggaggctctttcgaacaagttcagcttcaacagcctggcgctgagctggtcaaacctggcgcttctgtgaagatgagctgcaaagccagcggctacaccttcagcagctactggatcaactggatgaagcagaaacccggccagggactcgaatggatcggccaaatctatcccggcgacggcgacaccaactacaacggcaagttcaagggcagagccacactgaccgccgatacctctagcagcacagcctacatgcagctgagcagcctgaccagcgaagatagcgccgtgtacttctgtgcccggtccatcacaacagtcgtgggctgcgctatggactattggggccagggaacaagcgtgaccgtgtctagtacgcgtatccagaaccctgatcctgccgtgtaccagctgcgggatagcaagagcagcgacaagagcgtgtgtctgttcaccgacttcgacagccagaccaacgtgtcccagagcaaggactccgacgtgtacatcaccgataagtgcgtgctggacatgcggagcatggacttcaagagcaactccgccgtggcctggtccaacaagtccgatttcgcctgcgccaacgccttcaacaacagcattatccccgaggacacattcttcccaagccccgagagcagctgcggctttaccagcgagagctaccagcagggcgtgctgagcgccaccatcctgtacgagatcctgctgggcaaggccaccctgtacgccgtgctggtgtctgccctggtgctgatggctatggtcaagcggaaggacagccggggacgcgccaagagaagcggatctggcgtgaagcagaccctgaatttcgacctgctgaagctggctggcgacgtggaatccaacccaggcccttctagaggccatatgaccgagtacaagcccacggtgcgcctcgccacccgcgacgacgtccccagggccgtacgcaccctcgccgccgcgttcgccgactaccccgccacgcgccacaccgtcgatccggaccgccacatcgagcgggtcaccgagctgcaagaactcttcctcacgcgcgtcgggctcgacatcggcaaggtgtgggtcgcggacgacggcgccgcggtggcggtctggaccacgccggagagcgtcgaagcgggggcggtgttcgccgagatcggcccgcgcatggccgagttgagcggttcccggctggccgcgcagcaacagatggaaggcctcctggcgccgcaccggcccaaggagcccgcgtggttcctggccaccgtcggcgtctcgcccgaccaccagggcaagggtctgggcagcgccgtcgtgctccccggagtggaggcggccgagcgcgccggggtgcccgccttcctggagacctccgcgccccgcaacctccccttctacgagcggctcggcttcaccgtcaccgccgacgtcgaggtgcccgaaggaccgcgcacctggtgcatgacccgcaagcccggtgcctga

SEQ ID NO: 33944 - DNA, 3480 bp, synthetic construct
  source 1..3480: mol_type = other DNA
atggccttaccagtgaccgccttgctcctgccgctggccttgctgctccacgccgccaggccggacatccagatgacacagagccctagcagcctgtctgccagcgtgggagacagagtgaccatcacatgcaaggccagcgaccacatcaacaactggctggcctggtatcagcagaagcctggacaggcccctaagctgctgatctacggcgctaccacactggaaacaggcgtgcccagcagattttctggcagcggctctggcaccgactacaccctgacaatatccagcctccagcctgaggacttcgccacctactactgtcagcagagctggaacaccccttggacattcggccagggcaccaagctggaaatcaagagactcgaggacctgaagaacgtgttcccacctgaggtggccgtgttcgagcctagcgaggccgagatcagccacacccagaaagccaccctcgtgtgcctggctaccggcttctaccccgaccatgtggaactgtcttggtgggtcaacggcaaagaggtgcacagcggcgtgtgtaccgacccccagccactgaaagaacagcccgccctgaacgacagccggtactgcctgagcagcagactgagagtgtccgccaccttctggcagaacccccggaaccacttcagatgccaggtgcagttctacggcctgagcgagaacgacgagtggacccaggacagagccaagcccgtgacccagatcgtgtctgccgaagcctggggcagagccgattgcgacgtgaagctggtggaaaagagcttcgagacagacaccaacctgaacttccagaacctgagcgtgatcggcttcagaatcctgctgctgaaagtggccggctttaacctgctgatgaccctgcggctgtggtccagcagggccaagcgatctggatctggagcaacaaacttctcactactcaaacaagcaggtgacgtggaggagaatcccgggcctactagtaccatggactggatttggcgcatccttttccttgtcggcgctgctaccggcgcccattccctgttcaatcaagaggtgcagatccctctgaccgagagctactgtggcccctgtcctaagaactggatctgctacaagaacaactgctaccagttcttcgacgagagcaagaattggtacgagagccaggccagctgcatgagccagaatgccagcctgctgaaggtgtacagcaaagaggaccaggacctgctgaaactggtcaagagcgcccactggatgggccttgtgcacatccccaccaatggctcttggcagtgggaggacggcagcattctgagccctaacctgctgaccatcatcgagatgcagaagggcgactgcgccctgtacgccagcagctttaagggctacatcgagaattgcagcaccccgaacacctacatctgtatgcagagaaccgtttctggcggaggcggctctggaggaggcggaagtggcggcggaggcgacctctttaatcaagaagtccagattccactcaccgaatcctactgcggaccttgtccaaaaaattggatttgttataagaacaactgttatcaattctttgatgagtctaaaaattggtatgagtcccaggcttcctgcatgtctcagaacgcttctctgctgaaagtctactctaaagaagatcaggatctcctgaagctcgtcaagtctgcccattggatggggctcgtccacattcctaccaacggaagctggcaatgggaagatggctccatcctgtctccaaatctgctcacgattattgaaatgcagaaaggggattgtgctctctacgccagctccttcaagggatatattgagaactgtagcacgcccaatacttatatctgtatgcaacggaccgtgggatccggcggcggaggatctggcggaggcggatctgggggcggaggctctttcgaacaagttcagcttcaacagcctggcgctgagctggtcaaacctggcgcttctgtgaagatgagctgcaaagccagcggctacaccttcagcagctactggatcaactggatgaagcagaaacccggccagggactcgaatggatcggccaaatctatcccggcgacggcgacaccaactacaacggcaagttcaagggcagagccacactgaccgccgatacctctagcagcacagcctacatgcagctgagcagcctgaccagcgaagatagcgccgtgtacttctgtgcccggtccatcacaacagtcgtgggctgcgctatggactattggggccagggaacaagcgtgaccgtgtctagtacgcgtatccagaaccctgatcctgccgtgtaccagctgcgggatagcaagagcagcgacaagagcgtgtgtctgttcaccgacttcgacagccagaccaacgtgtcccagagcaaggactccgacgtgtacatcaccgataagtgcgtgctggacatgcggagcatggacttcaagagcaactccgccgtggcctggtccaacaagtccgatttcgcctgcgccaacgccttcaacaacagcattatccccgaggacacattcttcccaagccccgagagcagctgcggctttaccagcgagagctaccagcagggcgtgctgagcgccaccatcctgtacgagatcctgctgggcaaggccaccctgtacgccgtgctggtgtctgccctggtgctgatggctatggtcaagcggaaggacagccggggacgcgccaagagaagcggatctggcgtgaagcagaccctgaatttcgacctgctgaagctggctggcgacgtggaatccaacccaggcccttctagaggccatatgaccgagtacaagcccacggtgcgcctcgccacccgcgacgacgtccccagggccgtacgcaccctcgccgccgcgttcgccgactaccccgccacgcgccacaccgtcgatccggaccgccacatcgagcgggtcaccgagctgcaagaactcttcctcacgcgcgtcgggctcgacatcggcaaggtgtgggtcgcggacgacggcgccgcggtggcggtctggaccacgccggagagcgtcgaagcgggggcggtgttcgccgagatcggcccgcgcatggccgagttgagcggttcccggctggccgcgcagcaacagatggaaggcctcctggcgccgcaccggcccaaggagcccgcgtggttcctggccaccgtcggcgtctcgcccgaccaccagggcaagggtctgggcagcgccgtcgtgctccccggagtggaggcggccgagcgcgccggggtgcccgccttcctggagacctccgcgccccgcaacctccccttctacgagcggctcggcttcaccgtcaccgccgacgtcgaggtgcccgaaggaccgcgcacctggtgcatgacccgcaagcccggtgcctga

SEQ ID NO: 33945 - DNA, 1866 bp, synthetic construct
  source 1..1866: mol_type = other DNA
atggccttaccagtgaccgccttgctcctgccgctggccttgctgctccacgccgccaggccggacatccagatgacacagagccctagcagcctgtctgccagcgtgggagacagagtgaccatcacatgcaaggccagcgaccacatcaacaactggctggcctggtatcagcagaagcctggacaggcccctaagctgctgatctacggcgctaccacactggaaacaggcgtgcccagcagattttctggcagcggctctggcaccgactacaccctgacaatatccagcctccagcctgaggacttcgccacctactactgtcagcagagctggaacaccccttggacattcggccagggcaccaagctggaaatcaagagactcgaggacctgaagaacgtgttcccacctgaggtggccgtgttcgagcctagcgaggccgagatcagccacacccagaaagccaccctcgtgtgcctggctaccggcttctaccccgaccatgtggaactgtcttggtgggtcaacggcaaagaggtgcacagcggcgtgtgtaccgacccccagccactgaaagaacagcccgccctgaacgacagccggtactgcctgagcagcagactgagagtgtccgccaccttctggcagaacccccggaaccacttcagatgccaggtgcagttctacggcctgagcgagaacgacgagtggacccaggacagagccaagcccgtgacccagatcgtgtctgccgaagcctggggcagagccgattgcggctttaccagcgagagctaccagcagggcgtgctgagcgccaccaacctgagcgtgatcggcttcagaatcctgctgctgaaagtggccggctttaacctgctgatgaccctgcggctgtggtccagcagggccaagcgatctggatctggagcaacaaacttctcactactcaaacaagcaggtgacgtggaggagaatcccgggcctactagtatggactggatttggcgcatccttttccttgtcggcgctgctaccggcgcgcattccttcgaacaagttcagcttcaacagcctggcgctgagctggtcaaacctggcgcttctgtgaagatgagctgcaaagccagcggctacaccttcagcagctactggatcaactggatgaagcagaaacccggccagggactcgaatggatcggccaaatctatcccggcgacggcgacaccaactacaacggcaagttcaagggcagagccacactgaccgccgatacctctagcagcacagcctacatgcagctgagcagcctgaccagcgaagatagcgccgtgtacttctgtgcccggtccatcacaacagtcgtgggctgcgctatggactattggggccagggaacaagcgtgaccgtgtctagtacgcgtatccagaaccctgatcctgccgtgtaccagctgcgggatagcaagagcagcgacaagagcgtgtgtctgttcaccgacttcgacagccagaccaacgtgtcccagagcaaggactccgacgtgtacatcaccgataagtgcgtgctggacatgcggagcatggacttcaagagcaactccgccgtggcctggtccaacaagtccgatttcgcctgcgccaacgccttcaacaacagcattatccccgaggacacattcttcccaagccccgagagcagctgcgacgtgaagctggtggaaaagagcttcgagacagacaccaacctgaacttccagatcctgtacgagatcctgctgggcaaggccaccctgtacgccgtgctggtgtctgccctggtgctgatggctatggtcaagcggaaggacagccgggga

SEQ ID NO: 33946 - DNA, 1878 bp, synthetic construct
  source 1..1878: mol_type = other DNA
atggccttaccagtgaccgccttgctcctgccgctggccttgctgctccacgccgccaggccggacatccagatgacacagagccctagcagcctgtctgccagcgtgggagacagagtgaccatcacatgcaaggccagcgaccacatcaacaactggctggcctggtatcagcagaagcctggacaggcccctaagctgctgatctacggcgctaccacactggaaacaggcgtgcccagcagattttctggcagcggctctggcaccgactacaccctgacaatatccagcctccagcctgaggacttcgccacctactactgtcagcagagctggaacaccccttggacattcggccagggcaccaagctggaaatcaagagactcgagatccagaaccctgatcctgccgtgtaccagctgcgggatagcaagagcagcgacaagagcgtgtgtctgttcaccgacttcgacagccagaccaacgtgtcccagagcaaggactccgacgtgtacatcaccgataagtgcgtgctggacatgcggagcatggacttcaagagcaactccgccgtggcctggtccaacaagtccgatttcgcctgcgccaacgccttcaacaacagcattatccccgaggacacattcttcccaagccccgagagcagctgcgacgtgaagctggtggaaaagagcttcgagacagacaccaacctgaacttccagatcctgtacgagatcctgctgggcaaggccaccctgtacgccgtgctggtgtctgccctggtgctgatggctatggtcaagcggaaggacagccggggacgcgccaagagaagcggatctggcgtgaagcagaccctgaatttcgacctgctgaagctggctggcgacgtggaatccaacccaggccctactagtatggactggatttggcgcatccttttccttgtcggcgctgctaccggcgcgcattccttcgaacaagttcagcttcaacagcctggcgctgagctggtcaaacctggcgcttctgtgaagatgagctgcaaagccagcggctacaccttcagcagctactggatcaactggatgaagcagaaacccggccagggactcgaatggatcggccaaatctatcccggcgacggcgacaccaactacaacggcaagttcaagggcagagccacactgaccgccgatacctctagcagcacagcctacatgcagctgagcagcctgaccagcgaagatagcgccgtgtacttctgtgcccggtccatcacaacagtcgtgggctgcgctatggactattggggccagggaacaagcgtgaccgtgtctagtacgcgtgaggacctgaagaacgtgttcccacctgaggtggccgtgttcgagcctagcgaggccgagatcagccacacccagaaagccaccctcgtgtgcctggctaccggcttctaccccgaccatgtggaactgtcttggtgggtcaacggcaaagaggtgcacagcggcgtgtgtaccgacccccagccactgaaagaacagcccgccctgaacgacagccggtactgcctgagcagcagactgagagtgtccgccaccttctggcagaacccccggaaccacttcagatgccaggtgcagttctacggcctgagcgagaacgacgagtggacccaggacagagccaagcccgtgacccagatcgtgtctgccgaagcctggggcagagccgattgcggctttaccagcgagagctaccagcagggcgtgctgagcgccaccaacctgagcgtgatcggcttcagaatcctgctgctgaaagtggccggctttaacctgctgatgaccctgcggctgtggtccagc

SEQ ID NO: 33947 - DNA, 2271 bp, synthetic construct
  source 1..2271: mol_type = other DNA
atggccttaccagtgaccgccttgctcctgccgctggccttgctgctccacgccgccaggccggaagtgcagctggttgaatctggcggaggactggttcagcctggcggatctctgagactgtcttgtgccgccagcggcttcagcttcagcgacttttggatgagctgggtccgacaggcccctggcaaaggacttgaatgggtcgccacaatcagccaggccggcagcgagaaggactacgtggactctgtgaagggcagattcaccatcagccgggacaacgccaagaagtccctgtacctccagatgaacagcctgagagccgaggacaccgccgtgtactattgtgcctctggcgtgtacagcttcgactacagaggccagggcaccctggtcacagtctcttctggtaccggcggaggcggatctggcggcggaggtagcggtggcggaggatctgaattcgacatccagatgacacagagccctagcagcctgtctgccagcgtgggagacagagtgaccatcacatgcaaggccagcgaccacatcaacaactggctggcctggtatcagcagaagcctggacaggcccctaagctgctgatctacggcgctaccacactggaaacaggcgtgcccagcagattttctggcagcggctctggcaccgactacaccctgacaatatccagcctccagcctgaggacttcgccacctactactgtcagcagagctggaacaccccttggacattcggccagggcaccaagctggaaatcaagagactcgaggacctgaagaacgtgttcccacctgaggtggccgtgttcgagcctagcgaggccgagatcagccacacccagaaagccaccctcgtgtgcctggctaccggcttctaccccgaccatgtggaactgtcttggtgggtcaacggcaaagaggtgcacagcggcgtgtgtaccgacccccagccactgaaagaacagcccgccctgaacgacagccggtactgcctgagcagcagactgagagtgtccgccaccttctggcagaacccccggaaccacttcagatgccaggtgcagttctacggcctgagcgagaacgacgagtggacccaggacagagccaagcccgtgacccagatcgtgtctgccgaagcctggggcagagccgattgcggctttaccagcgagagctaccagcagggcgtgctgagcgccaccaacctgagcgtgatcggcttcagaatcctgctgctgaaagtggccggctttaacctgctgatgaccctgcggctgtggtccagcagggccaagcgatctggatctggagcaacaaacttctcactactcaaacaagcaggtgacgtggaggagaatcccgggcctactagtatggactggatttggcgcatccttttccttgtcggcgctgctaccggcgcgcattccttcgaacaagttcagcttcaacagcctggcgctgagctggtcaaacctggcgcttctgtgaagatgagctgcaaagccagcggctacaccttcagcagctactggatcaactggatgaagcagaaacccggccagggactcgaatggatcggccaaatctatcccggcgacggcgacaccaactacaacggcaagttcaagggcagagccacactgaccgccgatacctctagcagcacagcctacatgcagctgagcagcctgaccagcgaagatagcgccgtgtacttctgtgcccggtccatcacaacagtcgtgggctgcgctatggactattggggccagggaacaagcgtgaccgtgtctagtacgcgtatccagaaccctgatcctgccgtgtaccagctgcgggatagcaagagcagcgacaagagcgtgtgtctgttcaccgacttcgacagccagaccaacgtgtcccagagcaaggactccgacgtgtacatcaccgataagtgcgtgctggacatgcggagcatggacttcaagagcaactccgccgtggcctggtccaacaagtccgatttcgcctgcgccaacgccttcaacaacagcattatccccgaggacacattcttcccaagccccgagagcagctgcgacgtgaagctggtggaaaagagcttcgagacagacaccaacctgaacttccagatcctgtacgagatcctgctgggcaaggccaccctgtacgccgtgctggtgtctgccctggtgctgatggctatggtcaagcggaaggacagccgggga

SEQ ID NO: 33948 - DNA, 2283 bp, synthetic construct
  source 1..2283: mol_type = other DNA
atggccttaccagtgaccgccttgctcctgccgctggccttgctgctccacgccgccaggccggaagtgcagctggttgaatctggcggaggactggttcagcctggcggatctctgagactgtcttgtgccgccagcggcttcagcttcagcgacttttggatgagctgggtccgacaggcccctggcaaaggacttgaatgggtcgccacaatcagccaggccggcagcgagaaggactacgtggactctgtgaagggcagattcaccatcagccgggacaacgccaagaagtccctgtacctccagatgaacagcctgagagccgaggacaccgccgtgtactattgtgcctctggcgtgtacagcttcgactacagaggccagggcaccctggtcacagtctcttctggtaccggcggaggcggatctggcggcggaggtagcggtggcggaggatctgaattcgacatccagatgacacagagccctagcagcctgtctgccagcgtgggagacagagtgaccatcacatgcaaggccagcgaccacatcaacaactggctggcctggtatcagcagaagcctggacaggcccctaagctgctgatctacggcgctaccacactggaaacaggcgtgcccagcagattttctggcagcggctctggcaccgactacaccctgacaatatccagcctccagcctgaggacttcgccacctactactgtcagcagagctggaacaccccttggacattcggccagggcaccaagctggaaatcaagagactcgagatccagaaccctgatcctgccgtgtaccagctgcgggatagcaagagcagcgacaagagcgtgtgtctgttcaccgacttcgacagccagaccaacgtgtcccagagcaaggactccgacgtgtacatcaccgataagtgcgtgctggacatgcggagcatggacttcaagagcaactccgccgtggcctggtccaacaagtccgatttcgcctgcgccaacgccttcaacaacagcattatccccgaggacacattcttcccaagccccgagagcagctgcgacgtgaagctggtggaaaagagcttcgagacagacaccaacctgaacttccagatcctgtacgagatcctgctgggcaaggccaccctgtacgccgtgctggtgtctgccctggtgctgatggctatggtcaagcggaaggacagccggggacgcgccaagagaagcggatctggcgtgaagcagaccctgaatttcgacctgctgaagctggctggcgacgtggaatccaacccaggccctactagtatggactggatttggcgcatccttttccttgtcggcgctgctaccggcgcgcattccttcgaacaagttcagcttcaacagcctggcgctgagctggtcaaacctggcgcttctgtgaagatgagctgcaaagccagcggctacaccttcagcagctactggatcaactggatgaagcagaaacccggccagggactcgaatggatcggccaaatctatcccggcgacggcgacaccaactacaacggcaagttcaagggcagagccacactgaccgccgatacctctagcagcacagcctacatgcagctgagcagcctgaccagcgaagatagcgccgtgtacttctgtgcccggtccatcacaacagtcgtgggctgcgctatggactattggggccagggaacaagcgtgaccgtgtctagtacgcgtgaggacctgaagaacgtgttcccacctgaggtggccgtgttcgagcctagcgaggccgagatcagccacacccagaaagccaccctcgtgtgcctggctaccggcttctaccccgaccatgtggaactgtcttggtgggtcaacggcaaagaggtgcacagcggcgtgtgtaccgacccccagccactgaaagaacagcccgccctgaacgacagccggtactgcctgagcagcagactgagagtgtccgccaccttctggcagaacccccggaaccacttcagatgccaggtgcagttctacggcctgagcgagaacgacgagtggacccaggacagagccaagcccgtgacccagatcgtgtctgccgaagcctggggcagagccgattgcggctttaccagcgagagctaccagcagggcgtgctgagcgccaccaacctgagcgtgatcggcttcagaatcctgctgctgaaagtggccggctttaacctgctgatgaccctgcggctgtggtccagc

SEQ ID NO: 33949 - DNA, 2682 bp, synthetic construct
  source 1..2682: mol_type = other DNA
atggccttaccagtgaccgccttgctcctgccgctggccttgctgctccacgccgccaggccggaagtgcagctggttgaatctggcggaggactggttcagcctggcggatctctgagactgtcttgtgccgccagcggcttcagcttcagcgacttttggatgagctgggtccgacaggcccctggcaaaggacttgaatgggtcgccacaatcagccaggccggcagcgagaaggactacgtggactctgtgaagggcagattcaccatcagccgggacaacgccaagaagtccctgtacctccagatgaacagcctgagagccgaggacaccgccgtgtactattgtgcctctggcgtgtacagcttcgactacagaggccagggcaccctggtcacagtctcttctggtaccggcggaggcggatctggcggcggaggtagcggtggcggaggatctgaattcgacatccagatgacacagagccctagcagcctgtctgccagcgtgggagacagagtgaccatcacatgcaaggccagcgaccacatcaacaactggctggcctggtatcagcagaagcctggacaggcccctaagctgctgatctacggcgctaccacactggaaacaggcgtgcccagcagattttctggcagcggctctggcaccgactacaccctgacaatatccagcctccagcctgaggacttcgccacctactactgtcagcagagctggaacaccccttggacattcggccagggcaccaagctggaaatcaagagactcgaggacctgaagaacgtgttcccacctgaggtggccgtgttcgagcctagcgaggccgagatcagccacacccagaaagccaccctcgtgtgcctggctaccggcttctaccccgaccatgtggaactgtcttggtgggtcaacggcaaagaggtgcacagcggcgtgtgtaccgacccccagccactgaaagaacagcccgccctgaacgacagccggtactgcctgagcagcagactgagagtgtccgccaccttctggcagaacccccggaaccacttcagatgccaggtgcagttctacggcctgagcgagaacgacgagtggacccaggacagagccaagcccgtgacccagatcgtgtctgccgaagcctggggcagagccgattgcggctttaccagcgagagctaccagcagggcgtgctgagcgccaccaacctgagcgtgatcggcttcagaatcctgctgctgaaagtggccggctttaacctgctgatgaccctgcggctgtggtccagcagggccaagcgatctggatctggagcaacaaacttctcactactcaaacaagcaggtgacgtggaggagaatcccgggcctactagtatggactggatttggcgcatccttttccttgtcggcgctgctaccggcgcgcattccgggccccagctccagctgcaagagtctggacctggcctggtcaagcctagcgagacactgagcctgacctgtaccgtgtccggcgatagcatcagcagcggcgattactactggggctggatcagacagcctcctggcaaaggactggaatggatcggccacatctactacagcggcgtgacctactacaaccccagcctgaagtccagagtgaccatcagcgtggacaccagccggaaccagttctccctgaagctgtctagcgtgacagccgccgataccgccgtgtactactgcaccagagaggacagcagcaactggcggagtagaggccagggaacactggtcacagttagctctggatccggcggaggcggaagtggaggcggaggatctggcggcggaggctctttcgaacaagttcagcttcaacagcctggcgctgagctggtcaaacctggcgcttctgtgaagatgagctgcaaagccagcggctacaccttcagcagctactggatcaactggatgaagcagaaacccggccagggactcgaatggatcggccaaatctatcccggcgacggcgacaccaactacaacggcaagttcaagggcagagccacactgaccgccgatacctctagcagcacagcctacatgcagctgagcagcctgaccagcgaagatagcgccgtgtacttctgtgcccggtccatcacaacagtcgtgggctgcgctatggactattggggccagggaacaagcgtgaccgtgtctagtacgcgtatccagaaccctgatcctgccgtgtaccagctgcgggatagcaagagcagcgacaagagcgtgtgtctgttcaccgacttcgacagccagaccaacgtgtcccagagcaaggactccgacgtgtacatcaccgataagtgcgtgctggacatgcggagcatggacttcaagagcaactccgccgtggcctggtccaacaagtccgatttcgcctgcgccaacgccttcaacaacagcattatccccgaggacacattcttcccaagccccgagagcagctgcgacgtgaagctggtggaaaagagcttcgagacagacaccaacctgaacttccagatcctgtacgagatcctgctgggcaaggccaccctgtacgccgtgctggtgtctgccctggtgctgatggctatggtcaagcggaaggacagccgggga

SEQ ID NO: 33950 - DNA, 2694 bp, synthetic construct
  source 1..2694: mol_type = other DNA
atggccttaccagtgaccgccttgctcctgccgctggccttgctgctccacgccgccaggccggaagtgcagctggttgaatctggcggaggactggttcagcctggcggatctctgagactgtcttgtgccgccagcggcttcagcttcagcgacttttggatgagctgggtccgacaggcccctggcaaaggacttgaatgggtcgccacaatcagccaggccggcagcgagaaggactacgtggactctgtgaagggcagattcaccatcagccgggacaacgccaagaagtccctgtacctccagatgaacagcctgagagccgaggacaccgccgtgtactattgtgcctctggcgtgtacagcttcgactacagaggccagggcaccctggtcacagtctcttctggtaccggcggaggcggatctggcggcggaggtagcggtggcggaggatctgaattcgacatccagatgacacagagccctagcagcctgtctgccagcgtgggagacagagtgaccatcacatgcaaggccagcgaccacatcaacaactggctggcctggtatcagcagaagcctggacaggcccctaagctgctgatctacggcgctaccacactggaaacaggcgtgcccagcagattttctggcagcggctctggcaccgactacaccctgacaatatccagcctccagcctgaggacttcgccacctactactgtcagcagagctggaacaccccttggacattcggccagggcaccaagctggaaatcaagagactcgagatccagaaccctgatcctgccgtgtaccagctgcgggatagcaagagcagcgacaagagcgtgtgtctgttcaccgacttcgacagccagaccaacgtgtcccagagcaaggactccgacgtgtacatcaccgataagtgcgtgctggacatgcggagcatggacttcaagagcaactccgccgtggcctggtccaacaagtccgatttcgcctgcgccaacgccttcaacaacagcattatccccgaggacacattcttcccaagccccgagagcagctgcgacgtgaagctggtggaaaagagcttcgagacagacaccaacctgaacttccagatcctgtacgagatcctgctgggcaaggccaccctgtacgccgtgctggtgtctgccctggtgctgatggctatggtcaagcggaaggacagccggggacgcgccaagagaagcggatctggcgtgaagcagaccctgaatttcgacctgctgaagctggctggcgacgtggaatccaacccaggccctactagtatggactggatttggcgcatccttttccttgtcggcgctgctaccggcgcgcattccgggccccagctccagctgcaagagtctggacctggcctggtcaagcctagcgagacactgagcctgacctgtaccgtgtccggcgatagcatcagcagcggcgattactactggggctggatcagacagcctcctggcaaaggactggaatggatcggccacatctactacagcggcgtgacctactacaaccccagcctgaagtccagagtgaccatcagcgtggacaccagccggaaccagttctccctgaagctgtctagcgtgacagccgccgataccgccgtgtactactgcaccagagaggacagcagcaactggcggagtagaggccagggaacactggtcacagttagctctggatccggcggaggcggaagtggaggcggaggatctggcggcggaggctctttcgaacaagttcagcttcaacagcctggcgctgagctggtcaaacctggcgcttctgtgaagatgagctgcaaagccagcggctacaccttcagcagctactggatcaactggatgaagcagaaacccggccagggactcgaatggatcggccaaatctatcccggcgacggcgacaccaactacaacggcaagttcaagggcagagccacactgaccgccgatacctctagcagcacagcctacatgcagctgagcagcctgaccagcgaagatagcgccgtgtacttctgtgcccggtccatcacaacagtcgtgggctgcgctatggactattggggccagggaacaagcgtgaccgtgtctagtacgcgtgaggacctgaagaacgtgttcccacctgaggtggccgtgttcgagcctagcgaggccgagatcagccacacccagaaagccaccctcgtgtgcctggctaccggcttctaccccgaccatgtggaactgtcttggtgggtcaacggcaaagaggtgcacagcggcgtgtgtaccgacccccagccactgaaagaacagcccgccctgaacgacagccggtactgcctgagcagcagactgagagtgtccgccaccttctggcagaacccccggaaccacttcagatgccaggtgcagttctacggcctgagcgagaacgacgagtggacccaggacagagccaagcccgtgacccagatcgtgtctgccgaagcctggggcagagccgattgcggctttaccagcgagagctaccagcagggcgtgctgagcgccaccaacctgagcgtgatcggcttcagaatcctgctgctgaaagtggccggctttaacctgctgatgaccctgcggctgtggtccagc

SEQ ID NO: 33951 - DNA, 2178 bp, synthetic construct
  source 1..2178: mol_type = other DNA
atggccttaccagtgaccgccttgctcctgccgctggccttgctgctccacgccgccaggccggacatccagatgacacagagccctagcagcctgtctgccagcgtgggagacagagtgaccatcacatgcaaggccagcgaccacatcaacaactggctggcctggtatcagcagaagcctggacaggcccctaagctgctgatctacggcgctaccacactggaaacaggcgtgcccagcagattttctggcagcggctctggcaccgactacaccctgacaatatccagcctccagcctgaggacttcgccacctactactgtcagcagagctggaacaccccttggacattcggccagggcaccaagctggaaatcaagagactcgaggacctgaagaacgtgttcccacctgaggtggccgtgttcgagcctagcgaggccgagatcagccacacccagaaagccaccctcgtgtgcctggctaccggcttctaccccgaccatgtggaactgtcttggtgggtcaacggcaaagaggtgcacagcggcgtgtgtaccgacccccagccactgaaagaacagcccgccctgaacgacagccggtactgcctgagcagcagactgagagtgtccgccaccttctggcagaacccccggaaccacttcagatgccaggtgcagttctacggcctgagcgagaacgacgagtggacccaggacagagccaagcccgtgacccagatcgtgtctgccgaagcctggggcagagccgatgatgtgattaagatccactggcaggaaaagaagtccaacaccatcctgggcagccaggaaggcaacaccatgaagaccaacgacacctacatgaagttcagctggctgaccgtgcccgagaagtccctggacaaagaacacagatgcatcgtgcggcacgaaaacaacaagaacggcgtggaccaggaaatcatcttcccacccatcaagaccgatgtgattacaatggaccccaaggacaactgctccaaggacgccaacgataccctgctgctccagctgaccaacaccagcgcctactacatgtacttgttgctgctgctgaagtccgtggtgtacttcgccatcatcacatgctgcctgctgatggctatggtcaagcggaaggacagccggggaagggccaagcgatctggatctggagcaacaaacttctcactactcaaacaagcaggtgacgtggaggagaatcccgggcctactagtatggactggatttggcgcatccttttccttgtcggcgctgctaccggcgcgcattccttcgaacaagttcagcttcaacagcctggcgctgagctggtcaaacctggcgcttctgtgaagatgagctgcaaagccagcggctacaccttcagcagctactggatcaactggatgaagcagaaacccggccagggactcgaatggatcggccaaatctatcccggcgacggcgacaccaactacaacggcaagttcaagggcagagccacactgaccgccgatacctctagcagcacagcctacatgcagctgagcagcctgaccagcgaagatagcgccgtgtacttctgtgcccggtccatcacaacagtcgtgggctgcgctatggactattggggccagggaacaagcgtgaccgtgtctagtacgcgtatccagaaccctgatcctgccgtgtaccagctgcgggatagcaagagcagcgacaagagcgtgtgtctgttcaccgacttcgacagccagaccaacgtgtcccagagcaaggactccgacgtgtacatcaccgataagtgcgtgctggacatgcggagcatggacttcaagagcaactccgccgtggcctggtccaacaagtccgatttcgcctgcgccaacgccttcaacaacagcattatccccgaggacacattcttcccaagccccgagagcagcgactccaccgaccacgtgaagcccaaagagacagagaacaccaagcagcccagcaagagctgccacaagcccaaggccatcgtgcacaccgagaaagtgaacatgatgagcctgaccgtgctgggcctgcggatgctgttcgccaaaaccgtggccgtgaacttcctgctgaccgccaagctgttcttcctcctcaccgcc

SEQ ID NO: 33952 - DNA, 2190 bp, synthetic construct
  source 1..2190: mol_type = other DNA
atggccttaccagtgaccgccttgctcctgccgctggccttgctgctccacgccgccaggccggacatccagatgacacagagccctagcagcctgtctgccagcgtgggagacagagtgaccatcacatgcaaggccagcgaccacatcaacaactggctggcctggtatcagcagaagcctggacaggcccctaagctgctgatctacggcgctaccacactggaaacaggcgtgcccagcagattttctggcagcggctctggcaccgactacaccctgacaatatccagcctccagcctgaggacttcgccacctactactgtcagcagagctggaacaccccttggacattcggccagggcaccaagctggaaatcaagagactcgagatccagaaccctgatcctgccgtgtaccagctgcgggatagcaagagcagcgacaagagcgtgtgtctgttcaccgacttcgacagccagaccaacgtgtcccagagcaaggactccgacgtgtacatcaccgataagtgcgtgctggacatgcggagcatggacttcaagagcaactccgccgtggcctggtccaacaagtccgatttcgcctgcgccaacgccttcaacaacagcattatccccgaggacacattcttcccaagccccgagagcagcgactccaccgaccacgtgaagcccaaagagacagagaacaccaagcagcccagcaagagctgccacaagcccaaggccatcgtgcacaccgagaaagtgaacatgatgagcctgaccgtgctgggcctgcggatgctgttcgccaaaaccgtggccgtgaacttcctgctgaccgccaagctgttcttcctcctcaccgcccgcgccaagagaagcggatctggcgtgaagcagaccctgaatttcgacctgctgaagctggctggcgacgtggaatccaacccaggccctactagtatggactggatttggcgcatccttttccttgtcggcgctgctaccggcgcgcattccttcgaacaagttcagcttcaacagcctggcgctgagctggtcaaacctggcgcttctgtgaagatgagctgcaaagccagcggctacaccttcagcagctactggatcaactggatgaagcagaaacccggccagggactcgaatggatcggccaaatctatcccggcgacggcgacaccaactacaacggcaagttcaagggcagagccacactgaccgccgatacctctagcagcacagcctacatgcagctgagcagcctgaccagcgaagatagcgccgtgtacttctgtgcccggtccatcacaacagtcgtgggctgcgctatggactattggggccagggaacaagcgtgaccgtgtctagtacgcgtgaggacctgaagaacgtgttcccacctgaggtggccgtgttcgagcctagcgaggccgagatcagccacacccagaaagccaccctcgtgtgcctggctaccggcttctaccccgaccatgtggaactgtcttggtgggtcaacggcaaagaggtgcacagcggcgtgtgtaccgacccccagccactgaaagaacagcccgccctgaacgacagccggtactgcctgagcagcagactgagagtgtccgccaccttctggcagaacccccggaaccacttcagatgccaggtgcagttctacggcctgagcgagaacgacgagtggacccaggacagagccaagcccgtgacccagatcgtgtctgccgaagcctggggcagagccgatgatgtgattaagatccactggcaggaaaagaagtccaacaccatcctgggcagccaggaaggcaacaccatgaagaccaacgacacctacatgaagttcagctggctgaccgtgcccgagaagtccctggacaaagaacacagatgcatcgtgcggcacgaaaacaacaagaacggcgtggaccaggaaatcatcttcccacccatcaagaccgatgtgattacaatggaccccaaggacaactgctccaaggacgccaacgataccctgctgctccagctgaccaacaccagcgcctactacatgtacttgttgctgctgctgaagtccgtggtgtacttcgccatcatcacatgctgcctgctgatggctatggtcaagcggaaggacagccgggga

SEQ ID NO: 33953 - DNA, 2583 bp, synthetic construct
  source 1..2583: mol_type = other DNA
atggccttaccagtgaccgccttgctcctgccgctggccttgctgctccacgccgccaggccggaagtgcagctggttgaatctggcggaggactggttcagcctggcggatctctgagactgtcttgtgccgccagcggcttcagcttcagcgacttttggatgagctgggtccgacaggcccctggcaaaggacttgaatgggtcgccacaatcagccaggccggcagcgagaaggactacgtggactctgtgaagggcagattcaccatcagccgggacaacgccaagaagtccctgtacctccagatgaacagcctgagagccgaggacaccgccgtgtactattgtgcctctggcgtgtacagcttcgactacagaggccagggcaccctggtcacagtctcttctggtaccggcggaggcggatctggcggcggaggtagcggtggcggaggatctgaattcgacatccagatgacacagagccctagcagcctgtctgccagcgtgggagacagagtgaccatcacatgcaaggccagcgaccacatcaacaactggctggcctggtatcagcagaagcctggacaggcccctaagctgctgatctacggcgctaccacactggaaacaggcgtgcccagcagattttctggcagcggctctggcaccgactacaccctgacaatatccagcctccagcctgaggacttcgccacctactactgtcagcagagctggaacaccccttggacattcggccagggcaccaagctggaaatcaagagactcgaggacctgaagaacgtgttcccacctgaggtggccgtgttcgagcctagcgaggccgagatcagccacacccagaaagccaccctcgtgtgcctggctaccggcttctaccccgaccatgtggaactgtcttggtgggtcaacggcaaagaggtgcacagcggcgtgtgtaccgacccccagccactgaaagaacagcccgccctgaacgacagccggtactgcctgagcagcagactgagagtgtccgccaccttctggcagaacccccggaaccacttcagatgccaggtgcagttctacggcctgagcgagaacgacgagtggacccaggacagagccaagcccgtgacccagatcgtgtctgccgaagcctggggcagagccgatgatgtgattaagatccactggcaggaaaagaagtccaacaccatcctgggcagccaggaaggcaacaccatgaagaccaacgacacctacatgaagttcagctggctgaccgtgcccgagaagtccctggacaaagaacacagatgcatcgtgcggcacgaaaacaacaagaacggcgtggaccaggaaatcatcttcccacccatcaagaccgatgtgattacaatggaccccaaggacaactgctccaaggacgccaacgataccctgctgctccagctgaccaacaccagcgcctactacatgtacttgttgctgctgctgaagtccgtggtgtacttcgccatcatcacatgctgcctgctgatggctatggtcaagcggaaggacagccggggaagggccaagcgatctggatctggagcaacaaacttctcactactcaaacaagcaggtgacgtggaggagaatcccgggcctactagtatggactggatttggcgcatccttttccttgtcggcgctgctaccggcgcgcattccttcgaacaagttcagcttcaacagcctggcgctgagctggtcaaacctggcgcttctgtgaagatgagctgcaaagccagcggctacaccttcagcagctactggatcaactggatgaagcagaaacccggccagggactcgaatggatcggccaaatctatcccggcgacggcgacaccaactacaacggcaagttcaagggcagagccacactgaccgccgatacctctagcagcacagcctacatgcagctgagcagcctgaccagcgaagatagcgccgtgtacttctgtgcccggtccatcacaacagtcgtgggctgcgctatggactattggggccagggaacaagcgtgaccgtgtctagtacgcgtatccagaaccctgatcctgccgtgtaccagctgcgggatagcaagagcagcgacaagagcgtgtgtctgttcaccgacttcgacagccagaccaacgtgtcccagagcaaggactccgacgtgtacatcaccgataagtgcgtgctggacatgcggagcatggacttcaagagcaactccgccgtggcctggtccaacaagtccgatttcgcctgcgccaacgccttcaacaacagcattatccccgaggacacattcttcccaagccccgagagcagcgactccaccgaccacgtgaagcccaaagagacagagaacaccaagcagcccagcaagagctgccacaagcccaaggccatcgtgcacaccgagaaagtgaacatgatgagcctgaccgtgctgggcctgcggatgctgttcgccaaaaccgtggccgtgaacttcctgctgaccgccaagctgttcttcctcctcaccgcc

SEQ ID NO: 33954 - DNA, 2595 bp, synthetic construct
  source 1..2595: mol_type = other DNA
atggccttaccagtgaccgccttgctcctgccgctggccttgctgctccacgccgccaggccggaagtgcagctggttgaatctggcggaggactggttcagcctggcggatctctgagactgtcttgtgccgccagcggcttcagcttcagcgacttttggatgagctgggtccgacaggcccctggcaaaggacttgaatgggtcgccacaatcagccaggccggcagcgagaaggactacgtggactctgtgaagggcagattcaccatcagccgggacaacgccaagaagtccctgtacctccagatgaacagcctgagagccgaggacaccgccgtgtactattgtgcctctggcgtgtacagcttcgactacagaggccagggcaccctggtcacagtctcttctggtaccggcggaggcggatctggcggcggaggtagcggtggcggaggatctgaattcgacatccagatgacacagagccctagcagcctgtctgccagcgtgggagacagagtgaccatcacatgcaaggccagcgaccacatcaacaactggctggcctggtatcagcagaagcctggacaggcccctaagctgctgatctacggcgctaccacactggaaacaggcgtgcccagcagattttctggcagcggctctggcaccgactacaccctgacaatatccagcctccagcctgaggacttcgccacctactactgtcagcagagctggaacaccccttggacattcggccagggcaccaagctggaaatcaagagactcgagatccagaaccctgatcctgccgtgtaccagctgcgggatagcaagagcagcgacaagagcgtgtgtctgttcaccgacttcgacagccagaccaacgtgtcccagagcaaggactccgacgtgtacatcaccgataagtgcgtgctggacatgcggagcatggacttcaagagcaactccgccgtggcctggtccaacaagtccgatttcgcctgcgccaacgccttcaacaacagcattatccccgaggacacattcttcccaagccccgagagcagcgactccaccgaccacgtgaagcccaaagagacagagaacaccaagcagcccagcaagagctgccacaagcccaaggccatcgtgcacaccgagaaagtgaacatgatgagcctgaccgtgctgggcctgcggatgctgttcgccaaaaccgtggccgtgaacttcctgctgaccgccaagctgttcttcctcctcaccgcccgcgccaagagaagcggatctggcgtgaagcagaccctgaatttcgacctgctgaagctggctggcgacgtggaatccaacccaggccctactagtatggactggatttggcgcatccttttccttgtcggcgctgctaccggcgcgcattccttcgaacaagttcagcttcaacagcctggcgctgagctggtcaaacctggcgcttctgtgaagatgagctgcaaagccagcggctacaccttcagcagctactggatcaactggatgaagcagaaacccggccagggactcgaatggatcggccaaatctatcccggcgacggcgacaccaactacaacggcaagttcaagggcagagccacactgaccgccgatacctctagcagcacagcctacatgcagctgagcagcctgaccagcgaagatagcgccgtgtacttctgtgcccggtccatcacaacagtcgtgggctgcgctatggactattggggccagggaacaagcgtgaccgtgtctagtacgcgtgaggacctgaagaacgtgttcccacctgaggtggccgtgttcgagcctagcgaggccgagatcagccacacccagaaagccaccctcgtgtgcctggctaccggcttctaccccgaccatgtggaactgtcttggtgggtcaacggcaaagaggtgcacagcggcgtgtgtaccgacccccagccactgaaagaacagcccgccctgaacgacagccggtactgcctgagcagcagactgagagtgtccgccaccttctggcagaacccccggaaccacttcagatgccaggtgcagttctacggcctgagcgagaacgacgagtggacccaggacagagccaagcccgtgacccagatcgtgtctgccgaagcctggggcagagccgatgatgtgattaagatccactggcaggaaaagaagtccaacaccatcctgggcagccaggaaggcaacaccatgaagaccaacgacacctacatgaagttcagctggctgaccgtgcccgagaagtccctggacaaagaacacagatgcatcgtgcggcacgaaaacaacaagaacggcgtggaccaggaaatcatcttcccacccatcaagaccgatgtgattacaatggaccccaaggacaactgctccaaggacgccaacgataccctgctgctccagctgaccaacaccagcgcctactacatgtacttgttgctgctgctgaagtccgtggtgtacttcgccatcatcacatgctgcctgctgatggctatggtcaagcggaaggacagccgggga

SEQ ID NO: 33955 - DNA, 2994 bp, synthetic construct
  source 1..2994: mol_type = other DNA
atggccttaccagtgaccgccttgctcctgccgctggccttgctgctccacgccgccaggccggaagtgcagctggttgaatctggcggaggactggttcagcctggcggatctctgagactgtcttgtgccgccagcggcttcagcttcagcgacttttggatgagctgggtccgacaggcccctggcaaaggacttgaatgggtcgccacaatcagccaggccggcagcgagaaggactacgtggactctgtgaagggcagattcaccatcagccgggacaacgccaagaagtccctgtacctccagatgaacagcctgagagccgaggacaccgccgtgtactattgtgcctctggcgtgtacagcttcgactacagaggccagggcaccctggtcacagtctcttctggtaccggcggaggcggatctggcggcggaggtagcggtggcggaggatctgaattcgacatccagatgacacagagccctagcagcctgtctgccagcgtgggagacagagtgaccatcacatgcaaggccagcgaccacatcaacaactggctggcctggtatcagcagaagcctggacaggcccctaagctgctgatctacggcgctaccacactggaaacaggcgtgcccagcagattttctggcagcggctctggcaccgactacaccctgacaatatccagcctccagcctgaggacttcgccacctactactgtcagcagagctggaacaccccttggacattcggccagggcaccaagctggaaatcaagagactcgaggacctgaagaacgtgttcccacctgaggtggccgtgttcgagcctagcgaggccgagatcagccacacccagaaagccaccctcgtgtgcctggctaccggcttctaccccgaccatgtggaactgtcttggtgggtcaacggcaaagaggtgcacagcggcgtgtgtaccgacccccagccactgaaagaacagcccgccctgaacgacagccggtactgcctgagcagcagactgagagtgtccgccaccttctggcagaacccccggaaccacttcagatgccaggtgcagttctacggcctgagcgagaacgacgagtggacccaggacagagccaagcccgtgacccagatcgtgtctgccgaagcctggggcagagccgatgatgtgattaagatccactggcaggaaaagaagtccaacaccatcctgggcagccaggaaggcaacaccatgaagaccaacgacacctacatgaagttcagctggctgaccgtgcccgagaagtccctggacaaagaacacagatgcatcgtgcggcacgaaaacaacaagaacggcgtggaccaggaaatcatcttcccacccatcaagaccgatgtgattacaatggaccccaaggacaactgctccaaggacgccaacgataccctgctgctccagctgaccaacaccagcgcctactacatgtacttgttgctgctgctgaagtccgtggtgtacttcgccatcatcacatgctgcctgctgatggctatggtcaagcggaaggacagccggggaagggccaagcgatctggatctggagcaacaaacttctcactactcaaacaagcaggtgacgtggaggagaatcccgggcctactagtatggactggatttggcgcatccttttccttgtcggcgctgctaccggcgcgcattccgggccccagctccagctgcaagagtctggacctggcctggtcaagcctagcgagacactgagcctgacctgtaccgtgtccggcgatagcatcagcagcggcgattactactggggctggatcagacagcctcctggcaaaggactggaatggatcggccacatctactacagcggcgtgacctactacaaccccagcctgaagtccagagtgaccatcagcgtggacaccagccggaaccagttctccctgaagctgtctagcgtgacagccgccgataccgccgtgtactactgcaccagagaggacagcagcaactggcggagtagaggccagggaacactggtcacagttagctctggatccggcggaggcggaagtggaggcggaggatctggcggcggaggctctttcgaacaagttcagcttcaacagcctggcgctgagctggtcaaacctggcgcttctgtgaagatgagctgcaaagccagcggctacaccttcagcagctactggatcaactggatgaagcagaaacccggccagggactcgaatggatcggccaaatctatcccggcgacggcgacaccaactacaacggcaagttcaagggcagagccacactgaccgccgatacctctagcagcacagcctacatgcagctgagcagcctgaccagcgaagatagcgccgtgtacttctgtgcccggtccatcacaacagtcgtgggctgcgctatggactattggggccagggaacaagcgtgaccgtgtctagtacgcgtatccagaaccctgatcctgccgtgtaccagctgcgggatagcaagagcagcgacaagagcgtgtgtctgttcaccgacttcgacagccagaccaacgtgtcccagagcaaggactccgacgtgtacatcaccgataagtgcgtgctggacatgcggagcatggacttcaagagcaactccgccgtggcctggtccaacaagtccgatttcgcctgcgccaacgccttcaacaacagcattatccccgaggacacattcttcccaagccccgagagcagcgactccaccgaccacgtgaagcccaaagagacagagaacaccaagcagcccagcaagagctgccacaagcccaaggccatcgtgcacaccgagaaagtgaacatgatgagcctgaccgtgctgggcctgcggatgctgttcgccaaaaccgtggccgtgaacttcctgctgaccgccaagctgttcttcctcctcaccgcc

SEQ ID NO: 33956 - DNA, 3006 bp, synthetic construct
  source 1..3006: mol_type = other DNA
atggccttaccagtgaccgccttgctcctgccgctggccttgctgctccacgccgccaggccggaagtgcagctggttgaatctggcggaggactggttcagcctggcggatctctgagactgtcttgtgccgccagcggcttcagcttcagcgacttttggatgagctgggtccgacaggcccctggcaaaggacttgaatgggtcgccacaatcagccaggccggcagcgagaaggactacgtggactctgtgaagggcagattcaccatcagccgggacaacgccaagaagtccctgtacctccagatgaacagcctgagagccgaggacaccgccgtgtactattgtgcctctggcgtgtacagcttcgactacagaggccagggcaccctggtcacagtctcttctggtaccggcggaggcggatctggcggcggaggtagcggtggcggaggatctgaattcgacatccagatgacacagagccctagcagcctgtctgccagcgtgggagacagagtgaccatcacatgcaaggccagcgaccacatcaacaactggctggcctggtatcagcagaagcctggacaggcccctaagctgctgatctacggcgctaccacactggaaacaggcgtgcccagcagattttctggcagcggctctggcaccgactacaccctgacaatatccagcctccagcctgaggacttcgccacctactactgtcagcagagctggaacaccccttggacattcggccagggcaccaagctggaaatcaagagactcgagatccagaaccctgatcctgccgtgtaccagctgcgggatagcaagagcagcgacaagagcgtgtgtctgttcaccgacttcgacagccagaccaacgtgtcccagagcaaggactccgacgtgtacatcaccgataagtgcgtgctggacatgcggagcatggacttcaagagcaactccgccgtggcctggtccaacaagtccgatttcgcctgcgccaacgccttcaacaacagcattatccccgaggacacattcttcccaagccccgagagcagcgactccaccgaccacgtgaagcccaaagagacagagaacaccaagcagcccagcaagagctgccacaagcccaaggccatcgtgcacaccgagaaagtgaacatgatgagcctgaccgtgctgggcctgcggatgctgttcgccaaaaccgtggccgtgaacttcctgctgaccgccaagctgttcttcctcctcaccgcccgcgccaagagaagcggatctggcgtgaagcagaccctgaatttcgacctgctgaagctggctggcgacgtggaatccaacccaggccctactagtatggactggatttggcgcatccttttccttgtcggcgctgctaccggcgcgcattccgggccccagctccagctgcaagagtctggacctggcctggtcaagcctagcgagacactgagcctgacctgtaccgtgtccggcgatagcatcagcagcggcgattactactggggctggatcagacagcctcctggcaaaggactggaatggatcggccacatctactacagcggcgtgacctactacaaccccagcctgaagtccagagtgaccatcagcgtggacaccagccggaaccagttctccctgaagctgtctagcgtgacagccgccgataccgccgtgtactactgcaccagagaggacagcagcaactggcggagtagaggccagggaacactggtcacagttagctctggatccggcggaggcggaagtggaggcggaggatctggcggcggaggctctttcgaacaagttcagcttcaacagcctggcgctgagctggtcaaacctggcgcttctgtgaagatgagctgcaaagccagcggctacaccttcagcagctactggatcaactggatgaagcagaaacccggccagggactcgaatggatcggccaaatctatcccggcgacggcgacaccaactacaacggcaagttcaagggcagagccacactgaccgccgatacctctagcagcacagcctacatgcagctgagcagcctgaccagcgaagatagcgccgtgtacttctgtgcccggtccatcacaacagtcgtgggctgcgctatggactattggggccagggaacaagcgtgaccgtgtctagtacgcgtgaggacctgaagaacgtgttcccacctgaggtggccgtgttcgagcctagcgaggccgagatcagccacacccagaaagccaccctcgtgtgcctggctaccggcttctaccccgaccatgtggaactgtcttggtgggtcaacggcaaagaggtgcacagcggcgtgtgtaccgacccccagccactgaaagaacagcccgccctgaacgacagccggtactgcctgagcagcagactgagagtgtccgccaccttctggcagaacccccggaaccacttcagatgccaggtgcagttctacggcctgagcgagaacgacgagtggacccaggacagagccaagcccgtgacccagatcgtgtctgccgaagcctggggcagagccgatgatgtgattaagatccactggcaggaaaagaagtccaacaccatcctgggcagccaggaaggcaacaccatgaagaccaacgacacctacatgaagttcagctggctgaccgtgcccgagaagtccctggacaaagaacacagatgcatcgtgcggcacgaaaacaacaagaacggcgtggaccaggaaatcatcttcccacccatcaagaccgatgtgattacaatggaccccaaggacaactgctccaaggacgccaacgataccctgctgctccagctgaccaacaccagcgcctactacatgtacttgttgctgctgctgaagtccgtggtgtacttcgccatcatcacatgctgcctgctgatggctatggtcaagcggaaggacagccgggga

SEQ ID NO: 33957 - DNA, 2172 bp, synthetic construct
  source 1..2172: mol_type = other DNA
atggccttaccagtgaccgccttgctcctgccgctggccttgctgctccacgccgccaggccggacatccagatgacacagagccctagcagcctgtctgccagcgtgggagacagagtgaccatcacatgcaaggccagcgaccacatcaacaactggctggcctggtatcagcagaagcctggacaggcccctaagctgctgatctacggcgctaccacactggaaacaggcgtgcccagcagattttctggcagcggctctggcaccgactacaccctgacaatatccagcctccagcctgaggacttcgccacctactactgtcagcagagctggaacaccccttggacattcggccagggcaccaagctggaaatcaagagactcgaggacctgaagaacgtgttcccacctgaggtggccgtgttcgagcctagcgaggccgagatcagccacacccagaaagccaccctcgtgtgcctggctaccggcttctaccccgaccatgtggaactgtcttggtgggtcaacggcaaagaggtgcacagcggcgtgtgtaccgacccccagccactgaaagaacagcccgccctgaacgacagccggtactgcctgagcagcagactgagagtgtccgccaccttctggcagaacccccggaaccacttcagatgccaggtgcagttctacggcctgagcgagaacgacgagtggacccaggacagagccaagcccgtgacccagatcgtgtctgccgaagcctggggcagagccgatgatgtgattaagatccactggcaggaaaagaagtccaacaccatcctgggcagccaggaaggcaacaccatgaagaccaacgacacctacatgaagttcagctggctgaccgtgcccgagaagtccctggacaaagaacacagatgcatcgtgcggcacgaaaacaacaagaacggcgtggaccaggaaatcatcttcccacccatcaagaccgatgtgattacaatggaccccaaggacaactgctccaaggacgccaacgataccctgctgctccagctgaccaacaccagcgcctactacatgtacttgttgctgctgctgaagtccgtggtgtacttcgccatcatcacatgctgcctgctgcggagaaccgccttctgctgcaacggcgagaagtctagggccaagcgatctggatctggagcaacaaacttctcactactcaaacaagcaggtgacgtggaggagaatcccgggcctactagtatggactggatttggcgcatccttttccttgtcggcgctgctaccggcgcgcattccttcgaacaagttcagcttcaacagcctggcgctgagctggtcaaacctggcgcttctgtgaagatgagctgcaaagccagcggctacaccttcagcagctactggatcaactggatgaagcagaaacccggccagggactcgaatggatcggccaaatctatcccggcgacggcgacaccaactacaacggcaagttcaagggcagagccacactgaccgccgatacctctagcagcacagcctacatgcagctgagcagcctgaccagcgaagatagcgccgtgtacttctgtgcccggtccatcacaacagtcgtgggctgcgctatggactattggggccagggaacaagcgtgaccgtgtctagtacgcgtatccagaaccctgatcctgccgtgtaccagctgcgggatagcaagagcagcgacaagagcgtgtgtctgttcaccgacttcgacagccagaccaacgtgtcccagagcaaggactccgacgtgtacatcaccgataagtgcgtgctggacatgcggagcatggacttcaagagcaactccgccgtggcctggtccaacaagtccgatttcgcctgcgccaacgccttcaacaacagcattatccccgaggacacattcttcccaagccccgagagcagcgactccaccgaccacgtgaagcccaaagagacagagaacaccaagcagcccagcaagagctgccacaagcccaaggccatcgtgcacaccgagaaagtgaacatgatgagcctgaccgtgctgggcctgcggatgctgttcgccaaaaccgtggccgtgaacttcctgctgaccgccaagctgttcttcctc

SEQ ID NO: 33958 - DNA, 2184 bp, synthetic construct
  source 1..2184: mol_type = other DNA
atggccttaccagtgaccgccttgctcctgccgctggccttgctgctccacgccgccaggccggacatccagatgacacagagccctagcagcctgtctgccagcgtgggagacagagtgaccatcacatgcaaggccagcgaccacatcaacaactggctggcctggtatcagcagaagcctggacaggcccctaagctgctgatctacggcgctaccacactggaaacaggcgtgcccagcagattttctggcagcggctctggcaccgactacaccctgacaatatccagcctccagcctgaggacttcgccacctactactgtcagcagagctggaacaccccttggacattcggccagggcaccaagctggaaatcaagagactcgagatccagaaccctgatcctgccgtgtaccagctgcgggatagcaagagcagcgacaagagcgtgtgtctgttcaccgacttcgacagccagaccaacgtgtcccagagcaaggactccgacgtgtacatcaccgataagtgcgtgctggacatgcggagcatggacttcaagagcaactccgccgtggcctggtccaacaagtccgatttcgcctgcgccaacgccttcaacaacagcattatccccgaggacacattcttcccaagccccgagagcagcgactccaccgaccacgtgaagcccaaagagacagagaacaccaagcagcccagcaagagctgccacaagcccaaggccatcgtgcacaccgagaaagtgaacatgatgagcctgaccgtgctgggcctgcggatgctgttcgccaaaaccgtggccgtgaacttcctgctgaccgccaagctgttcttcctccgcgccaagagaagcggatctggcgtgaagcagaccctgaatttcgacctgctgaagctggctggcgacgtggaatccaacccaggccctactagtatggactggatttggcgcatccttttccttgtcggcgctgctaccggcgcgcattccttcgaacaagttcagcttcaacagcctggcgctgagctggtcaaacctggcgcttctgtgaagatgagctgcaaagccagcggctacaccttcagcagctactggatcaactggatgaagcagaaacccggccagggactcgaatggatcggccaaatctatcccggcgacggcgacaccaactacaacggcaagttcaagggcagagccacactgaccgccgatacctctagcagcacagcctacatgcagctgagcagcctgaccagcgaagatagcgccgtgtacttctgtgcccggtccatcacaacagtcgtgggctgcgctatggactattggggccagggaacaagcgtgaccgtgtctagtacgcgtgaggacctgaagaacgtgttcccacctgaggtggccgtgttcgagcctagcgaggccgagatcagccacacccagaaagccaccctcgtgtgcctggctaccggcttctaccccgaccatgtggaactgtcttggtgggtcaacggcaaagaggtgcacagcggcgtgtgtaccgacccccagccactgaaagaacagcccgccctgaacgacagccggtactgcctgagcagcagactgagagtgtccgccaccttctggcagaacccccggaaccacttcagatgccaggtgcagttctacggcctgagcgagaacgacgagtggacccaggacagagccaagcccgtgacccagatcgtgtctgccgaagcctggggcagagccgatgatgtgattaagatccactggcaggaaaagaagtccaacaccatcctgggcagccaggaaggcaacaccatgaagaccaacgacacctacatgaagttcagctggctgaccgtgcccgagaagtccctggacaaagaacacagatgcatcgtgcggcacgaaaacaacaagaacggcgtggaccaggaaatcatcttcccacccatcaagaccgatgtgattacaatggaccccaaggacaactgctccaaggacgccaacgataccctgctgctccagctgaccaacaccagcgcctactacatgtacttgttgctgctgctgaagtccgtggtgtacttcgccatcatcacatgctgcctgctgcggagaaccgccttctgctgcaacggcgagaagtct

SEQ ID NO: 33959 - DNA, 2577 bp, synthetic construct
  source 1..2577: mol_type = other DNA
atggccttaccagtgaccgccttgctcctgccgctggccttgctgctccacgccgccaggccggaagtgcagctggttgaatctggcggaggactggttcagcctggcggatctctgagactgtcttgtgccgccagcggcttcagcttcagcgacttttggatgagctgggtccgacaggcccctggcaaaggacttgaatgggtcgccacaatcagccaggccggcagcgagaaggactacgtggactctgtgaagggcagattcaccatcagccgggacaacgccaagaagtccctgtacctccagatgaacagcctgagagccgaggacaccgccgtgtactattgtgcctctggcgtgtacagcttcgactacagaggccagggcaccctggtcacagtctcttctggtaccggcggaggcggatctggcggcggaggtagcggtggcggaggatctgaattcgacatccagatgacacagagccctagcagcctgtctgccagcgtgggagacagagtgaccatcacatgcaaggccagcgaccacatcaacaactggctggcctggtatcagcagaagcctggacaggcccctaagctgctgatctacggcgctaccacactggaaacaggcgtgcccagcagattttctggcagcggctctggcaccgactacaccctgacaatatccagcctccagcctgaggacttcgccacctactactgtcagcagagctggaacaccccttggacattcggccagggcaccaagctggaaatcaagagactcgaggacctgaagaacgtgttcccacctgaggtggccgtgttcgagcctagcgaggccgagatcagccacacccagaaagccaccctcgtgtgcctggctaccggcttctaccccgaccatgtggaactgtcttggtgggtcaacggcaaagaggtgcacagcggcgtgtgtaccgacccccagccactgaaagaacagcccgccctgaacgacagccggtactgcctgagcagcagactgagagtgtccgccaccttctggcagaacccccggaaccacttcagatgccaggtgcagttctacggcctgagcgagaacgacgagtggacccaggacagagccaagcccgtgacccagatcgtgtctgccgaagcctggggcagagccgatgatgtgattaagatccactggcaggaaaagaagtccaacaccatcctgggcagccaggaaggcaacaccatgaagaccaacgacacctacatgaagttcagctggctgaccgtgcccgagaagtccctggacaaagaacacagatgcatcgtgcggcacgaaaacaacaagaacggcgtggaccaggaaatcatcttcccacccatcaagaccgatgtgattacaatggaccccaaggacaactgctccaaggacgccaacgataccctgctgctccagctgaccaacaccagcgcctactacatgtacttgttgctgctgctgaagtccgtggtgtacttcgccatcatcacatgctgcctgctgcggagaaccgccttctgctgcaacggcgagaagtctagggccaagcgatctggatctggagcaacaaacttctcactactcaaacaagcaggtgacgtggaggagaatcccgggcctactagtatggactggatttggcgcatccttttccttgtcggcgctgctaccggcgcgcattccttcgaacaagttcagcttcaacagcctggcgctgagctggtcaaacctggcgcttctgtgaagatgagctgcaaagccagcggctacaccttcagcagctactggatcaactggatgaagcagaaacccggccagggactcgaatggatcggccaaatctatcccggcgacggcgacaccaactacaacggcaagttcaagggcagagccacactgaccgccgatacctctagcagcacagcctacatgcagctgagcagcctgaccagcgaagatagcgccgtgtacttctgtgcccggtccatcacaacagtcgtgggctgcgctatggactattggggccagggaacaagcgtgaccgtgtctagtacgcgtatccagaaccctgatcctgccgtgtaccagctgcgggatagcaagagcagcgacaagagcgtgtgtctgttcaccgacttcgacagccagaccaacgtgtcccagagcaaggactccgacgtgtacatcaccgataagtgcgtgctggacatgcggagcatggacttcaagagcaactccgccgtggcctggtccaacaagtccgatttcgcctgcgccaacgccttcaacaacagcattatccccgaggacacattcttcccaagccccgagagcagcgactccaccgaccacgtgaagcccaaagagacagagaacaccaagcagcccagcaagagctgccacaagcccaaggccatcgtgcacaccgagaaagtgaacatgatgagcctgaccgtgctgggcctgcggatgctgttcgccaaaaccgtggccgtgaacttcctgctgaccgccaagctgttcttcctc

SEQ ID NO: 33960 - DNA, 2988 bp, synthetic construct
  source 1..2988: mol_type = other DNA
atggccttaccagtgaccgccttgctcctgccgctggccttgctgctccacgccgccaggccggaagtgcagctggttgaatctggcggaggactggttcagcctggcggatctctgagactgtcttgtgccgccagcggcttcagcttcagcgacttttggatgagctgggtccgacaggcccctggcaaaggacttgaatgggtcgccacaatcagccaggccggcagcgagaaggactacgtggactctgtgaagggcagattcaccatcagccgggacaacgccaagaagtccctgtacctccagatgaacagcctgagagccgaggacaccgccgtgtactattgtgcctctggcgtgtacagcttcgactacagaggccagggcaccctggtcacagtctcttctggtaccggcggaggcggatctggcggcggaggtagcggtggcggaggatctgaattcgacatccagatgacacagagccctagcagcctgtctgccagcgtgggagacagagtgaccatcacatgcaaggccagcgaccacatcaacaactggctggcctggtatcagcagaagcctggacaggcccctaagctgctgatctacggcgctaccacactggaaacaggcgtgcccagcagattttctggcagcggctctggcaccgactacaccctgacaatatccagcctccagcctgaggacttcgccacctactactgtcagcagagctggaacaccccttggacattcggccagggcaccaagctggaaatcaagagactcgaggacctgaagaacgtgttcccacctgaggtggccgtgttcgagcctagcgaggccgagatcagccacacccagaaagccaccctcgtgtgcctggctaccggcttctaccccgaccatgtggaactgtcttggtgggtcaacggcaaagaggtgcacagcggcgtgtgtaccgacccccagccactgaaagaacagcccgccctgaacgacagccggtactgcctgagcagcagactgagagtgtccgccaccttctggcagaacccccggaaccacttcagatgccaggtgcagttctacggcctgagcgagaacgacgagtggacccaggacagagccaagcccgtgacccagatcgtgtctgccgaagcctggggcagagccgatgatgtgattaagatccactggcaggaaaagaagtccaacaccatcctgggcagccaggaaggcaacaccatgaagaccaacgacacctacatgaagttcagctggctgaccgtgcccgagaagtccctggacaaagaacacagatgcatcgtgcggcacgaaaacaacaagaacggcgtggaccaggaaatcatcttcccacccatcaagaccgatgtgattacaatggaccccaaggacaactgctccaaggacgccaacgataccctgctgctccagctgaccaacaccagcgcctactacatgtacttgttgctgctgctgaagtccgtggtgtacttcgccatcatcacatgctgcctgctgcggagaaccgccttctgctgcaacggcgagaagtctagggccaagcgatctggatctggagcaacaaacttctcactactcaaacaagcaggtgacgtggaggagaatcccgggcctactagtatggactggatttggcgcatccttttccttgtcggcgctgctaccggcgcgcattccgggccccagctccagctgcaagagtctggacctggcctggtcaagcctagcgagacactgagcctgacctgtaccgtgtccggcgatagcatcagcagcggcgattactactggggctggatcagacagcctcctggcaaaggactggaatggatcggccacatctactacagcggcgtgacctactacaaccccagcctgaagtccagagtgaccatcagcgtggacaccagccggaaccagttctccctgaagctgtctagcgtgacagccgccgataccgccgtgtactactgcaccagagaggacagcagcaactggcggagtagaggccagggaacactggtcacagttagctctggatccggcggaggcggaagtggaggcggaggatctggcggcggaggctctttcgaacaagttcagcttcaacagcctggcgctgagctggtcaaacctggcgcttctgtgaagatgagctgcaaagccagcggctacaccttcagcagctactggatcaactggatgaagcagaaacccggccagggactcgaatggatcggccaaatctatcccggcgacggcgacaccaactacaacggcaagttcaagggcagagccacactgaccgccgatacctctagcagcacagcctacatgcagctgagcagcctgaccagcgaagatagcgccgtgtacttctgtgcccggtccatcacaacagtcgtgggctgcgctatggactattggggccagggaacaagcgtgaccgtgtctagtacgcgtatccagaaccctgatcctgccgtgtaccagctgcgggatagcaagagcagcgacaagagcgtgtgtctgttcaccgacttcgacagccagaccaacgtgtcccagagcaaggactccgacgtgtacatcaccgataagtgcgtgctggacatgcggagcatggacttcaagagcaactccgccgtggcctggtccaacaagtccgatttcgcctgcgccaacgccttcaacaacagcattatccccgaggacacattcttcccaagccccgagagcagcgactccaccgaccacgtgaagcccaaagagacagagaacaccaagcagcccagcaagagctgccacaagcccaaggccatcgtgcacaccgagaaagtgaacatgatgagcctgaccgtgctgggcctgcggatgctgttcgccaaaaccgtggccgtgaacttcctgctgaccgccaagctgttcttcctc

SEQ ID NO: 33961 - DNA, 1866 bp, synthetic construct
  source 1..1866: mol_type = other DNA
atggccttaccagtgaccgccttgctcctgccgctggccttgctgctccacgccgccaggccggacatccagatgacacagagccctagcagcctgtctgccagcgtgggagacagagtgaccatcacatgcaaggccagcgaccacatcaacaactggctggcctggtatcagcagaagcctggacaggcccctaagctgctgatctacggcgctaccacactggaaacaggcgtgcccagcagattttctggcagcggctctggcaccgactacaccctgacaatatccagcctccagcctgaggacttcgccacctactactgtcagcagagctggaacaccccttggacattcggccagggcaccaagctggaaatcaagagactcgaggacctgaagaacgtgttcccacctgaggtggccgtgttcgagcctagcgaggccgagatcagccacacccagaaagccaccctcgtgtgcctggctaccggcttctaccccgaccatgtggaactgtcttggtgggtcaacggcaaagaggtgcacagcggcgtgtctaccgacccccagccactgaaagaacagcccgccctgaacgacagccggtactgcctgagcagcagactgagagtgtccgccaccttctggcagaacccccggaaccacttcagatgccaggtgcagttctacggcctgagcgagaacgacgagtggacccaggacagagccaagcccgtgacccagatcgtgtctgccgaagcctggggcagagccgattgcgacgtgaagctggtggaaaagagcttcgagacagacaccaacctgaacttccagaacctgagcgtgatcggcttcagaatcctgctgctgaaagtggccggctttaacctgctgatgaccctgcggctgtggtccagcagggccaagcgatctggatctggagcaacaaacttctcactactcaaacaagcaggtgacgtggaggagaatcccgggcctactagtatggactggatttggcgcatccttttccttgtcggcgctgctaccggcgcgcattccttcgaacaagttcagcttcaacagcctggcgctgagctggtcaaacctggcgcttctgtgaagatgagctgcaaagccagcggctacaccttcagcagctactggatcaactggatgaagcagaaacccggccagggactcgaatggatcggccaaatctatcccggcgacggcgacaccaactacaacggcaagttcaagggcagagccacactgaccgccgatacctctagcagcacagcctacatgcagctgagcagcctgaccagcgaagatagcgccgtgtacttctgtgcccggtccatcacaacagtcgtgggctgcgctatggactattggggccagggaacaagcgtgaccgtgtctagtacgcgtatccagaaccctgatcctgccgtgtaccagctgcgggatagcaagagcagcgacaagagcgtgtgtctgttcaccgacttcgacagccagaccaacgtgtcccagagcaaggactccgacgtgtacatcaccgataagaccgtgctggacatgcggagcatggacttcaagagcaactccgccgtggcctggtccaacaagtccgatttcgcctgcgccaacgccttcaacaacagcattatccccgaggacacattcttcccaagccccgagagcagctgcggctttaccagcgagagctaccagcagggcgtgctgagcgccaccatcctgtacgagatcctgctgggcaaggccaccctgtacgccgtgctggtgtctgccctggtgctgatggctatggtcaagcggaaggacagccgggga

SEQ ID NO: 33962 - DNA, 1866 bp, synthetic construct
  source 1..1866: mol_type = other DNA
atggccttaccagtgaccgccttgctcctgccgctggccttgctgctccacgccgccaggccggacatccagatgacacagagccctagcagcctgtctgccagcgtgggagacagagtgaccatcacatgcaaggccagcgaccacatcaacaactggctggcctggtatcagcagaagcctggacaggcccctaagctgctgatctacggcgctaccacactggaaacaggcgtgcccagcagattttctggcagcggctctggcaccgactacaccctgacaatatccagcctccagcctgaggacttcgccacctactactgtcagcagagctggaacaccccttggacattcggccagggcaccaagctggaaatcaagagactcgaggacctgaagaacgtgttcccacctgaggtggccgtgttcgagcctagcgaggccgagatcagccacacccagaaagccaccctcgtgtgcctggctaccggcttctaccccgaccatgtggaactgtcttggtgggtcaacggcaaagaggtgcacagcggcgtgtctaccgacccccagccactgaaagaacagcccgccctgaacgacagccggtactgcctgagcagcagactgagagtgtccgccaccttctggcagaacccccggaaccacttcagatgccaggtgcagttctacggcctgagcgagaacgacgagtggacccaggacagagccaagcccgtgacccagatcgtgtctgccgaagcctggggcagagccgattgcggctttaccagcgagagctaccagcagggcgtgctgagcgccaccaacctgagcgtgatcggcttcagaatcctgctgctgaaagtggccggctttaacctgctgatgaccctgcggctgtggtccagcagggccaagcgatctggatctggagcaacaaacttctcactactcaaacaagcaggtgacgtggaggagaatcccgggcctactagtatggactggatttggcgcatccttttccttgtcggcgctgctaccggcgcgcattccttcgaacaagttcagcttcaacagcctggcgctgagctggtcaaacctggcgcttctgtgaagatgagctgcaaagccagcggctacaccttcagcagctactggatcaactggatgaagcagaaacccggccagggactcgaatggatcggccaaatctatcccggcgacggcgacaccaactacaacggcaagttcaagggcagagccacactgaccgccgatacctctagcagcacagcctacatgcagctgagcagcctgaccagcgaagatagcgccgtgtacttctgtgcccggtccatcacaacagtcgtgggctgcgctatggactattggggccagggaacaagcgtgaccgtgtctagtacgcgtatccagaaccctgatcctgccgtgtaccagctgcgggatagcaagagcagcgacaagagcgtgtgtctgttcaccgacttcgacagccagaccaacgtgtcccagagcaaggactccgacgtgtacatcaccgataagaccgtgctggacatgcggagcatggacttcaagagcaactccgccgtggcctggtccaacaagtccgatttcgcctgcgccaacgccttcaacaacagcattatccccgaggacacattcttcccaagccccgagagcagctgcgacgtgaagctggtggaaaagagcttcgagacagacaccaacctgaacttccagatcctgtacgagatcctgctgggcaaggccaccctgtacgccgtgctggtgtctgccctggtgctgatggctatggtcaagcggaaggacagccgggga

SEQ ID NO: 33963 - DNA, 2178 bp, synthetic construct
  source 1..2178: mol_type = other DNA
atggccttaccagtgaccgccttgctcctgccgctggccttgctgctccacgccgccaggccggacatccagatgacacagagccctagcagcctgtctgccagcgtgggagacagagtgaccatcacatgcaaggccagcgaccacatcaacaactggctggcctggtatcagcagaagcctggacaggcccctaagctgctgatctacggcgctaccacactggaaacaggcgtgcccagcagattttctggcagcggctctggcaccgactacaccctgacaatatccagcctccagcctgaggacttcgccacctactactgtcagcagagctggaacaccccttggacattcggccagggcaccaagctggaaatcaagagactcgaggacctgaagaacgtgttcccacctgaggtggccgtgttcgagcctagcgaggccgagatcagccacacccagaaagccaccctcgtgtgcctggctaccggcttctaccccgaccatgtggaactgtcttggtgggtcaacggcaaagaggtgcacagcggcgtgtctaccgacccccagccactgaaagaacagcccgccctgaacgacagccggtactgcctgagcagcagactgagagtgtccgccaccttctggcagaacccccggaaccacttcagatgccaggtgcagttctacggcctgagcgagaacgacgagtggacccaggacagagccaagcccgtgacccagatcgtgtctgccgaagcctggggcagagccgatgatgtgattaagatccactggcaggaaaagaagtccaacaccatcctgggcagccaggaaggcaacaccatgaagaccaacgacacctacatgaagttcagctggctgaccgtgcccgagaagtccctggacaaagaacacagatgcatcgtgcggcacgaaaacaacaagaacggcgtggaccaggaaatcatcttcccacccatcaagaccgatgtgattacaatggaccccaaggacaactgctccaaggacgccaacgataccctgctgctccagctgaccaacaccagcgcctactacatgtacttgttgctgctgctgaagtccgtggtgtacttcgccatcatcacatgctgcctgctgatggctatggtcaagcggaaggacagccggggaagggccaagcgatctggatctggagcaacaaacttctcactactcaaacaagcaggtgacgtggaggagaatcccgggcctactagtatggactggatttggcgcatccttttccttgtcggcgctgctaccggcgcgcattccttcgaacaagttcagcttcaacagcctggcgctgagctggtcaaacctggcgcttctgtgaagatgagctgcaaagccagcggctacaccttcagcagctactggatcaactggatgaagcagaaacccggccagggactcgaatggatcggccaaatctatcccggcgacggcgacaccaactacaacggcaagttcaagggcagagccacactgaccgccgatacctctagcagcacagcctacatgcagctgagcagcctgaccagcgaagatagcgccgtgtacttctgtgcccggtccatcacaacagtcgtgggctgcgctatggactattggggccagggaacaagcgtgaccgtgtctagtacgcgtatccagaaccctgatcctgccgtgtaccagctgcgggatagcaagagcagcgacaagagcgtgtgtctgttcaccgacttcgacagccagaccaacgtgtcccagagcaaggactccgacgtgtacatcaccgataagaccgtgctggacatgcggagcatggacttcaagagcaactccgccgtggcctggtccaacaagtccgatttcgcctgcgccaacgccttcaacaacagcattatccccgaggacacattcttcccaagccccgagagcagcgactccaccgaccacgtgaagcccaaagagacagagaacaccaagcagcccagcaagagctgccacaagcccaaggccatcgtgcacaccgagaaagtgaacatgatgagcctgaccgtgctgggcctgcggatgctgttcgccaaaaccgtggccgtgaacttcctgctgaccgccaagctgttcttcctcctcaccgcc

SEQ ID NO: 33964 - DNA, 2172 bp, synthetic construct
  source 1..2172: mol_type = other DNA
atggccttaccagtgaccgccttgctcctgccgctggccttgctgctccacgccgccaggccggacatccagatgacacagagccctagcagcctgtctgccagcgtgggagacagagtgaccatcacatgcaaggccagcgaccacatcaacaactggctggcctggtatcagcagaagcctggacaggcccctaagctgctgatctacggcgctaccacactggaaacaggcgtgcccagcagattttctggcagcggctctggcaccgactacaccctgacaatatccagcctccagcctgaggacttcgccacctactactgtcagcagagctggaacaccccttggacattcggccagggcaccaagctggaaatcaagagactcgaggacctgaagaacgtgttcccacctgaggtggccgtgttcgagcctagcgaggccgagatcagccacacccagaaagccaccctcgtgtgcctggctaccggcttctaccccgaccatgtggaactgtcttggtgggtcaacggcaaagaggtgcacagcggcgtgtctaccgacccccagccactgaaagaacagcccgccctgaacgacagccggtactgcctgagcagcagactgagagtgtccgccaccttctggcagaacccccggaaccacttcagatgccaggtgcagttctacggcctgagcgagaacgacgagtggacccaggacagagccaagcccgtgacccagatcgtgtctgccgaagcctggggcagagccgatgatgtgattaagatccactggcaggaaaagaagtccaacaccatcctgggcagccaggaaggcaacaccatgaagaccaacgacacctacatgaagttcagctggctgaccgtgcccgagaagtccctggacaaagaacacagatgcatcgtgcggcacgaaaacaacaagaacggcgtggaccaggaaatcatcttcccacccatcaagaccgatgtgattacaatggaccccaaggacaactgctccaaggacgccaacgataccctgctgctccagctgaccaacaccagcgcctactacatgtacttgttgctgctgctgaagtccgtggtgtacttcgccatcatcacatgctgcctgctgcggagaaccgccttctgctgcaacggcgagaagtctagggccaagcgatctggatctggagcaacaaacttctcactactcaaacaagcaggtgacgtggaggagaatcccgggcctactagtatggactggatttggcgcatccttttccttgtcggcgctgctaccggcgcgcattccttcgaacaagttcagcttcaacagcctggcgctgagctggtcaaacctggcgcttctgtgaagatgagctgcaaagccagcggctacaccttcagcagctactggatcaactggatgaagcagaaacccggccagggactcgaatggatcggccaaatctatcccggcgacggcgacaccaactacaacggcaagttcaagggcagagccacactgaccgccgatacctctagcagcacagcctacatgcagctgagcagcctgaccagcgaagatagcgccgtgtacttctgtgcccggtccatcacaacagtcgtgggctgcgctatggactattggggccagggaacaagcgtgaccgtgtctagtacgcgtatccagaaccctgatcctgccgtgtaccagctgcgggatagcaagagcagcgacaagagcgtgtgtctgttcaccgacttcgacagccagaccaacgtgtcccagagcaaggactccgacgtgtacatcaccgataagaccgtgctggacatgcggagcatggacttcaagagcaactccgccgtggcctggtccaacaagtccgatttcgcctgcgccaacgccttcaacaacagcattatccccgaggacacattcttcccaagccccgagagcagcgactccaccgaccacgtgaagcccaaagagacagagaacaccaagcagcccagcaagagctgccacaagcccaaggccatcgtgcacaccgagaaagtgaacatgatgagcctgaccgtgctgggcctgcggatgctgttcgccaaaaccgtggccgtgaacttcctgctgaccgccaagctgttcttcctc

SEQ ID NO: 33965 - DNA, 2604 bp, synthetic construct
  source 1..2604: mol_type = other DNA
atggccttaccagtgaccgccttgctcctgccgctggccttgctgctccacgccgccaggccgctcgaggaggacctgaagaacgtgttcccacctgaggtggccgtgttcgagcctagcgaggccgagatcagccacacccagaaagccaccctcgtgtgcctggctaccggcttctaccccgaccatgtggaactgtcttggtgggtcaacggcaaagaggtgcacagcggcgtgtgtaccgacccccagccactgaaagaacagcccgccctgaacgacagccggtactgcctgagcagcagactgagagtgtccgccaccttctggcagaacccccggaaccacttcagatgccaggtgcagttctacggcctgagcgagaacgacgagtggacccaggacagagccaagcccgtgacccagatcgtgtctgccgaagcctggggcagagccgattgcggctttaccagcgagagctaccagcagggcgtgctgagcgccaccaacctgagcgtgatcggcttcagaatcctgctgctgaaagtggccggctttaacctgctgatgaccctgcggctgtggtccagcagggccaagcgatctggatctggagcaacaaacttctcactactcaaacaagcaggtgacgtggaggagaatcccgggcctactagcatggccttaccagtgaccgccttgctcctgccgctggccttgctgctccacgccgccaggccggacatccagatgacacagagccctagcagcctgtctgccagcgtgggagacagagtgaccatcacatgcaaggccagcgaccacatcaacaactggctggcctggtatcagcagaagcctggacaggcccctaagctgctgatctacggcgctaccacactggaaacaggcgtgcccagcagattttctggcagcggctctggcaccgactacaccctgacaatatccagcctccagcctgaggacttcgccacctactactgtcagcagagctggaacaccccttggacattcggccagggcaccaagctggaaatcaagagaggcggaggcggaagtggaggcggaggatctggcggcggaggctctcaagttcagcttcaacagcctggcgctgagctggtcaaacctggcgcttctgtgaagatgagctgcaaagccagcggctacaccttcagcagctactggatcaactggatgaagcagaaacccggccagggactcgaatggatcggccaaatctatcccggcgacggcgacaccaactacaacggcaagttcaagggcagagccacactgaccgccgatacctctagcagcacagcctacatgcagctgagcagcctgaccagcgaagatagcgccgtgtacttctgtgcccggtccatcacaacagtcgtgggctgcgctatggactattggggccagggaacaagcgtgaccgtgtctagtacgcgtatccagaaccctgatcctgccgtgtaccagctgcgggatagcaagagcagcgacaagagcgtgtgtctgttcaccgacttcgacagccagaccaacgtgtcccagagcaaggactccgacgtgtacatcaccgataagtgcgtgctggacatgcggagcatggacttcaagagcaactccgccgtggcctggtccaacaagtccgatttcgcctgcgccaacgccttcaacaacagcattatccccgaggacacattcttcccaagccccgagagcagctgcgacgtgaagctggtggaaaagagcttcgagacagacaccaacctgaacttccagatcctgtacgaggtgatcggcttcagaatcctgctgctgaaagtggccggctttaacctgctgatgaccctgcggctgtggtccagccgcgccaagagaagcggatctggcgtgaagcagaccctgaatttcgacctgctgaagctggctggcgacgtggaatccaacccaggcccttctagaggccatatgaccgagtacaagcccacggtgcgcctcgccacccgcgacgacgtccccagggccgtacgcaccctcgccgccgcgttcgccgactaccccgccacgcgccacaccgtcgatccggaccgccacatcgagcgggtcaccgagctgcaagaactcttcctcacgcgcgtcgggctcgacatcggcaaggtgtgggtcgcggacgacggcgccgcggtggcggtctggaccacgccggagagcgtcgaagcgggggcggtgttcgccgagatcggcccgcgcatggccgagttgagcggttcccggctggccgcgcagcaacagatggaaggcctcctggcgccgcaccggcccaaggagcccgcgtggttcctggccaccgtcggcgtctcgcccgaccaccagggcaagggtctgggcagcgccgtcgtgctccccggagtggaggcggccgagcgcgccggggtgcccgccttcctggagacctccgcgccccgcaacctccccttctacgagcggctcggcttcaccgtcaccgccgacgtcgaggtgcccgaaggaccgcgcacctggtgcatgacccgcaagcccggtgcctga

SEQ ID NO: 33966 - DNA, 2604 bp, synthetic construct
  source 1..2604: mol_type = other DNA
atggccttaccagtgaccgccttgctcctgccgctggccttgctgctccacgccgccaggccgctcgagatccagaaccctgatcctgccgtgtaccagctgcgggatagcaagagcagcgacaagagcgtgtgtctgttcaccgacttcgacagccagaccaacgtgtcccagagcaaggactccgacgtgtacatcaccgataagtgcgtgctggacatgcggagcatggacttcaagagcaactccgccgtggcctggtccaacaagtccgatttcgcctgcgccaacgccttcaacaacagcattatccccgaggacacattcttcccaagccccgagagcagctgcgacgtgaagctggtggaaaagagcttcgagacagacaccaacctgaacttccagatcctgtacgaggtgatcggcttcagaatcctgctgctgaaagtggccggctttaacctgctgatgaccctgcggctgtggtccagcagggccaagcgatctggatctggagcaacaaacttctcactactcaaacaagcaggtgacgtggaggagaatcccgggcctactagcatggccttaccagtgaccgccttgctcctgccgctggccttgctgctccacgccgccaggccggacatccagatgacacagagccctagcagcctgtctgccagcgtgggagacagagtgaccatcacatgcaaggccagcgaccacatcaacaactggctggcctggtatcagcagaagcctggacaggcccctaagctgctgatctacggcgctaccacactggaaacaggcgtgcccagcagattttctggcagcggctctggcaccgactacaccctgacaatatccagcctccagcctgaggacttcgccacctactactgtcagcagagctggaacaccccttggacattcggccagggcaccaagctggaaatcaagagaggcggaggcggaagtggaggcggaggatctggcggcggaggctctcaagttcagcttcaacagcctggcgctgagctggtcaaacctggcgcttctgtgaagatgagctgcaaagccagcggctacaccttcagcagctactggatcaactggatgaagcagaaacccggccagggactcgaatggatcggccaaatctatcccggcgacggcgacaccaactacaacggcaagttcaagggcagagccacactgaccgccgatacctctagcagcacagcctacatgcagctgagcagcctgaccagcgaagatagcgccgtgtacttctgtgcccggtccatcacaacagtcgtgggctgcgctatggactattggggccagggaacaagcgtgaccgtgtctagtacgcgtgaggacctgaagaacgtgttcccacctgaggtggccgtgttcgagcctagcgaggccgagatcagccacacccagaaagccaccctcgtgtgcctggctaccggcttctaccccgaccatgtggaactgtcttggtgggtcaacggcaaagaggtgcacagcggcgtgtgtaccgacccccagccactgaaagaacagcccgccctgaacgacagccggtactgcctgagcagcagactgagagtgtccgccaccttctggcagaacccccggaaccacttcagatgccaggtgcagttctacggcctgagcgagaacgacgagtggacccaggacagagccaagcccgtgacccagatcgtgtctgccgaagcctggggcagagccgattgcggctttaccagcgagagctaccagcagggcgtgctgagcgccaccaacctgagcgtgatcggcttcagaatcctgctgctgaaagtggccggctttaacctgctgatgaccctgcggctgtggtccagccgcgccaagagaagcggatctggcgtgaagcagaccctgaatttcgacctgctgaagctggctggcgacgtggaatccaacccaggcccttctagaggccatatgaccgagtacaagcccacggtgcgcctcgccacccgcgacgacgtccccagggccgtacgcaccctcgccgccgcgttcgccgactaccccgccacgcgccacaccgtcgatccggaccgccacatcgagcgggtcaccgagctgcaagaactcttcctcacgcgcgtcgggctcgacatcggcaaggtgtgggtcgcggacgacggcgccgcggtggcggtctggaccacgccggagagcgtcgaagcgggggcggtgttcgccgagatcggcccgcgcatggccgagttgagcggttcccggctggccgcgcagcaacagatggaaggcctcctggcgccgcaccggcccaaggagcccgcgtggttcctggccaccgtcggcgtctcgcccgaccaccagggcaagggtctgggcagcgccgtcgtgctccccggagtggaggcggccgagcgcgccggggtgcccgccttcctggagacctccgcgccccgcaacctccccttctacgagcggctcggcttcaccgtcaccgccgacgtcgaggtgcccgaaggaccgcgcacctggtgcatgacccgcaagcccggtgcctga

SEQ ID NO: 33967 - DNA, 2604 bp, synthetic construct; identical to SEQ ID NO: 33965
  source 1..2604: mol_type = other DNA

SEQ ID NO: 33968 - DNA, 2928 bp, synthetic construct
  source 1..2928: mol_type = other DNA
atggccttaccagtgaccgccttgctcctgccgctggccttgctgctccacgccgccaggccgctcgaggaggacctgaagaacgtgttcccacctgaggtggccgtgttcgagcctagcgaggccgagatcagccacacccagaaagccaccctcgtgtgcctggctaccggcttctaccccgaccatgtggaactgtcttggtgggtcaacggcaaagaggtgcacagcggcgtgtctaccgacccccagccactgaaagaacagcccgccctgaacgacagccggtactgcctgagcagcagactgagagtgtccgccaccttctggcagaacccccggaaccacttcagatgccaggtgcagttctacggcctgagcgagaacgacgagtggacccaggacagagccaagcccgtgacccagatcgtgtctgccgaagcctggggcagagccgatgatgtgattaagatccactggcaggaaaagaagtccaacaccatcctgggcagccaggaaggcaacaccatgaagaccaacgacacctacatgaagttcagctggctgaccgtgcccgagaagtccctggacaaagaacacagatgcatcgtgcggcacgaaaacaacaagaacggcgtggaccaggaaatcatcttcccacccatcaagaccgatgtgattacaatggaccccaaggacaactgctccaaggacgccaacgataccctgctgctccagctgaccaacaccagcgcctactacatgtacttgttgctgctgctgaagtccgtggtgtacttcgccatcatcacatgctgcctgctgatggctatggtcaagcggaaggacagccggggaagggccaagcgatctggatctggagcaacaaacttctcactactcaaacaagcaggtgacgtggaggagaatcccgggcctactagcatggccttaccagtgaccgccttgctcctgccgctggccttgctgctccacgccgccaggccggacatccagatgacacagagccctagcagcctgtctgccagcgtgggagacagagtgaccatcacatgcaaggccagcgaccacatcaacaactggctggcctggtatcagcagaagcctggacaggcccctaagctgctgatctacggcgctaccacactggaaacaggcgtgcccagcagattttctggcagcggctctggcaccgactacaccctgacaatatccagcctccagcctgaggacttcgccacctactactgtcagcagagctggaacaccccttggacattcggccagggcaccaagctggaaatcaagagaggcggaggcggaagtggaggcggaggatctggcggcggaggctctcaagttcagcttcaacagcctggcgctgagctggtcaaacctggcgcttctgtgaagatgagctgcaaagccagcggctacaccttcagcagctactggatcaactggatgaagcagaaacccggccagggactcgaatggatcggccaaatctatcccggcgacggcgacaccaactacaacggcaagttcaagggcagagccacactgaccgccgatacctctagcagcacagcctacatgcagctgagcagcctgaccagcgaagatagcgccgtgtacttctgtgcccggtccatcacaacagtcgtgggctgcgctatggactattggggccagggaacaagcgtgaccgtgtctagtacgcgtatccagaaccctgatcctgccgtgtaccagctgcgggatagcaagagcagcgacaagagcgtgtgtctgttcaccgacttcgacagccagaccaacgtgtcccagagcaaggactccgacgtgtacatcaccgataagaccgtgctggacatgcggagcatggacttcaagagcaactccgccgtggcctggtccaacaagtccgatttcgcctgcgccaacgccttcaacaacagcattatccccgaggacacattcttcccaagccccgagagcagcgactccaccgaccacgtgaagcccaaagagacagagaacaccaagcagcccagcaagagctgccacaagcccaaggccatcgtgcacaccgagaaagtgaacatgatgagcctgaccgtgctgggcctgcggatgctgttcgccaaaaccgtggccgtgaacttcctgctgaccgccaagctgttcttcctcctcaccgcccgcgccaagagaagcggatctggcgtgaagcagaccctgaatttcgacctgctgaagctggctggcgacgtggaatccaacccaggcccttctagaggccatatgaccgagtacaagcccacggtgcgcctcgccacccgcgacgacgtccccagggccgtacgcaccctcgccgccgcgttcgccgactaccccgccacgcgccacaccgtcgatccggaccgccacatcgagcgggtcaccgagctgcaagaactcttcctcacgcgcgtcgggctcgacatcggcaaggtgtgggtcgcggacgacggcgccgcggtggcggtctggaccacgccggagagcgtcgaagcgggggcggtgttcgccgagatcggcccgcgcatggccgagttgagcggttcccggctggccgcgcagcaacagatggaaggcctcctggcgccgcaccggcccaaggagcccgcgtggttcctggccaccgtcggcgtctcgcccgaccaccagggcaagggtctgggcagcgccgtcgtgctccccggagtggaggcggccgagcgcgccggggtgcccgccttcctggagacctccgcgccccgcaacctccccttctacgagcggctcggcttcaccgtcaccgccgacgtcgaggtgcccgaaggaccgcgcacctggtgcatgacccgcaagcccggtgcctga

SEQ ID NO: 33969 - DNA, 2928 bp, synthetic construct
  source 1..2928: mol_type = other DNA
atggccttaccagtgaccgccttgctcctgccgctggccttgctgctccacgccgccaggccgctcgagatccagaaccctgatcctgccgtgtaccagctgcgggatagcaagagcagcgacaagagcgtgtgtctgttcaccgacttcgacagccagaccaacgtgtcccagagcaaggactccgacgtgtacatcaccgataagaccgtgctggacatgcggagcatggacttcaagagcaactccgccgtggcctggtccaacaagtccgatttcgcctgcgccaacgccttcaacaacagcattatccccgaggacacattcttcccaagccccgagagcagcgactccaccgaccacgtgaagcccaaagagacagagaacaccaagcagcccagcaagagctgccacaagcccaaggccatcgtgcacaccgagaaagtgaacatgatgagcctgaccgtgctgggcctgcggatgctgttcgccaaaaccgtggccgtgaacttcctgctgaccgccaagctgttcttcctcctcaccgccagggccaagcgatctggatctggagcaacaaacttctcactactcaaacaagcaggtgacgtggaggagaatcccgggcctactagcatggccttaccagtgaccgccttgctcctgccgctggccttgctgctccacgccgccaggccggacatccagatgacacagagccctagcagcctgtctgccagcgtgggagacagagtgaccatcacatgcaaggccagcgaccacatcaacaactggctggcctggtatcagcagaagcctggacaggcccctaagctgctgatctacggcgctaccacactggaaacaggcgtgcccagcagattttctggcagcggctctggcaccgactacaccctgacaatatccagcctccagcctgaggacttcgccacctactactgtcagcagagctggaacaccccttggacattcggccagggcaccaagctggaaatcaagagaggcggaggcggaagtggaggcggaggatctggcggcggaggctctcaagttcagcttcaacagcctggcgctgagctggtcaaacctggcgcttctgtgaagatgagctgcaaagccagcggctacaccttcagcagctactggatcaactggatgaagcagaaacccggccagggactcgaatggatcggccaaatctatcccggcgacggcgacaccaactacaacggcaagttcaagggcagagccacactgaccgccgatacctctagcagcacagcctacatgcagctgagcagcctgaccagcgaagatagcgccgtgtacttctgtgcccggtccatcacaacagtcgtgggctgcgctatggactattggggccagggaacaagcgtgaccgtgtctagtacgcgtgaggacctgaagaacgtgttcccacctgaggtggccgtgttcgagcctagcgaggccgagatcagccacacccagaaagccaccctcgtgtgcctggctaccggcttctaccccgaccatgtggaactgtcttggtgggtcaacggcaaagaggtgcacagcggcgtgtctaccgacccccagccactgaaagaacagcccgccctgaacgacagccggtactgcctgagcagcagactgagagtgtccgccaccttctggcagaacccccggaaccacttcagatgccaggtgcagttctacggcctgagcgagaacgacgagtggacccaggacagagccaagcccgtgacccagatcgtgtctgccgaagcctggggcagagccgatgatgtgattaagatccactggcaggaaaagaagtccaacaccatcctgggcagccaggaaggcaacaccatgaagaccaacgacacctacatgaagttcagctggctgaccgtgcccgagaagtccctggacaaagaacacagatgcatcgtgcggcacgaaaacaacaagaacggcgtggaccaggaaatcatcttcccacccatcaagaccgatgtgattacaatggaccccaaggacaactgctccaaggacgccaacgataccctgctgctccagctgaccaacaccagcgcctactacatgtacttgttgctgctgctgaagtccgtggtgtacttcgccatcatcacatgctgcctgctgatggctatggtcaagcggaaggacagccggggacgcgccaagagaagcggatctggcgtgaagcagaccctgaatttcgacctgctgaagctggctggcgacgtggaatccaacccaggcccttctagaggccatatgaccgagtacaagcccacggtgcgcctcgccacccgcgacgacgtccccagggccgtacgcaccctcgccgccgcgttcgccgactaccccgccacgcgccacaccgtcgatccggaccgccacatcgagcgggtcaccgagctgcaagaactcttcctcacgcgcgtcgggctcgacatcggcaaggtgtgggtcgcggacgacggcgccgcggtggcggtctggaccacgccggagagcgtcgaagcgggggcggtgttcgccgagatcggcccgcgcatggccgagttgagcggttcccggctggccgcgcagcaacagatggaaggcctcctggcgccgcaccggcccaaggagcccgcgtggttcctggccaccgtcggcgtctcgcccgaccaccagggcaagggtctgggcagcgccgtcgtgctccccggagtggaggcggccgagcgcgccggggtgcccgccttcctggagacctccgcgccccgcaacctccccttctacgagcggctcggcttcaccgtcaccgccgacgtcgaggtgcccgaaggaccgcgcacctggtgcatgacccgcaagcccggtgcctga

SEQ ID NO: 33970 - DNA, 2922 bp, synthetic construct
  source 1..2922: mol_type = other DNA
atggccttaccagtgaccgccttgctcctgccgctggccttgctgctccacgccgccaggccgctcgaggaggacctgaagaacgtgttcccacctgaggtggccgtgttcgagcctagcgaggccgagatcagccacacccagaaagccaccctcgtgtgcctggctaccggcttctaccccgaccatgtggaactgtcttggtgggtcaacggcaaagaggtgcacagcggcgtgtgtaccgacccccagccactgaaagaacagcccgccctgaacgacagccggtactgcctgagcagcagactgagagtgtccgccaccttctggcagaacccccggaaccacttcagatgccaggtgcagttctacggcctgagcgagaacgacgagtggacccaggacagagccaagcccgtgacccagatcgtgtctgccgaagcctggggcagagccgatgatgtgattaagatccactggcaggaaaagaagtccaacaccatcctgggcagccaggaaggcaacaccatgaagaccaacgacacctacatgaagttcagctggctgaccgtgcccgagaagtccctggacaaagaacacagatgcatcgtgcggcacgaaaacaacaagaacggcgtggaccaggaaatcatcttcccacccatcaagaccgatgtgattacaatggaccccaaggacaactgctccaaggacgccaacgataccctgctgctccagctgaccaacaccagcgcctactacatgtacttgttgctgctgctgaagtccgtggtgtacttcgccatcatcacatgctgcctgctgcggagaaccgccttctgctgcaacggcgagaagtctagggccaagcgatctggatctggagcaacaaacttctcactactcaaacaagcaggtgacgtggaggagaatcccgggcctactagcatggccttaccagtgaccgccttgctcctgccgctggccttgctgctccacgccgccaggccggacatccagatgacacagagccctagcagcctgtctgccagcgtgggagacagagtgaccatcacatgcaaggccagcgaccacatcaacaactggctggcctggtatcagcagaagcctggacaggcccctaagctgctgatctacggcgctaccacactggaaacaggcgtgcccagcagattttctggcagcggctctggcaccgactacaccctgacaatatccagcctccagcctgaggacttcgccacctactactgtcagcagagctggaacaccccttggacattcggccagggcaccaagctggaaatcaagagaggcggaggcggaagtggaggcggaggatctggcggcggaggctctcaagttcagcttcaacagcctggcgctgagctggtcaaacctggcgcttctgtgaagatgagctgcaaagccagcggctacaccttcagcagctactggatcaactggatgaagcagaaacccggccagggactcgaatggatcggccaaatctatcccggcgacggcgacaccaactacaacggcaagttcaagggcagagccacactgaccgccgatacctctagcagcacagcctacatgcagctgagcagcctgaccagcgaagatagcgccgtgtacttctgtgcccggtccatcacaacagtcgtgggctgcgctatggactattggggccagggaacaagcgtgaccgtgtctagtacgcgtatccagaaccctgatcctgccgtgtaccagctgcgggatagcaagagcagcgacaagagcgtgtgtctgttcaccgacttcgacagccagaccaacgtgtcccagagcaaggactccgacgtgtacatcaccgataagtgcgtgctggacatgcggagcatggacttcaagagcaactccgccgtggcctggtccaacaagtccgatttcgcctgcgccaacgccttcaacaacagcattatccccgaggacacattcttcccaagccccgagagcagcgactccaccgaccacgtgaagcccaaagagacagagaacaccaagcagcccagcaagagctgccacaagcccaaggccatcgtgcacaccgagaaagtgaacatgatgagcctgaccgtgctgggcctgcggatgctgttcgccaaaaccgtggccgtgaacttcctgctgaccgccaagctgttcttcctccgcgccaagagaagcggatctggcgtgaagcagaccctgaatttcgacctgctgaagctggctggcgacgtggaatccaacccaggcccttctagaggccatatgaccgagtacaagcccacggtgcgcctcgccacccgcgacgacgtccccagggccgtacgcaccctcgccgccgcgttcgccgactaccccgccacgcgccacaccgtcgatccggaccgccacatcgagcgggtcaccgagctgcaagaactcttcctcacgcgcgtcgggctcgacatcggcaaggtgtgggtcgcggacgacggcgccgcggtggcggtctggaccacgccggagagcgtcgaagcgggggcggtgttcgccgagatcggcccgcgcatggccgagttgagcggttcccggctggccgcgcagcaacagatggaaggcctcctggcgccgcaccggcccaaggagcccgcgtggttcctggccaccgtcggcgtctcgcccgaccaccagggcaagggtctgggcagcgccgtcgtgctccccggagtggaggcggccgagcgcgccggggtgcccgccttcctggagacctccgcgccccgcaacctccccttctacgagcggctcggcttcaccgtcaccgccgacgtcgaggtgcccgaaggaccgcgcacctggtgcatgacccgcaagcccggtgcctga

SEQ ID NO: 33971 - DNA, 2922 bp, synthetic construct
  source 1..2922: mol_type = other DNA
atggccttaccagtgaccgccttgctcctgccgctggccttgctgctccacgccgccaggccgctcgagatccagaaccctgatcctgccgtgtaccagctgcgggatagcaagagcagcgacaagagcgtgtgtctgttcaccgacttcgacagccagaccaacgtgtcccagagcaaggactccgacgtgtacatcaccgataagtgcgtgctggacatgcggagcatggacttcaagagcaactccgccgtggcctggtccaacaagtccgatttcgcctgcgccaacgccttcaacaacagcattatccccgaggacacattcttcccaagccccgagagcagcgactccaccgaccacgtgaagcccaaagagacagagaacaccaagcagcccagcaagagctgccacaagcccaaggccatcgtgcacaccgagaaagtgaacatgatgagcctgaccgtgctgggcctgcggatgctgttcgccaaaaccgtggccgtgaacttcctgctgaccgccaagctgttcttcctcagggccaagcgatctggatctggagcaacaaacttctcactactcaaacaagcaggtgacgtggaggagaatcccgggcctactagcatggccttaccagtgaccgccttgctcctgccgctggccttgctgctccacgccgccaggccggacatccagatgacacagagccctagcagcctgtctgccagcgtgggagacagagtgaccatcacatgcaaggccagcgaccacatcaacaactggctggcctggtatcagcagaagcctggacaggcccctaagctgctgatctacggcgctaccacactggaaacaggcgtgcccagcagattttctggcagcggctctggcaccgactacaccctgacaatatccagcctccagcctgaggacttcgccacctactactgtcagcagagctggaacaccccttggacattcggccagggcaccaagctggaaatcaagagaggcggaggcggaagtggaggcggaggatctggcggcggaggctctcaagttcagcttcaacagcctggcgctgagctggtcaaacctggcgcttctgtgaagatgagctgcaaagccagcggctacaccttcagcagctactggatcaactggatgaagcagaaacccggccagggactcgaatggatcggccaaatctatcccggcgacggcgacaccaactacaacggcaagttcaagggcagagccacactgaccgccgatacctctagcagcacagcctacatgcagctgagcagcctgaccagcgaagatagcgccgtgtacttctgtgcccggtccatcacaacagtcgtgggctgcgctatggactattggggccagggaacaagcgtgaccgtgtctagtacgcgtgaggacctgaagaacgtgttcccacctgaggtggccgtgttcgagcctagcgaggccgagatcagccacacccagaaagccaccctcgtgtgcctggctaccggcttctaccccgaccatgtggaactgtcttggtgggtcaacggcaaagaggtgcacagcggcgtgtgtaccgacccccagccactgaaagaacagcccgccctgaacgacagccggtactgcctgagcagcagactgagagtgtccgccaccttctggcagaacccccggaaccacttcagatgccaggtgcagttctacggcctgagcgagaacgacgagtggacccaggacagagccaagcccgtgacccagatcgtgtctgccgaagcctggggcagagccgatgatgtgattaagatccactggcaggaaaagaagtccaacaccatcctgggcagccaggaaggcaacaccatgaagaccaacgacacctacatgaagttcagctggctgaccgtgcccgagaagtccctggacaaagaacacagatgcatcgtgcggcacgaaaacaacaagaacggcgtggaccaggaaatcatcttcccacccatcaagaccgatgtgattacaatggaccccaaggacaactgctccaaggacgccaacgataccctgctgctccagctgaccaacaccagcgcctactacatgtacttgttgctgctgctgaagtccgtggtgtacttcgccatcatcacatgctgcctgctgcggagaaccgccttctgctgcaacggcgagaagtctcgcgccaagagaagcggatctggcgtgaagcagaccctgaatttcgacctgctgaagctggctggcgacgtggaatccaacccaggcccttctagaggccatatgaccgagtacaagcccacggtgcgcctcgccacccgcgacgacgtccccagggccgtacgcaccctcgccgccgcgttcgccgactaccccgccacgcgccacaccgtcgatccggaccgccacatcgagcgggtcaccgagctgcaagaactcttcctcacgcgcgtcgggctcgacatcggcaaggtgtgggtcgcggacgacggcgccgcggtggcggtctggaccacgccggagagcgtcgaagcgggggcggtgttcgccgagatcggcccgcgcatggccgagttgagcggttcccggctggccgcgcagcaacagatggaaggcctcctggcgccgcaccggcccaaggagcccgcgtggttcctggccaccgtcggcgtctcgcccgaccaccagggcaagggtctgggcagcgccgtcgtgctccccggagtggaggcggccgagcgcgccggggtgcccgccttcctggagacctccgcgccccgcaacctccccttctacgagcggctcggcttcaccgtcaccgccgacgtcgaggtgcccgaaggaccgcgcacctggtgcatgacccgcaagcccggtgcctga

SEQ ID NO: 33972 - DNA, 2922 bp, synthetic construct
  source 1..2922: mol_type = other DNA
atggccttaccagtgaccgccttgctcctgccgctggccttgctgctccacgccgccaggccgctcgaggaggacctgaagaacgtgttcccacctgaggtggccgtgttcgagcctagcgaggccgagatcagccacacccagaaagccaccctcgtgtgcctggctaccggcttctaccccgaccatgtggaactgtcttggtgggtcaacggcaaagaggtgcacagcggcgtgtctaccgacccccagccactgaaagaacagcccgccctgaacgacagccggtactgcctgagcagcagactgagagtgtccgccaccttctggcagaacccccggaaccacttcagatgccaggtgcagttctacggcctgagcgagaacgacgagtggacccaggacagagccaagcccgtgacccagatcgtgtctgccgaagcctggggcagagccgatgatgtgattaagatccactggcaggaaaagaagtccaacaccatcctgggcagccaggaaggcaacaccatgaagaccaacgacacctacatgaagttcagctggctgaccgtgcccgagaagtccctggacaaagaacacagatgcatcgtgcggcacgaaaacaacaagaacggcgtggaccaggaaatcatcttcccacccatcaagaccgatgtgattacaatggaccccaaggacaactgctccaaggacgccaacgataccctgctgctccagctgaccaacaccagcgcctactacatgtacttgttgctgctgctgaagtccgtggtgtacttcgccatcatcacatgctgcctgctgcggagaaccgccttctgctgcaacggcgagaagtctagggccaagcgatctggatctggagcaacaaacttctcactactcaaacaagcaggtgacgtggaggagaatcccgggcctactagcatggccttaccagtgaccgccttgctcctgccgctggccttgctgctccacgccgccaggccggacatccagatgacacagagccctagcagcctgtctgccagcgtgggagacagagtgaccatcacatgcaaggccagcgaccacatcaacaactggctggcctggtatcagcagaagcctggacaggcccctaagctgctgatctacggcgctaccacactggaaacaggcgtgcccagcagattttctggcagcggctctggcaccgactacaccctgacaatatccagcctccagcctgaggacttcgccacctactactgtcagcagagctggaacaccccttggacattcggccagggcaccaagctggaaatcaagagaggcggaggcggaagtggaggcggaggatctggcggcggaggctctcaagttcagcttcaacagcctggcgctgagctggtcaaacctggcgcttctgtgaagatgagctgcaaagccagcggctacaccttcagcagctactggatcaactggatgaagcagaaacccggccagggactcgaatggatcggccaaatctatcccggcgacggcgacaccaactacaacggcaagttcaagggcagagccacactgaccgccgatacctctagcagcacagcctacatgcagctgagcagcctgaccagcgaagatagcgccgtgtacttctgtgcccggtccatcacaacagtcgtgggctgcgctatggactattggggccagggaacaagcgtgaccgtgtctagtacgcgtatccagaaccctgatcctgccgtgtaccagctgcgggatagcaagagcagcgacaagagcgtgtgtctgttcaccgacttcgacagccagaccaacgtgtcccagagcaaggactccgacgtgtacatcaccgataagaccgtgctggacatgcggagcatggacttcaagagcaactccgccgtggcctggtccaacaagtccgatttcgcctgcgccaacgccttcaacaacagcattatccccgaggacacattcttcccaagccccgagagcagcgactccaccgaccacgtgaagcccaaagagacagagaacaccaagcagcccagcaagagctgccacaagcccaaggccatcgtgcacaccgagaaagtgaacatgatgagcctgaccgtgctgggcctgcggatgctgttcgccaaaaccgtggccgtgaacttcctgctgaccgccaagctgttcttcctccgcgccaagagaagcggatctggcgtgaagcagaccctgaatttcgacctgctgaagctggctggcgacgtggaatccaacccaggcccttctagaggccatatgaccgagtacaagcccacggtgcgcctcgccacccgcgacgacgtccccagggccgtacgcaccctcgccgccgcgttcgccgactaccccgccacgcgccacaccgtcgatccggaccgccacatcgagcgggtcaccgagctgcaagaactcttcctcacgcgcgtcgggctcgacatcggcaaggtgtgggtcgcggacgacggcgccgcggtggcggtctggaccacgccggagagcgtcgaagcgggggcggtgttcgccgagatcggcccgcgcatggccgagttgagcggttcccggctggccgcgcagcaacagatggaaggcctcctggcgccgcaccggcccaaggagcccgcgtggttcctggccaccgtcggcgtctcgcccgaccaccagggcaagggtctgggcagcgccgtcgtgctccccggagtggaggcggccgagcgcgccggggtgcccgccttcctggagacctccgcgccccgcaacctccccttctacgagcggctcggcttcaccgtcaccgccgacgtcgaggtgcccgaaggaccgcgcacctggtgcatgacccgcaagcccggtgcctga

SEQ ID NO: 33973 - DNA, 2922 bp, synthetic construct
  source 1..2922: mol_type = other DNA
atggccttaccagtgaccgccttgctcctgccgctggccttgctgctccacgccgccaggccgctcgagatccagaaccctgatcctgccgtgtaccagctgcgggatagcaagagcagcgacaagagcgtgtgtctgttcaccgacttcgacagccagaccaacgtgtcccagagcaaggactccgacgtgtacatcaccgataagaccgtgctggacatgcggagcatggacttcaagagcaactccgccgtggcctggtccaacaagtccgatttcgcctgcgccaacgccttcaacaacagcattatccccgaggacacattcttcccaagccccgagagcagcgactccaccgaccacgtgaagcccaaagagacagagaacaccaagcagcccagcaagagctgccacaagcccaaggccatcgtgcacaccgagaaagtgaacatgatgagcctgaccgtgctgggcctgcggatgctgttcgccaaaaccgtggccgtgaacttcctgctgaccgccaagctgttcttcctcagggccaagcgatctggatctggagcaacaaacttctcactactcaaacaagcaggtgacgtggaggagaatcccgggcctactagcatggccttaccagtgaccgccttgctcctgccgctggccttgctgctccacgccgccaggccggacatccagatgacacagagccctagcagcctgtctgccagcgtgggagacagagtgaccatcacatgcaaggccagcgaccacatcaacaactggctggcctggtatcagcagaagcctggacaggcccctaagctgctgatctacggcgctaccacactggaaacaggcgtgcccagcagattttctggcagcggctctggcaccgactacaccctgacaatatccagcctccagcctgaggacttcgccacctactactgtcagcagagctggaacaccccttggacattcggccagggcaccaagctggaaatcaagagaggcggaggcggaagtggaggcggaggatctggcggcggaggctctcaagttcagcttcaacagcctggcgctgagctggtcaaacctggcgcttctgtgaagatgagctgcaaagccagcggctacaccttcagcagctactggatcaactggatgaagcagaaacccggccagggactcgaatggatcggccaaatctatcccggcgacggcgacaccaactacaacggcaagttcaagggcagagccacactgaccgccgatacctctagcagcacagcctacatgcagctgagcagcctgaccagcgaagatagcgccgtgtacttctgtgcccggtccatcacaacagtcgtgggctgcgctatggactattggggccagggaacaagcgtgaccgtgtctagtacgcgtgaggacctgaagaacgtgttcccacctgaggtggccgtgttcgagcctagcgaggccgagatcagccacacccagaaagccaccctcgtgtgcctggctaccggcttctaccccgaccatgtggaactgtcttggtgggtcaacggcaaagaggtgcacagcggcgtgtctaccgacccccagccactgaaagaacagcccgccctgaacgacagccggtactgcctgagcagcagactgagagtgtccgccaccttctggcagaacccccggaaccacttcagatgccaggtgcagttctacggcctgagcgagaacgacgagtggacccaggacagagccaagcccgtgacccagatcgtgtctgccgaagcctggggcagagccgatgatgtgattaagatccactggcaggaaaagaagtccaacaccatcctgggcagccaggaaggcaacaccatgaagaccaacgacacctacatgaagttcagctggctgaccgtgcccgagaagtccctggacaaagaacacagatgcatcgtgcggcacgaaaacaacaagaacggcgtggaccaggaaatcatcttcccacccatcaagaccgatgtgattacaatggaccccaaggacaactgctccaaggacgccaacgataccctgctgctccagctgaccaacaccagcgcctactacatgtacttgttgctgctgctgaagtccgtggtgtacttcgccatcatcacatgctgcctgctgcggagaaccgccttctgctgcaacggcgagaagtctcgcgccaagagaagcggatctggcgtgaagcagaccctgaatttcgacctgctgaagctggctggcgacgtggaatccaacccaggcccttctagaggccatatgaccgagtacaagcccacggtgcgcctcgccacccgcgacgacgtccccagggccgtacgcaccctcgccgccgcgttcgccgactaccccgccacgcgccacaccgtcgatccggaccgccacatcgagcgggtcaccgagctgcaagaactcttcctcacgcgcgtcgggctcgacatcggcaaggtgtgggtcgcggacgacggcgccgcggtggcggtctggaccacgccggagagcgtcgaagcgggggcggtgttcgccgagatcggcccgcgcatggccgagttgagcggttcccggctggccgcgcagcaacagatggaaggcctcctggcgccgcaccggcccaaggagcccgcgtggttcctggccaccgtcggcgtctcgcccgaccaccagggcaagggtctgggcagcgccgtcgtgctccccggagtggaggcggccgagcgcgccggggtgcccgccttcctggagacctccgcgccccgcaacctccccttctacgagcggctcggcttcaccgtcaccgccgacgtcgaggtgcccgaaggaccgcgcacctggtgcatgacccgcaagcccggtgcctga

SEQ ID NO: 33974 - DNA, 2616 bp, synthetic construct
  source 1..2616: mol_type = other DNA
atggccttaccagtgaccgccttgctcctgccgctggccttgctgctccacgccgccaggccgctcgaggaggacctgaagaacgtgttcccacctgaggtggccgtgttcgagcctagcaaggccgagatcgcccacacccagaaagccaccctcgtgtgcctggctaccggcttctaccccgaccatgtggaactgtcttggtgggtcaacggcaaagaggtgcacagcggcgtgtgtaccgacccccagccactgaaagaacagcccgccctgaacgacagccggtactgcctgagcagcagactgagagtgtccgccaccttctggcagaacccccggaaccacttcagatgccaggtgcagttctacggcctgagcgagaacgacgagtggacccaggacagagccaagcccgtgacccagatcgtgtctgccgaagcctggggcagagccgattgcggcatcaccagcgccagctaccaccagggcgtgctgagcgccaccatcctgtacgagatcctgctgggcaaggccaccctgtacgccgtgctggtgtctgccctggtgctgatggctatggtcaagcggaaggacagccggggaagggccaagcgatctggatctggagcaacaaacttctcactactcaaacaagcaggtgacgtggaggagaatcccgggcctactagcatggccttaccagtgaccgccttgctcctgccgctggccttgctgctccacgccgccaggccggacatccagatgacacagagccctagcagcctgtctgccagcgtgggagacagagtgaccatcacatgcaaggccagcgaccacatcaacaactggctggcctggtatcagcagaagcctggacaggcccctaagctgctgatctacggcgctaccacactggaaacaggcgtgcccagcagattttctggcagcggctctggcaccgactacaccctgacaatatccagcctccagcctgaggacttcgccacctactactgtcagcagagctggaacaccccttggacattcggccagggcaccaagctggaaatcaagagaggcggaggcggaagtggaggcggaggatctggcggcggaggctctcaagttcagcttcaacagcctggcgctgagctggtcaaacctggcgcttctgtgaagatgagctgcaaagccagcggctacaccttcagcagctactggatcaactggatgaagcagaaacccggccagggactcgaatggatcggccaaatctatcccggcgacggcgacaccaactacaacggcaagttcaagggcagagccacactgaccgccgatacctctagcagcacagcctacatgcagctgagcagcctgaccagcgaagatagcgccgtgtacttctgtgcccggtccatcacaacagtcgtgggctgcgctatggactattggggccagggaacaagcgtgaccgtgtctagtacgcgtatccagaaccctgatcctgccgtgtaccagctgcgggatagcaagagcagcgacaagagcgtgtgtctgttcaccgacttcgacagccagaccaacgtgtcccagagcaaggactccgacgtgtacatcaccgataagtgcgtgctggacatgcggagcatggacttcaagagcaactccgccgtggcctggtccaacaagtccgatttcgcctgcgccaacgccttcaacaacagcattatccccgaggacacattcttcccaagcagcgacgtgccctgcgacgtgaagctggtggaaaagagcttcgagacagacaccaacctgaacttccagaacctgagcgtgatcggcttcagaatcctgctgctgaaagtggccggctttaacctgctgatgaccctgcggctgtggtccagccgcgccaagagaagcggatctggcgtgaagcagaccctgaatttcgacctgctgaagctggctggcgacgtggaatccaacccaggcccttctagaggccatatgaccgagtacaagcccacggtgcgcctcgccacccgcgacgacgtccccagggccgtacgcaccctcgccgccgcgttcgccgactaccccgccacgcgccacaccgtcgatccggaccgccacatcgagcgggtcaccgagctgcaagaactcttcctcacgcgcgtcgggctcgacatcggcaaggtgtgggtcgcggacgacggcgccgcggtggcggtctggaccacgccggagagcgtcgaagcgggggcggtgttcgccgagatcggcccgcgcatggccgagttgagcggttcccggctggccgcgcagcaacagatggaaggcctcctggcgccgcaccggcccaaggagcccgcgtggttcctggccaccgtcggcgtctcgcccgaccaccagggcaagggtctgggcagcgccgtcgtgctccccggagtggaggcggccgagcgcgccggggtgcccgccttcctggagacctccgcgccccgcaacctccccttctacgagcggctcggcttcaccgtcaccgccgacgtcgaggtgcccgaaggaccgcgcacctggtgcatgacccgcaagcccggtgcctga

SEQ ID NO: 33975 - DNA, 2616 bp, synthetic construct
  source 1..2616: mol_type = other DNA
atggccttaccagtgaccgccttgctcctgccgctggccttgctgctccacgccgccaggccgctcgagatccagaaccctgatcctgccgtgtaccagctgcgggatagcaagagcagcgacaagagcgtgtgtctgttcaccgacttcgacagccagaccaacgtgtcccagagcaaggactccgacgtgtacatcaccgataagtgcgtgctggacatgcggagcatggacttcaagagcaactccgccgtggcctggtccaacaagtccgatttcgcctgcgccaacgccttcaacaacagcattatccccgaggacacattcttcccaagcagcgacgtgccctgcgacgtgaagctggtggaaaagagcttcgagacagacaccaacctgaacttccagaacctgagcgtgatcggcttcagaatcctgctgctgaaagtggccggctttaacctgctgatgaccctgcggctgtggtccagcagggccaagcgatctggatctggagcaacaaacttctcactactcaaacaagcaggtgacgtggaggagaatcccgggcctactagcatggccttaccagtgaccgccttgctcctgccgctggccttgctgctccacgccgccaggccggacatccagatgacacagagccctagcagcctgtctgccagcgtgggagacagagtgaccatcacatgcaaggccagcgaccacatcaacaactggctggcctggtatcagcagaagcctggacaggcccctaagctgctgatctacggcgctaccacactggaaacaggcgtgcccagcagattttctggcagcggctctggcaccgactacaccctgacaatatccagcctccagcctgaggacttcgccacctactactgtcagcagagctggaacaccccttggacattcggccagggcaccaagctggaaatcaagagaggcggaggcggaagtggaggcggaggatctggcggcggaggctctcaagttcagcttcaacagcctggcgctgagctggtcaaacctggcgcttctgtgaagatgagctgcaaagccagcggctacaccttcagcagctactggatcaactggatgaagcagaaacccggccagggactcgaatggatcggccaaatctatcccggcgacggcgacaccaactacaacggcaagttcaagggcagagccacactgaccgccgatacctctagcagcacagcctacatgcagctgagcagcctgaccagcgaagatagcgccgtgtacttctgtgcccggtccatcacaacagtcgtgggctgcgctatggactattggggccagggaacaagcgtgaccgtgtctagtacgcgtgaggacctgaagaacgtgttcccacctgaggtggccgtgttcgagcctagcaaggccgagatcgcccacacccagaaagccaccctcgtgtgcctggctaccggcttctaccccgaccatgtggaactgtcttggtgggtcaacggcaaagaggtgcacagcggcgtgtgtaccgacccccagccactgaaagaacagcccgccctgaacgacagccggtactgcctgagcagcagactgagagtgtccgccaccttctggcagaacccccggaaccacttcagatgccaggtgcagttctacggcctgagcgagaacgacgagtggacccaggacagagccaagcccgtgacccagatcgtgtctgccgaagcctggggcagagccgattgcggcatcaccagcgccagctaccaccagggcgtgctgagcgccaccatcctgtacgagatcctgctgggcaaggccaccctgtacgccgtgctggtgtctgccctggtgctgatggctatggtcaagcggaaggacagccggggacgcgccaagagaagcggatctggcgtgaagcagaccctgaatttcgacctgctgaagctggctggcgacgtggaatccaacccaggcccttctagaggccatatgaccgagtacaagcccacggtgcgcctcgccacccgcgacgacgtccccagggccgtacgcaccctcgccgccgcgttcgccgactaccccgccacgcgccacaccgtcgatccggaccgccacatcgagcgggtcaccgagctgcaagaactcttcctcacgcgcgtcgggctcgacatcggcaaggtgtgggtcgcggacgacggcgccgcggtggcggtctggaccacgccggagagcgtcgaagcgggggcggtgttcgccgagatcggcccgcgcatggccgagttgagcggttcccggctggccgcgcagcaacagatggaaggcctcctggcgccgcaccggcccaaggagcccgcgtggttcctggccaccgtcggcgtctcgcccgaccaccagggcaagggtctgggcagcgccgtcgtgctccccggagtggaggcggccgagcgcgccggggtgcccgccttcctggagacctccgcgccccgcaacctccccttctacgagcggctcggcttcaccgtcaccgccgacgtcgaggtgcccgaaggaccgcgcacctggtgcatgacccgcaagcccggtgcctga

SEQ ID NO: 33976 - DNA, 2295 bp, synthetic construct
  source 1..2295: mol_type = other DNA
atggccttaccagtgaccgccttgctcctgccgctggccttgctgctccacgccgccaggccgctcgagcagagttttgggttgttggaccctaaattgtgctatctgttggacggaatcctgttcatttacggagtgatcctgaccgcattgttcctgcgggttaagttttccagatccgcagacgcacccgcttaccaacaagggcagaaccaactctacaatgaacttaatttggggcggagggaagagtacgacgttctggacaaaaggaggggacgagatcccgagatgggcggaaagcctcagcgaaggaagaatccgcaagaggggctttataacgaactccagaaagataaaatggcagaagcctatagtgagattgggatgaagggagaaaggaggaggggtaaaggtcacgatgggttgtaccaaggattgagcacagccactaaagatacctatgatgcgctccacatgcaggccctgccgccaagaagggccaagcgatctggatctggagcaacaaacttctcactactcaaacaagcaggtgacgtggaggagaatcccgggcctactagcatggccttaccagtgaccgccttgctcctgccgctggccttgctgctccacgccgccaggccggacatccagatgacacagagccctagcagcctgtctgccagcgtgggagacagagtgaccatcacatgcaaggccagcgaccacatcaacaactggctggcctggtatcagcagaagcctggacaggcccctaagctgctgatctacggcgctaccacactggaaacaggcgtgcccagcagattttctggcagcggctctggcaccgactacaccctgacaatatccagcctccagcctgaggacttcgccacctactactgtcagcagagctggaacaccccttggacattcggccagggcaccaagctggaaatcaagagaggcggaggcggaagtggaggcggaggatctggcggcggaggctctcaagttcagcttcaacagcctggcgctgagctggtcaaacctggcgcttctgtgaagatgagctgcaaagccagcggctacaccttcagcagctactggatcaactggatgaagcagaaacccggccagggactcgaatggatcggccaaatctatcccggcgacggcgacaccaactacaacggcaagttcaagggcagagccacactgaccgccgatacctctagcagcacagcctacatgcagctgagcagcctgaccagcgaagatagcgccgtgtacttctgtgcccggtccatcacaacagtcgtgggctgcgctatggactattggggccagggaacaagcgtgaccgtgtctagtacgcgtgagctgggagagcctcagctgtgctatatcctggacgccatcctgtttctgtacggcatcgtgctgaccctgctgtactgccggctgaagatccaagtgcggaaggccgccatcaccagctacgagaaatccgacggcgtgtacaccggcctgagcaccagaaatcaagagacatacgagacactgaagcacgaaaagcctccacaacgcgccaagagaagcggatctggcgtgaagcagaccctgaatttcgacctgctgaagctggctggcgacgtggaatccaacccaggcccttctagaggccatatgaccgagtacaagcccacggtgcgcctcgccacccgcgacgacgtccccagggccgtacgcaccctcgccgccgcgttcgccgactaccccgccacgcgccacaccgtcgatccggaccgccacatcgagcgggtcaccgagctgcaagaactcttcctcacgcgcgtcgggctcgacatcggcaaggtgtgggtcgcggacgacggcgccgcggtggcggtctggaccacgccggagagcgtcgaagcgggggcggtgttcgccgagatcggcccgcgcatggccgagttgagcggttcccggctggccgcgcagcaacagatggaaggcctcctggcgccgcaccggcccaaggagcccgcgtggttcctggccaccgtcggcgtctcgcccgaccaccagggcaagggtctgggcagcgccgtcgtgctccccggagtggaggcggccgagcgcgccggggtgcccgccttcctggagacctccgcgccccgcaacctccccttctacgagcggctcggcttcaccgtcaccgccgacgtcgaggtgcccgaaggaccgcgcacctggtgcatgacccgcaagcccggtgcctga

SEQ ID NO: 33977 - DNA, 2928 bp, synthetic construct; identical to SEQ ID NO: 33968
  source 1..2928: mol_type = other DNA

SEQ ID NO: 33978 - DNA, 2928 bp, synthetic construct; identical to SEQ ID NO: 33969
  source 1..2928: mol_type = other DNA

SEQ ID NO: 33979 - DNA, 2925 bp, synthetic construct
  source 1..2925: mol_type = other DNA
atggccttaccagtgaccgccttgctcctgccgctggccttgctgctccacgccgccaggccgctcgaggaggaggacctgaagaacgtgttcccacctgaggtggccgtgttcgagcctagcgaggccgagatcagccacacccagaaagccaccctcgtgtgcctggctaccggcttctaccccgaccatgtggaactgtcttggtgggtcaacggcaaagaggtgcacagcggcgtgtgtaccgacccccagccactgaaagaacagcccgccctgaacgacagccggtactgcctgagcagcagactgagagtgtccgccaccttctggcagaacccccggaaccacttcagatgccaggtgcagttctacggcctgagcgagaacgacgagtggacccaggacagagccaagcccgtgacccagatcgtgtctgccgaagcctggggcagagccgatgatgtgattaagatccactggcaggaaaagaagtccaacaccatcctgggcagccaggaaggcaacaccatgaagaccaacgacacctacatgaagttcagctggctgaccgtgcccgagaagtccctggacaaagaacacagatgcatcgtgcggcacgaaaacaacaagaacggcgtggaccaggaaatcatcttcccacccatcaagaccgatgtgattacaatggaccccaaggacaactgctccaaggacgccaacgataccctgctgctccagctgaccaacaccagcgcctactacatgtacttgttgctgctgctgaagtccgtggtgtacttcgccatcatcacatgctgcctgctgcggagaaccgccttctgctgcaacggcgagaagtctagggccaagcgatctggatctggagcaacaaacttctcactactcaaacaagcaggtgacgtggaggagaatcccgggcctactagcatggccttaccagtgaccgccttgctcctgccgctggccttgctgctccacgccgccaggccggacatccagatgacacagagccctagcagcctgtctgccagcgtgggagacagagtgaccatcacatgcaaggccagcgaccacatcaacaactggctggcctggtatcagcagaagcctggacaggcccctaagctgctgatctacggcgctaccacactggaaacaggcgtgcccagcagattttctggcagcggctctggcaccgactacaccctgacaatatccagcctccagcctgaggacttcgccacctactactgtcagcagagctggaacaccccttggacattcggccagggcaccaagctggaaatcaagagaggcggaggcggaagtggaggcggaggatctggcggcggaggctctcaagttcagcttcaacagcctggcgctgagctggtcaaacctggcgcttctgtgaagatgagctgcaaagccagcggctacaccttcagcagctactggatcaactggatgaagcagaaacccggccagggactcgaatggatcggccaaatctatcccggcgacggcgacaccaactacaacggcaagttcaagggcagagccacactgaccgccgatacctctagcagcacagcctacatgcagctgagcagcctgaccagcgaagatagcgccgtgtacttctgtgcccggtccatcacaacagtcgtgggctgcgctatggactattggggccagggaacaagcgtgaccgtgtctagtacgcgtatccagaaccctgatcctgccgtgtaccagctgcgggatagcaagagcagcgacaagagcgtgtgtctgttcaccgacttcgacagccagaccaacgtgtcccagagcaaggactccgacgtgtacatcaccgataagtgcgtgctggacatgcggagcatggacttcaagagcaactccgccgtggcctggtccaacaagtccgatttcgcctgcgccaacgccttcaacaacagcattatccccgaggacacattcttcccaagccccgagagcagcgactccaccgaccacgtgaagcccaaagagacagagaacaccaagcagcccagcaagagctgccacaagcccaaggccatcgtgcacaccgagaaagtgaacatgatgagcctgaccgtgctgggcctgcggatgctgttcgccaaaaccgtggccgtgaacttcctgctgaccgccaagctgttcttcctccgcgccaagagaagcggatctggcgtgaagcagaccctgaatttcgacctgctgaagctggctggcgacgtggaatccaacccaggcccttctagaggccatatgaccgagtacaagcccacggtgcgcctcgccacccgcgacgacgtccccagggccgtacgcaccctcgccgccgcgttcgccgactaccccgccacgcgccacaccgtcgatccggaccgccacatcgagcgggtcaccgagctgcaagaactcttcctcacgcgcgtcgggctcgacatcggcaaggtgtgggtcgcggacgacggcgccgcggtggcggtctggaccacgccggagagcgtcgaagcgggggcggtgttcgccgagatcggcccgcgcatggccgagttgagcggttcccggctggccgcgcagcaacagatggaaggcctcctggcgccgcaccggcccaaggagcccgcgtggttcctggccaccgtcggcgtctcgcccgaccaccagggcaagggtctgggcagcgccgtcgtgctccccggagtggaggcggccgagcgcgccggggtgcccgccttcctggagacctccgcgccccgcaacctccccttctacgagcggctcggcttcaccgtcaccgccgacgtcgaggtgcccgaaggaccgcgcacctggtgcatgacccgcaagcccggtgcctga

SEQ ID NO: 33980 - DNA, 2925 bp, synthetic construct
  source 1..2925: mol_type = other DNA
atggccttaccagtgaccgccttgctcctgccgctggccttgctgctccacgccgccaggccgctcgagatccagaaccctgatcctgccgtgtaccagctgcgggatagcaagagcagcgacaagagcgtgtgtctgttcaccgacttcgacagccagaccaacgtgtcccagagcaaggactccgacgtgtacatcaccgataagtgcgtgctggacatgcggagcatggacttcaagagcaactccgccgtggcctggtccaacaagtccgatttcgcctgcgccaacgccttcaacaacagcattatccccgaggacacattcttcccaagccccgagagcagcgactccaccgaccacgtgaagcccaaagagacagagaacaccaagcagcccagcaagagctgccacaagcccaaggccatcgtgcacaccgagaaagtgaacatgatgagcctgaccgtgctgggcctgcggatgctgttcgccaaaaccgtggccgtgaacttcctgctgaccgccaagctgttcttcctcagggccaagcgatctggatctggagcaacaaacttctcactactcaaacaagcaggtgacgtggaggagaatcccgggcctactagcatggccttaccagtgaccgccttgctcctgccgctggccttgctgctccacgccgccaggccggacatccagatgacacagagccctagcagcctgtctgccagcgtgggagacagagtgaccatcacatgcaaggccagcgaccacatcaacaactggctggcctggtatcagcagaagcctggacaggcccctaagctgctgatctacggcgctaccacactggaaacaggcgtgcccagcagattttctggcagcggctctggcaccgactacaccctgacaatatccagcctccagcctgaggacttcgccacctactactgtcagcagagctggaacaccccttggacattcggccagggcaccaagctggaaatcaagagaggcggaggcggaagtggaggcggaggatctggcggcggaggctctcaagttcagcttcaacagcctggcgctgagctggtcaaacctggcgcttctgtgaagatgagctgcaaagccagcggctacaccttcagcagctactggatcaactggatgaagcagaaacccggccagggactcgaatggatcggccaaatctatcccggcgacggcgacaccaactacaacggcaagttcaagggcagagccacactgaccgccgatacctctagcagcacagcctacatgcagctgagcagcctgaccagcgaagatagcgccgtgtacttctgtgcccggtccatcacaacagtcgtgggctgcgctatggactattggggccagggaacaagcgtgaccgtgtctagtacgcgtgaggaggacctgaagaacgtgttcccacctgaggtggccgtgttcgagcctagcgaggccgagatcagccacacccagaaagccaccctcgtgtgcctggctaccggcttctaccccgaccatgtggaactgtcttggtgggtcaacggcaaagaggtgcacagcggcgtgtgtaccgacccccagccactgaaagaacagcccgccctgaacgacagccggtactgcctgagcagcagactgagagtgtccgccaccttctggcagaacccccggaaccacttcagatgccaggtgcagttctacggcctgagcgagaacgacgagtggacccaggacagagccaagcccgtgacccagatcgtgtctgccgaagcctggggcagagccgatgatgtgattaagatccactggcaggaaaagaagtccaacaccatcctgggcagccaggaaggcaacaccatgaagaccaacgacacctacatgaagttcagctggctgaccgtgcccgagaagtccctggacaaagaacacagatgcatcgtgcggcacgaaaacaacaagaacggcgtggaccaggaaatcatcttcccacccatcaagaccgatgtgattacaatggaccccaaggacaactgctccaaggacgccaacgataccctgctgctccagctgaccaacaccagcgcctactacatgtacttgttgctgctgctgaagtccgtggtgtacttcgccatcatcacatgctgcctgctgcggagaaccgccttctgctgcaacggcgagaagtctcgcgccaagagaagcggatctggcgtgaagcagaccctgaatttcgacctgctgaagctggctggcgacgtggaatccaacccaggcccttctagaggccatatgaccgagtacaagcccacggtgcgcctcgccacccgcgacgacgtccccagggccgtacgcaccctcgccgccgcgttcgccgactaccccgccacgcgccacaccgtcgatccggaccgccacatcgagcgggtcaccgagctgcaagaactcttcctcacgcgcgtcgggctcgacatcggcaaggtgtgggtcgcggacgacggcgccgcggtggcggtctggaccacgccggagagcgtcgaagcgggggcggtgttcgccgagatcggcccgcgcatggccgagttgagcggttcccggctggccgcgcagcaacagatggaaggcctcctggcgccgcaccggcccaaggagcccgcgtggttcctggccaccgtcggcgtctcgcccgaccaccagggcaagggtctgggcagcgccgtcgtgctccccggagtggaggcggccgagcgcgccggggtgcccgccttcctggagacctccgcgccccgcaacctccccttctacgagcggctcggcttcaccgtcaccgccgacgtcgaggtgcccgaaggaccgcgcacctggtgcatgacccgcaagcccggtgcctga

SEQ ID NO: 33981 - DNA, 2616 bp, synthetic construct
  source 1..2616: mol_type = other DNA
atggccttaccagtgaccgccttgctcctgccgctggccttgctgctccacgccgccaggccgctcgaggaggacctgaagaacgtgttcccacctgaggtggccgtgttcgagcctagcgaggccgagatcagccacacccagaaagccaccctcgtgtgcctggctaccggcttctaccccgaccatgtggaactgtcttggtgggtcaacggcaaagaggtgcacagcggcgtgtctaccgacccccagccactgaaagaacagcccgccctgaacgacagccggtactgcctgagcagcagactgagagtgtccgccaccttctggcagaacccccggaaccacttcagatgccaggtgcagttctacggcctgagcgagaacgacgagtggacccaggacagagccaagcccgtgacccagatcgtgtctgccgaagcctggggcagagccgattgcggctttaccagcgagagctaccagcagggcgtgctgagcgccaccaacctgagcgtgatcggcttcagaatcctgctgctgaaagtggccggctttaacctgctgatgaccctgcggctgtggtccagcagggccaagcgatctggatctggagcaacaaacttctcactactcaaacaagcaggtgacgtggaggagaatcccgggcctactagcatggccttaccagtgaccgccttgctcctgccgctggccttgctgctccacgccgccaggccggacatccagatgacacagagccctagcagcctgtctgccagcgtgggagacagagtgaccatcacatgcaaggccagcgaccacatcaacaactggctggcctggtatcagcagaagcctggacaggcccctaagctgctgatctacggcgctaccacactggaaacaggcgtgcccagcagattttctggcagcggctctggcaccgactacaccctgacaatatccagcctccagcctgaggacttcgccacctactactgtcagcagagctggaacaccccttggacattcggccagggcaccaagctggaaatcaagagaggcggaggcggaagtggaggcggaggatctggcggcggaggctctcaagttcagcttcaacagcctggcgctgagctggtcaaacctggcgcttctgtgaagatgagctgcaaagccagcggctacaccttcagcagctactggatcaactggatgaagcagaaacccggccagggactcgaatggatcggccaaatctatcccggcgacggcgacaccaactacaacggcaagttcaagggcagagccacactgaccgccgatacctctagcagcacagcctacatgcagctgagcagcctgaccagcgaagatagcgccgtgtacttctgtgcccggtccatcacaacagtcgtgggctgcgctatggactattggggccagggaacaagcgtgaccgtgtctagtacgcgtatccagaaccctgatcctgccgtgtaccagctgcgggatagcaagagcagcgacaagagcgtgtgtctgttcaccgacttcgacagccagaccaacgtgtcccagagcaaggactccgacgtgtacatcaccgataagaccgtgctggacatgcggagcatggacttcaagagcaactccgccgtggcctggtccaacaagtccgatttcgcctgcgccaacgccttcaacaacagcattatccccgaggacacattcttcccaagccccgagagcagctgcgacgtgaagctggtggaaaagagcttcgagacagacaccaacctgaacttccagatcctgtacgagatcctgctgggcaaggccaccctgtacgccgtgctggtgtctgccctggtgctgatggctatggtcaagcggaaggacagccggggacgcgccaagagaagcggatctggcgtgaagcagaccctgaatttcgacctgctgaagctggctggcgacgtggaatccaacccaggcccttctagaggccatatgaccgagtacaagcccacggtgcgcctcgccacccgcgacgacgtccccagggccgtacgcaccctcgccgccgcgttcgccgactaccccgccacgcgccacaccgtcgatccggaccgccacatcgagcgggtcaccgagctgcaagaactcttcctcacgcgcgtcgggctcgacatcggcaaggtgtgggtcgcggacgacggcgccgcggtggcggtctggaccacgccggagagcgtcgaagcgggggcggtgttcgccgagatcggcccgcgcatggccgagttgagcggttcccggctggccgcgcagcaacagatggaaggcctcctggcgccgcaccggcccaaggagcccgcgtggttcctggccaccgtcggcgtctcgcccgaccaccagggcaagggtctgggcagcgccgtcgtgctccccggagtggaggcggccgagcgcgccggggtgcccgccttcctggagacctccgcgccccgcaacctccccttctacgagcggctcggcttcaccgtcaccgccgacgtcgaggtgcccgaaggaccgcgcacctggtgcatgacccgcaagcccggtgcctga

SEQ ID NO: 33982 - DNA, 2616 bp, synthetic construct
  source 1..2616: mol_type = other DNA
atggccttaccagtgaccgccttgctcctgccgctggccttgctgctccacgccgccaggccgctcgagatccagaaccctgatcctgccgtgtaccagctgcgggatagcaagagcagcgacaagagcgtgtgtctgttcaccgacttcgacagccagaccaacgtgtcccagagcaaggactccgacgtgtacatcaccgataagaccgtgctggacatgcggagcatggacttcaagagcaactccgccgtggcctggtccaacaagtccgatttcgcctgcgccaacgccttcaacaacagcattatccccgaggacacattcttcccaagccccgagagcagctgcgacgtgaagctggtggaaaagagcttcgagacagacaccaacctgaacttccagatcctgtacgagatcctgctgggcaaggccaccctgtacgccgtgctggtgtctgccctggtgctgatggctatggtcaagcggaaggacagccggggaagggccaagcgatctggatctggagcaacaaacttctcactactcaaacaagcaggtgacgtggaggagaatcccgggcctactagcatggccttaccagtgaccgccttgctcctgccgctggccttgctgctccacgccgccaggccggacatccagatgacacagagccctagcagcctgtctgccagcgtgggagacagagtgaccatcacatgcaaggccagcgaccacatcaacaactggctggcctggtatcagcagaagcctggacaggcccctaagctgctgatctacggcgctaccacactggaaacaggcgtgcccagcagattttctggcagcggctctggcaccgactacaccctgacaatatccagcctccagcctgaggacttcgccacctactactgtcagcagagctggaacaccccttggacattcggccagggcaccaagctggaaatcaagagaggcggaggcggaagtggaggcggaggatctggcggcggaggctctcaagttcagcttcaacagcctggcgctgagctggtcaaacctggcgcttctgtgaagatgagctgcaaagccagcggctacaccttcagcagctactggatcaactggatgaagcagaaacccggccagggactcgaatggatcggccaaatctatcccggcgacggcgacaccaactacaacggcaagttcaagggcagagccacactgaccgccgatacctctagcagcacagcctacatgcagctgagcagcctgaccagcgaagatagcgccgtgtacttctgtgcccggtccatcacaacagtcgtgggctgcgctatggactattggggccagggaacaagcgtgaccgtgtctagtacgcgtgaggacctgaagaacgtgttcccacctgaggtggccgtgttcgagcctagcgaggccgagatcagccacacccagaaagccaccctcgtgtgcctggctaccggcttctaccccgaccatgtggaactgtcttggtgggtcaacggcaaagaggtgcacagcggcgtgtctaccgacccccagccactgaaagaacagcccgccctgaacgacagccggtactgcctgagcagcagactgagagtgtccgccaccttctggcagaacccccggaaccacttcagatgccaggtgcagttctacggcctgagcgagaacgacgagtggacccaggacagagccaagcccgtgacccagatcgtgtctgccgaagcctggggcagagccgattgcggctttaccagcgagagctaccagcagggcgtgctgagcgccaccaacctgagcgtgatcggcttcagaatcctgctgctgaaagtggccggctttaacctgctgatgaccctgcggctgtggtccagccgcgccaagagaagcggatctggcgtgaagcagaccctgaatttcgacctgctgaagctggctggcgacgtggaatccaacccaggcccttctagaggccatatgaccgagtacaagcccacggtgcgcctcgccacccgcgacgacgtccccagggccgtacgcaccctcgccgccgcgttcgccgactaccccgccacgcgccacaccgtcgatccggaccgccacatcgagcgggtcaccgagctgcaagaactcttcctcacgcgcgtcgggctcgacatcggcaaggtgtgggtcgcggacgacggcgccgcggtggcggtctggaccacgccggagagcgtcgaagcgggggcggtgttcgccgagatcggcccgcgcatggccgagttgagcggttcccggctggccgcgcagcaacagatggaaggcctcctggcgccgcaccggcccaaggagcccgcgtggttcctggccaccgtcggcgtctcgcccgaccaccagggcaagggtctgggcagcgccgtcgtgctccccggagtggaggcggccgagcgcgccggggtgcccgccttcctggagacctccgcgccccgcaacctccccttctacgagcggctcggcttcaccgtcaccgccgacgtcgaggtgcccgaaggaccgcgcacctggtgcatgacccgcaagcccggtgcctga

SEQ ID NO: 33983 - DNA, 2616 bp, synthetic construct
  source 1..2616: mol_type = other DNA
atggccttaccagtgaccgccttgctcctgccgctggccttgctgctccacgccgccaggccgctcgaggaggacctgaagaacgtgttcccacctgaggtggccgtgttcgagcctagcgaggccgagatcagccacacccagaaagccaccctcgtgtgcctggctaccggcttctaccccgaccatgtggaactgtcttggtgggtcaacggcaaagaggtgcacagcggcgtgtgtaccgacccccagccactgaaagaacagcccgccctgaacgacagccggtactgcctgagcagcagactgagagtgtccgccaccttctggcagaacccccggaaccacttcagatgccaggtgcagttctacggcctgagcgagaacgacgagtggacccaggacagagccaagcccgtgacccagatcgtgtctgccgaagcctggggcagagccgattgcgacgtgaagctggtggaaaagagcttcgagacagacaccaacctgaacttccagaacctgagcgtgatcggcttcagaatcctgctgctgaaagtggccggctttaacctgctgatgaccctgcggctgtggtccagcagggccaagcgatctggatctggagcaacaaacttctcactactcaaacaagcaggtgacgtggaggagaatcccgggcctactagcatggccttaccagtgaccgccttgctcctgccgctggccttgctgctccacgccgccaggccggacatccagatgacacagagccctagcagcctgtctgccagcgtgggagacagagtgaccatcacatgcaaggccagcgaccacatcaacaactggctggcctggtatcagcagaagcctggacaggcccctaagctgctgatctacggcgctaccacactggaaacaggcgtgcccagcagattttctggcagcggctctggcaccgactacaccctgacaatatccagcctccagcctgaggacttcgccacctactactgtcagcagagctggaacaccccttggacattcggccagggcaccaagctggaaatcaagagaggcggaggcggaagtggaggcggaggatctggcggcggaggctctcaagttcagcttcaacagcctggcgctgagctggtcaaacctggcgcttctgtgaagatgagctgcaaagccagcggctacaccttcagcagctactggatcaactggatgaagcagaaacccggccagggactcgaatggatcggccaaatctatcccggcgacggcgacaccaactacaacggcaagttcaagggcagagccacactgaccgccgatacctctagcagcacagcctacatgcagctgagcagcctgaccagcgaagatagcgccgtgtacttctgtgcccggtccatcacaacagtcgtgggctgcgctatggactattggggccagggaacaagcgtgaccgtgtctagtacgcgtatccagaaccctgatcctgccgtgtaccagctgcgggatagcaagagcagcgacaagagcgtgtgtctgttcaccgacttcgacagccagaccaacgtgtcccagagcaaggactccgacgtgtacatcaccgataagtgcgtgctggacatgcggagcatggacttcaagagcaactccgccgtggcctggtccaacaagtccgatttcgcctgcgccaacgccttcaacaacagcattatccccgaggacacattcttcccaagccccgagagcagctgcggctttaccagcgagagctaccagcagggcgtgctgagcgccaccatcctgtacgagatcctgctgggcaaggccaccctgtacgccgtgctggtgtctgccctggtgctgatggctatggtcaagcggaaggacagccggggacgcgccaagagaagcggatctggcgtgaagcagaccctgaatttcgacctgctgaagctggctggcgacgtggaatccaacccaggcccttctagaggccatatgaccgagtacaagcccacggtgcgcctcgccacccgcgacgacgtccccagggccgtacgcaccctcgccgccgcgttcgccgactaccccgccacgcgccacaccgtcgatccggaccgccacatcgagcgggtcaccgagctgcaagaactcttcctcacgcgcgtcgggctcgacatcggcaaggtgtgggtcgcggacgacggcgccgcggtggcggtctggaccacgccggagagcgtcgaagcgggggcggtgttcgccgagatcggcccgcgcatggccgagttgagcggttcccggctggccgcgcagcaacagatggaaggcctcctggcgccgcaccggcccaaggagcccgcgtggttcctggccaccgtcggcgtctcgcccgaccaccagggcaagggtctgggcagcgccgtcgtgctccccggagtggaggcggccgagcgcgccggggtgcccgccttcctggagacctccgcgccccgcaacctccccttctacgagcggctcggcttcaccgtcaccgccgacgtcgaggtgcccgaaggaccgcgcacctggtgcatgacccgcaagcccggtgcctga

SEQ ID NO: 33984 - DNA, 2616 bp, synthetic construct
  source 1..2616: mol_type = other DNA
atggccttaccagtgaccgccttgctcctgccgctggccttgctgctccacgccgccaggccgctcgaggaggacctgaagaacgtgttcccacctgaggtggccgtgttcgagcctagcgaggccgagatcagccacacccagaaagccaccctcgtgtgcctggctaccggcttctaccccgaccatgtggaactgtcttggtgggtcaacggcaaagaggtgcacagcggcgtgtctaccgacccccagccactgaaagaacagcccgccctgaacgacagccggtactgcctgagcagcagactgagagtgtccgccaccttctggcagaacccccggaaccacttcagatgccaggtgcagttctacggcctgagcgagaacgacgagtggacccaggacagagccaagcccgtgacccagatcgtgtctgccgaagcctggggcagagccgattgcgacgtgaagctggtggaaaagagcttcgagacagacaccaacctgaacttccagaacctgagcgtgatcggcttcagaatcctgctgctgaaagtggccggctttaacctgctgatgaccctgcggctgtggtccagcagggccaagcgatctggatctggagcaacaaacttctcactactcaaacaagcaggtgacgtggaggagaatcccgggcctactagcatggccttaccagtgaccgccttgctcctgccgctggccttgctgctccacgccgccaggccggacatccagatgacacagagccctagcagcctgtctgccagcgtgggagacagagtgaccatcacatgcaaggccagcgaccacatcaacaactggctggcctggtatcagcagaagcctggacaggcccctaagctgctgatctacggcgctaccacactggaaacaggcgtgcccagcagattttctggcagcggctctggcaccgactacaccctgacaatatccagcctccagcctgaggacttcgccacctactactgtcagcagagctggaacaccccttggacattcggccagggcaccaagctggaaatcaagagaggcggaggcggaagtggaggcggaggatctggcggcggaggctctcaagttcagcttcaacagcctggcgctgagctggtcaaacctggcgcttctgtgaagatgagctgcaaagccagcggctacaccttcagcagctactggatcaactggatgaagcagaaacccggccagggactcgaatggatcggccaaatctatcccggcgacggcgacaccaactacaacggcaagttcaagggcagagccacactgaccgccgatacctctagcagcacagcctacatgcagctgagcagcctgaccagcgaagatagcgccgtgtacttctgtgcccggtccatcacaacagtcgtgggctgcgctatggactattggggccagggaacaagcgtgaccgtgtctagtacgcgtatccagaaccctgatcctgccgtgtaccagctgcgggatagcaagagcagcgacaagagcgtgtgtctgttcaccgacttcgacagccagaccaacgtgtcccagagcaaggactccgacgtgtacatcaccgataagaccgtgctggacatgcggagcatggacttcaagagcaactccgccgtggcctggtccaacaagtccgatttcgcctgcgccaacgccttcaacaacagcattatccccgaggacacattcttcccaagccccgagagcagctgcggctttaccagcgagagctaccagcagggcgtgctgagcgccaccatcctgtacgagatcctgctgggcaaggccaccctgtacgccgtgctggtgtctgccctggtgctgatggctatggtcaagcggaaggacagccggggacgcgccaagagaagcggatctggcgtgaagcagaccctgaatttcgacctgctgaagctggctggcgacgtggaatccaacccaggcccttctagaggccatatgaccgagtacaagcccacggtgcgcctcgccacccgcgacgacgtccccagggccgtacgcaccctcgccgccgcgttcgccgactaccccgccacgcgccacaccgtcgatccggaccgccacatcgagcgggtcaccgagctgcaagaactcttcctcacgcgcgtcgggctcgacatcggcaaggtgtgggtcgcggacgacggcgccgcggtggcggtctggaccacgccggagagcgtcgaagcgggggcggtgttcgccgagatcggcccgcgcatggccgagttgagcggttcccggctggccgcgcagcaacagatggaaggcctcctggcgccgcaccggcccaaggagcccgcgtggttcctggccaccgtcggcgtctcgcccgaccaccagggcaagggtctgggcagcgccgtcgtgctccccggagtggaggcggccgagcgcgccggggtgcccgccttcctggagacctccgcgccccgcaacctccccttctacgagcggctcggcttcaccgtcaccgccgacgtcgaggtgcccgaaggaccgcgcacctggtgcatgacccgcaagcccggtgcctga

SEQ ID NO: 33985 - DNA, 2925 bp, synthetic construct
  source 1..2925: mol_type = other DNA
atggccttaccagtgaccgccttgctcctgccgctggccttgctgctccacgccgccaggccgctcgaggaggaggacctgaagaacgtgttcccacctgaggtggccgtgttcgagcctagcgaggccgagatcagccacacccagaaagccaccctcgtgtgcctggctaccggcttctaccccgaccatgtggaactgtcttggtgggtcaacggcaaagaggtgcacagcggcgtgtctaccgacccccagccactgaaagaacagcccgccctgaacgacagccggtactgcctgagcagcagactgagagtgtccgccaccttctggcagaacccccggaaccacttcagatgccaggtgcagttctacggcctgagcgagaacgacgagtggacccaggacagagccaagcccgtgacccagatcgtgtctgccgaagcctggggcagagccgatgatgtgattaagatccactggcaggaaaagaagtccaacaccatcctgggcagccaggaaggcaacaccatgaagaccaacgacacctacatgaagttcagctggctgaccgtgcccgagaagtccctggacaaagaacacagatgcatcgtgcggcacgaaaacaacaagaacggcgtggaccaggaaatcatcttcccacccatcaagaccgatgtgattacaatggaccccaaggacaactgctccaaggacgccaacgataccctgctgctccagctgaccaacaccagcgcctactacatgtacttgttgctgctgctgaagtccgtggtgtacttcgccatcatcacatgctgcctgctgcggagaaccgccttctgctgcaacggcgagaagtctagggccaagcgatctggatctggagcaacaaacttctcactactcaaacaagcaggtgacgtggaggagaatcccgggcctactagcatggccttaccagtgaccgccttgctcctgccgctggccttgctgctccacgccgccaggccggacatccagatgacacagagccctagcagcctgtctgccagcgtgggagacagagtgaccatcacatgcaaggccagcgaccacatcaacaactggctggcctggtatcagcagaagcctggacaggcccctaagctgctgatctacggcgctaccacactggaaacaggcgtgcccagcagattttctggcagcggctctggcaccgactacaccctgacaatatccagcctccagcctgaggacttcgccacctactactgtcagcagagctggaacaccccttggacattcggccagggcaccaagctggaaatcaagagaggcggaggcggaagtggaggcggaggatctggcggcggaggctctcaagttcagcttcaacagcctggcgctgagctggtcaaacctggcgcttctgtgaagatgagctgcaaagccagcggctacaccttcagcagctactggatcaactggatgaagcagaaacccggccagggactcgaatggatcggccaaatctatcccggcgacggcgacaccaactacaacggcaagttcaagggcagagccacactgaccgccgatacctctagcagcacagcctacatgcagctgagcagcctgaccagcgaagatagcgccgtgtacttctgtgcccggtccatcacaacagtcgtgggctgcgctatggactattggggccagggaacaagcgtgaccgtgtctagtacgcgtatccagaaccctgatcctgccgtgtaccagctgcgggatagcaagagcagcgacaagagcgtgtgtctgttcaccgacttcgacagccagaccaacgtgtcccagagcaaggactccgacgtgtacatcaccgataagaccgtgctggacatgcggagcatggacttcaagagcaactccgccgtggcctggtccaacaagtccgatttcgcctgcgccaacgccttcaacaacagcattatccccgaggacacattcttcccaagccccgagagcagcgactccaccgaccacgtgaagcccaaagagacagagaacaccaagcagcccagcaagagctgccacaagcccaaggccatcgtgcacaccgagaaagtgaacatgatgagcctgaccgtgctgggcctgcggatgctgttcgccaaaaccgtggccgtgaacttcctgctgaccgccaagctgttcttcctccgcgccaagagaagcggatctggcgtgaagcagaccctgaatttcgacctgctgaagctggctggcgacgtggaatccaacccaggcccttctagaggccatatgaccgagtacaagcccacggtgcgcctcgccacccgcgacgacgtccccagggccgtacgcaccctcgccgccgcgttcgccgactaccccgccacgcgccacaccgtcgatccggaccgccacatcgagcgggtcaccgagctgcaagaactcttcctcacgcgcgtcgggctcgacatcggcaaggtgtgggtcgcggacgacggcgccgcggtggcggtctggaccacgccggagagcgtcgaagcgggggcggtgttcgccgagatcggcccgcgcatggccgagttgagcggttcccggctggccgcgcagcaacagatggaaggcctcctggcgccgcaccggcccaaggagcccgcgtggttcctggccaccgtcggcgtctcgcccgaccaccagggcaagggtctgggcagcgccgtcgtgctccccggagtggaggcggccgagcgcgccggggtgcccgccttcctggagacctccgcgccccgcaacctccccttctacgagcggctcggcttcaccgtcaccgccgacgtcgaggtgcccgaaggaccgcgcacctggtgcatgacccgcaagcccggtgcctga

SEQ ID NO: 33986 - DNA, 2616 bp, synthetic construct
  source 1..2616: mol_type = other DNA
atggccttaccagtgaccgccttgctcctgccgctggccttgctgctccacgccgccaggccgctcgaggaggacctgaagaacgtgttcccacctgaggtggccgtgttcgagcctagcgaggccgagatcagccacacccagaaagccaccctcgtgtgcctggctaccggcttctaccccgaccatgtggaactgtcttggtgggtcaacggcaaagaggtgcacagcggcgtgtgtaccgacccccagccactgaaagaacagcccgccctgaacgacagccggtactgcctgagcagcagactgagagtgtccgccaccttctggcagaacccccggaaccacttcagatgccaggtgcagttctacggcctgagcgagaacgacgagtggacccaggacagagccaagcccgtgacccagatcgtgtctgccgaagcctggggcagagccgattgcggctttaccagcgagagctaccagcagggcgtgctgagcgccaccaacctgagcgtgatcggcttcagaatcctgctgctgaaagtggccggctttaacctgctgatgaccctgcggctgtggtccagcagggccaagcgatctggatctggagcaacaaacttctcactactcaaacaagcaggtgacgtggaggagaatcccgggcctactagcatggccttaccagtgaccgccttgctcctgccgctggccttgctgctccacgccgccaggccggacatccagatgacacagagccctagcagcctgtctgccagcgtgggagacagagtgaccatcacatgcaaggccagcgaccacatcaacaactggctggcctggtatcagcagaagcctggacaggcccctaagctgctgatctacggcgctaccacactggaaacaggcgtgcccagcagattttctggcagcggctctggcaccgactacaccctgacaatatccagcctccagcctgaggacttcgccacctactactgtcagcagagctggaacaccccttggacattcggccagggcaccaagctggaaatcaagagaggcggaggcggaagtggaggcggaggatctggcggcggaggctctcaagttcagcttcaacagcctggcgctgagctggtcaaacctggcgcttctgtgaagatgagctgcaaagccagcggctacaccttcagcagctactggatcaactggatgaagcagaaacccggccagggactcgaatggatcggccaaatctatcccggcgacggcgacaccaactacaacggcaagttcaagggcagagccacactgaccgccgatacctctagcagcacagcctacatgcagctgagcagcctgaccagcgaagatagcgccgtgtacttctgtgcccggtccatcacaacagtcgtgggctgcgctatggactattggggccagggaacaagcgtgaccgtgtctagtacgcgtatccagaaccctgatcctgccgtgtaccagctgcgggatagcaagagcagcgacaagagcgtgtgtctgttcaccgacttcgacagccagaccaacgtgtcccagagcaaggactccgacgtgtacatcaccgataagtgcgtgctggacatgcggagcatggacttcaagagcaactccgccgtggcctggtccaacaagtccgatttcgcctgcgccaacgccttcaacaacagcattatccccgaggacacattcttcccaagccccgagagcagctgcgacgtgaagctggtggaaaagagcttcgagacagacaccaacctgaacttccagatcctgtacgagatcctgctgggcaaggccaccctgtacgccgtgctggtgtctgccctggtgctgatggctatggtcaagcggaaggacagccggggacgcgccaagagaagcggatctggcgtgaagcagaccctgaatttcgacctgctgaagctggctggcgacgtggaatccaacccaggcccttctagaggccatatgaccgagtacaagcccacggtgcgcctcgccacccgcgacgacgtccccagggccgtacgcaccctcgccgccgcgttcgccgactaccccgccacgcgccacaccgtcgatccggaccgccacatcgagcgggtcaccgagctgcaagaactcttcctcacgcgcgtcgggctcgacatcggcaaggtgtgggtcgcggacgacggcgccgcggtggcggtctggaccacgccggagagcgtcgaagcgggggcggtgttcgccgagatcggcccgcgcatggccgagttgagcggttcccggctggccgcgcagcaacagatggaaggcctcctggcgccgcaccggcccaaggagcccgcgtggttcctggccaccgtcggcgtctcgcccgaccaccagggcaagggtctgggcagcgccgtcgtgctccccggagtggaggcggccgagcgcgccggggtgcccgccttcctggagacctccgcgccccgcaacctccccttctacgagcggctcggcttcaccgtcaccgccgacgtcgaggtgcccgaaggaccgcgcacctggtgcatgacccgcaagcccggtgcctga

SEQ ID NO: 33987 - DNA, 2703 bp, synthetic construct
  source 1..2703: mol_type = other DNA
atggccttaccagtgaccgccttgctcctgccgctggccttgctgctccacgccgccaggccgctcgaggaggaggacctgaagaacgtgttcccacctgaggtggccgtgttcgagcctagcgaggccgagatcagccacacccagaaagccaccctcgtgtgcctggctaccggcttctaccccgaccatgtggaactgtcttggtgggtcaacggcaaagaggtgcacagcggcgtgtgtaccgacccccagccactgaaagaacagcccgccctgaacgacagccggtactgcctgagcagcagactgagagtgtccgccaccttctggcagaacccccggaaccacttcagatgccaggtgcagttctacggcctgagcgagaacgacgagtggacccaggacagagccaagcccgtgacccagatcgtgtctgccgaagcctggggcagagccgattgcggctttaccagcgagagctaccagcagggcgtgctgagcgccaccaacctgagcgtgatcggcttcagaatcctgctgctgaaagtggccggctttaacctgctgatgaccctgcggctgtggtccagcagggccaagcgatctggatctggagcaacaaacttctcactactcaaacaagcaggtgacgtggaggagaatcccgggcctactagcatggccttaccagtgaccgccttgctcctgccgctggccttgctgctccacgccgccaggccggacatccagatgacacagagccctagcagcctgtctgccagcgtgggagacagagtgaccatcacatgcaaggccagcgaccacatcaacaactggctggcctggtatcagcagaagcctggacaggcccctaagctgctgatctacggcgctaccacactggaaacaggcgtgcccagcagattttctggcagcggctctggcaccgactacaccctgacaatatccagcctccagcctgaggacttcgccacctactactgtcagcagagctggaacaccccttggacattcggccagggcaccaagctggaaatcaagagaggcggaggcggaagtggaggcggaggatctggcggcggaggctctcaagttcagcttcaacagcctggcgctgagctggtcaaacctggcgcttctgtgaagatgagctgcaaagccagcggctacaccttcagcagctactggatcaactggatgaagcagaaacccggccagggactcgaatggatcggccaaatctatcccggcgacggcgacaccaactacaacggcaagttcaagggcagagccacactgaccgccgatacctctagcagcacagcctacatgcagctgagcagcctgaccagcgaagatagcgccgtgtacttctgtgcccggtccatcacaacagtcgtgggctgcgctatggactattggggccagggaacaagcgtgaccgtgtctagtacgcgtggacagcctaaggccaatcctaccgtgacactgttccctccaagcagcgaagaactccaggccaacaaggccacacttgtgtgcctgatctccgacttctaccctggggctgtgacagtggcttggaaggccgatggatctcctgtgaaagccggcgtggaaaccaccaagccatccaagcagagcaacaacaaatacgccgccagctcctacctgagcctgacacctgagcagtggaagtcccacagatcctacagctgccaagtgacccacgaaggcagcaccgtggaaaagacagtggcccctacagagtgcagccccatcaagaccgatgtgattacaatggaccccaaggacaactgctccaaggacgccaacgataccctgctgctccagctgaccaacaccagcgcctactacatgtacttgttgctgctgctgaagtccgtggtgtacttcgccatcatcacatgctgcctgctgcggagaaccgccttctgctgcaacggcgagaagtctcgcgccaagagaagcggatctggcgtgaagcagaccctgaatttcgacctgctgaagctggctggcgacgtggaatccaacccaggcccttctagaggccatatgaccgagtacaagcccacggtgcgcctcgccacccgcgacgacgtccccagggccgtacgcaccctcgccgccgcgttcgccgactaccccgccacgcgccacaccgtcgatccggaccgccacatcgagcgggtcaccgagctgcaagaactcttcctcacgcgcgtcgggctcgacatcggcaaggtgtgggtcgcggacgacggcgccgcggtggcggtctggaccacgccggagagcgtcgaagcgggggcggtgttcgccgagatcggcccgcgcatggccgagttgagcggttcccggctggccgcgcagcaacagatggaaggcctcctggcgccgcaccggcccaaggagcccgcgtggttcctggccaccgtcggcgtctcgcccgaccaccagggcaagggtctgggcagcgccgtcgtgctccccggagtggaggcggccgagcgcgccggggtgcccgccttcctggagacctccgcgccccgcaacctccccttctacgagcggctcggcttcaccgtcaccgccgacgtcgaggtgcccgaaggaccgcgcacctggtgcatgacccgcaagcccggtgcctga

SEQ ID NO: 33988 - DNA, 2703 bp, synthetic construct
  source 1..2703: mol_type = other DNA
atggccttaccagtgaccgccttgctcctgccgctggccttgctgctccacgccgccaggccgctcgagggacagcctaaggccaatcctaccgtgacactgttccctccaagcagcgaagaactccaggccaacaaggccacacttgtgtgcctgatctccgacttctaccctggggctgtgacagtggcttggaaggccgatggatctcctgtgaaagccggcgtggaaaccaccaagccatccaagcagagcaacaacaaatacgccgccagctcctacctgagcctgacacctgagcagtggaagtcccacagatcctacagctgccaagtgacccacgaaggcagcaccgtggaaaagacagtggcccctacagagtgcagccccatcaagaccgatgtgattacaatggaccccaaggacaactgctccaaggacgccaacgataccctgctgctccagctgaccaacaccagcgcctactacatgtacttgttgctgctgctgaagtccgtggtgtacttcgccatcatcacatgctgcctgctgcggagaaccgccttctgctgcaacggcgagaagtctagggccaagcgatctggatctggagcaacaaacttctcactactcaaacaagcaggtgacgtggaggagaatcccgggcctactagcatggccttaccagtgaccgccttgctcctgccgctggccttgctgctccacgccgccaggccggacatccagatgacacagagccctagcagcctgtctgccagcgtgggagacagagtgaccatcacatgcaaggccagcgaccacatcaacaactggctggcctggtatcagcagaagcctggacaggcccctaagctgctgatctacggcgctaccacactggaaacaggcgtgcccagcagattttctggcagcggctctggcaccgactacaccctgacaatatccagcctccagcctgaggacttcgccacctactactgtcagcagagctggaacaccccttggacattcggccagggcaccaagctggaaatcaagagaggcggaggcggaagtggaggcggaggatctggcggcggaggctctcaagttcagcttcaacagcctggcgctgagctggtcaaacctggcgcttctgtgaagatgagctgcaaagccagcggctacaccttcagcagctactggatcaactggatgaagcagaaacccggccagggactcgaatggatcggccaaatctatcccggcgacggcgacaccaactacaacggcaagttcaagggcagagccacactgaccgccgatacctctagcagcacagcctacatgcagctgagcagcctgaccagcgaagatagcgccgtgtacttctgtgcccggtccatcacaacagtcgtgggctgcgctatggactattggggccagggaacaagcgtgaccgtgtctagtacgcgtgaggaggacctgaagaacgtgttcccacctgaggtggccgtgttcgagcctagcgaggccgagatcagccacacccagaaagccaccctcgtgtgcctggctaccggcttctaccccgaccatgtggaactgtcttggtgggtcaacggcaaagaggtgcacagcggcgtgtgtaccgacccccagccactgaaagaacagcccgccctgaacgacagccggtactgcctgagcagcagactgagagtgtccgccaccttctggcagaacccccggaaccacttcagatgccaggtgcagttctacggcctgagcgagaacgacgagtggacccaggacagagccaagcccgtgacccagatcgtgtctgccgaagcctggggcagagccgattgcggctttaccagcgagagctaccagcagggcgtgctgagcgccaccaacctgagcgtgatcggcttcagaatcctgctgctgaaagtggccggctttaacctgctgatgaccctgcggctgtggtccagccgcgccaagagaagcggatctggcgtgaagcagaccctgaatttcgacctgctgaagctggctggcgacgtggaatccaacccaggcccttctagaggccatatgaccgagtacaagcccacggtgcgcctcgccacccgcgacgacgtccccagggccgtacgcaccctcgccgccgcgttcgccgactaccccgccacgcgccacaccgtcgatccggaccgccacatcgagcgggtcaccgagctgcaagaactcttcctcacgcgcgtcgggctcgacatcggcaaggtgtgggtcgcggacgacggcgccgcggtggcggtctggaccacgccggagagcgtcgaagcgggggcggtgttcgccgagatcggcccgcgcatggccgagttgagcggttcccggctggccgcgcagcaacagatggaaggcctcctggcgccgcaccggcccaaggagcccgcgtggttcctggccaccgtcggcgtctcgcccgaccaccagggcaagggtctgggcagcgccgtcgtgctccccggagtggaggcggccgagcgcgccggggtgcccgccttcctggagacctccgcgccccgcaacctccccttctacgagcggctcggcttcaccgtcaccgccgacgtcgaggtgcccgaaggaccgcgcacctggtgcatgacccgcaagcccggtgcctga

SEQ ID NO: 33989 - DNA, 2694 bp, synthetic construct
  source 1..2694: mol_type = other DNA
atggccttaccagtgaccgccttgctcctgccgctggccttgctgctccacgccgccaggccgctcgaggaggcctctacaaagggaccctccgtgtttcctctggctcccagcagcaagtctacaagcggaggaacagccgctctgggctgcctggtcaaggattactttcccgagcctgtgaccgtgtcctggaatagcggagcactgacaagcggcgtgcacacctttccagccgtgctgcaaagcagcggcctgtactctctgagcagcgtggtcacagtgcctagctctagcctgggcacccagacctacatctgcaatgtgaaccacaagcctagcaacaccaaggtggacaagagagtggaacccaagagctgtcccatcaagaccgatgtgattacaatggaccccaaggacaactgctccaaggacgccaacgataccctgctgctccagctgaccaacaccagcgcctactacatgtacttgttgctgctgctgaagtccgtggtgtacttcgccatcatcacatgctgcctgctgcggagaaccgccttctgctgcaacggcgagaagtctagggccaagcgatctggatctggagcaacaaacttctcactactcaaacaagcaggtgacgtggaggagaatcccgggcctactagcatggccttaccagtgaccgccttgctcctgccgctggccttgctgctccacgccgccaggccggacatccagatgacacagagccctagcagcctgtctgccagcgtgggagacagagtgaccatcacatgcaaggccagcgaccacatcaacaactggctggcctggtatcagcagaagcctggacaggcccctaagctgctgatctacggcgctaccacactggaaacaggcgtgcccagcagattttctggcagcggctctggcaccgactacaccctgacaatatccagcctccagcctgaggacttcgccacctactactgtcagcagagctggaacaccccttggacattcggccagggcaccaagctggaaatcaagagaggcggaggcggaagtggaggcggaggatctggcggcggaggctctcaagttcagcttcaacagcctggcgctgagctggtcaaacctggcgcttctgtgaagatgagctgcaaagccagcggctacaccttcagcagctactggatcaactggatgaagcagaaacccggccagggactcgaatggatcggccaaatctatcccggcgacggcgacaccaactacaacggcaagttcaagggcagagccacactgaccgccgatacctctagcagcacagcctacatgcagctgagcagcctgaccagcgaagatagcgccgtgtacttctgtgcccggtccatcacaacagtcgtgggctgcgctatggactattggggccagggaacaagcgtgaccgtgtctagtacgcgtggacagcctaaggccaatcctaccgtgacactgttccctccaagcagcgaagaactccaggccaacaaggccacacttgtgtgcctgatctccgacttctaccctggggctgtgacagtggcttggaaggccgatggatctcctgtgaaagccggcgtggaaaccaccaagccatccaagcagagcaacaacaaatacgccgccagctcctacctgagcctgacacctgagcagtggaagtcccacagatcctacagctgccaagtgacccacgaaggcagcaccgtggaaaagacagtggcccctacagagtgcagcgaagtgaaaaccgactccaccgaccacgtgaagcccaaagagacagagaacaccaagcagcccagcaagagctgccacaagcccaaggccatcgtgcacaccgagaaagtgaacatgatgagcctgaccgtgctgggcctgcggatgctgttcgccaaaaccgtggccgtgaacttcctgctgaccgccaagctgttcttcctccgcgccaagagaagcggatctggcgtgaagcagaccctgaatttcgacctgctgaagctggctggcgacgtggaatccaacccaggcccttctagaggccatatgaccgagtacaagcccacggtgcgcctcgccacccgcgacgacgtccccagggccgtacgcaccctcgccgccgcgttcgccgactaccccgccacgcgccacaccgtcgatccggaccgccacatcgagcgggtcaccgagctgcaagaactcttcctcacgcgcgtcgggctcgacatcggcaaggtgtgggtcgcggacgacggcgccgcggtggcggtctggaccacgccggagagcgtcgaagcgggggcggtgttcgccgagatcggcccgcgcatggccgagttgagcggttcccggctggccgcgcagcaacagatggaaggcctcctggcgccgcaccggcccaaggagcccgcgtggttcctggccaccgtcggcgtctcgcccgaccaccagggcaagggtctgggcagcgccgtcgtgctccccggagtggaggcggccgagcgcgccggggtgcccgccttcctggagacctccgcgccccgcaacctccccttctacgagcggctcggcttcaccgtcaccgccgacgtcgaggtgcccgaaggaccgcgcacctggtgcatgacccgcaagcccggtgcctga

SEQ ID NO: 33990 - DNA, 2628 bp, synthetic construct
  source 1..2628: mol_type = other DNA
atggccttaccagtgaccgccttgctcctgccgctggccttgctgctccacgccgccaggccgctcgaggaggcctctacaaagggaccctccgtgtttcctctggctcccagcagcaagtctacaagcggaggaacagccgctctgggctgcctggtcaaggattactttcccgagcctgtgaccgtgtcctggaatagcggagcactgacaagcggcgtgcacacctttccagccgtgctgcaaagcagcggcctgtactctctgagcagcgtggtcacagtgcctagctctagcctgggcacccagacctacatctgcaatgtgaaccacaagcctagcaacaccaaggtggacaagagagtggaacccaagagctgtggcagagccgattgcggctttaccagcgagagctaccagcagggcgtgctgagcgccaccatcctgtacgagatcctgctgggcaaggccaccctgtacgccgtgctggtgtctgccctggtgctgatggctatggtcaagcggaaggacagccggggaagggccaagcgatctggatctggagcaacaaacttctcactactcaaacaagcaggtgacgtggaggagaatcccgggcctactagcatggccttaccagtgaccgccttgctcctgccgctggccttgctgctccacgccgccaggccggacatccagatgacacagagccctagcagcctgtctgccagcgtgggagacagagtgaccatcacatgcaaggccagcgaccacatcaacaactggctggcctggtatcagcagaagcctggacaggcccctaagctgctgatctacggcgctaccacactggaaacaggcgtgcccagcagattttctggcagcggctctggcaccgactacaccctgacaatatccagcctccagcctgaggacttcgccacctactactgtcagcagagctggaacaccccttggacattcggccagggcaccaagctggaaatcaagagaggcggaggcggaagtggaggcggaggatctggcggcggaggctctcaagttcagcttcaacagcctggcgctgagctggtcaaacctggcgcttctgtgaagatgagctgcaaagccagcggctacaccttcagcagctactggatcaactggatgaagcagaaacccggccagggactcgaatggatcggccaaatctatcccggcgacggcgacaccaactacaacggcaagttcaagggcagagccacactgaccgccgatacctctagcagcacagcctacatgcagctgagcagcctgaccagcgaagatagcgccgtgtacttctgtgcccggtccatcacaacagtcgtgggctgcgctatggactattggggccagggaacaagcgtgaccgtgtctagtacgcgtggacagcctaaggccaatcctaccgtgacactgttccctccaagcagcgaagaactccaggccaacaaggccacacttgtgtgcctgatctccgacttctaccctggggctgtgacagtggcttggaaggccgatggatctcctgtgaaagccggcgtggaaaccaccaagccatccaagcagagcaacaacaaatacgccgccagctcctacctgagcctgacacctgagcagtggaagtcccacagatcctacagctgccaagtgacccacgaaggcagcaccgtggaaaagacagtggcccctacagagtgcagcatccccgaggacacattcttcccaagccccgagagcagctgcgacgtgaagctggtggaaaagagcttcgagacagacaccaacctgaacttccagaacctgagcgtgatcggcttcagaatcctgctgctgaaagtggccggctttaacctgctgatgaccctgcggctgtggtccagccgcgccaagagaagcggatctggcgtgaagcagaccctgaatttcgacctgctgaagctggctggcgacgtggaatccaacccaggcccttctagaggccatatgaccgagtacaagcccacggtgcgcctcgccacccgcgacgacgtccccagggccgtacgcaccctcgccgccgcgttcgccgactaccccgccacgcgccacaccgtcgatccggaccgccacatcgagcgggtcaccgagctgcaagaactcttcctcacgcgcgtcgggctcgacatcggcaaggtgtgggtcgcggacgacggcgccgcggtggcggtctggaccacgccggagagcgtcgaagcgggggcggtgttcgccgagatcggcccgcgcatggccgagttgagcggttcccggctggccgcgcagcaacagatggaaggcctcctggcgccgcaccggcccaaggagcccgcgtggttcctggccaccgtcggcgtctcgcccgaccaccagggcaagggtctgggcagcgccgtcgtgctccccggagtggaggcggccgagcgcgccggggtgcccgccttcctggagacctccgcgccccgcaacctccccttctacgagcggctcggcttcaccgtcaccgccgacgtcgaggtgcccgaaggaccgcgcacctggtgcatgacccgcaagcccggtgcctga

SEQ ID NO: 33991 - DNA, 2628 bp, synthetic construct
  source 1..2628: mol_type = other DNA
atggccttaccagtgaccgccttgctcctgccgctggccttgctgctccacgccgccaggccgctcgaggaggcctctacaaagggaccctccgtgtttcctctggctcccagcagcaagtctacaagcggaggaacagccgctctgggctgcctggtcaaggattactttcccgagcctgtgaccgtgtcctggaatagcggagcactgacaagcggcgtgcacacctttccagccgtgctgcaaagcagcggcctgtactctctgagcagcgtggtcacagtgcctagctctagcctgggcacccagacctacatctgcaatgtgaaccacaagcctagcaacaccaaggtggacaagagagtggaacccaagagctgtatccccgaggacacattcttcccaagccccgagagcagctgcgacgtgaagctggtggaaaagagcttcgagacagacaccaacctgaacttccagaacctgagcgtgatcggcttcagaatcctgctgctgaaagtggccggctttaacctgctgatgaccctgcggctgtggtccagcagggccaagcgatctggatctggagcaacaaacttctcactactcaaacaagcaggtgacgtggaggagaatcccgggcctactagcatggccttaccagtgaccgccttgctcctgccgctggccttgctgctccacgccgccaggccggacatccagatgacacagagccctagcagcctgtctgccagcgtgggagacagagtgaccatcacatgcaaggccagcgaccacatcaacaactggctggcctggtatcagcagaagcctggacaggcccctaagctgctgatctacggcgctaccacactggaaacaggcgtgcccagcagattttctggcagcggctctggcaccgactacaccctgacaatatccagcctccagcctgaggacttcgccacctactactgtcagcagagctggaacaccccttggacattcggccagggcaccaagctggaaatcaagagaggcggaggcggaagtggaggcggaggatctggcggcggaggctctcaagttcagcttcaacagcctggcgctgagctggtcaaacctggcgcttctgtgaagatgagctgcaaagccagcggctacaccttcagcagctactggatcaactggatgaagcagaaacccggccagggactcgaatggatcggccaaatctatcccggcgacggcgacaccaactacaacggcaagttcaagggcagagccacactgaccgccgatacctctagcagcacagcctacatgcagctgagcagcctgaccagcgaagatagcgccgtgtacttctgtgcccggtccatcacaacagtcgtgggctgcgctatggactattggggccagggaacaagcgtgaccgtgtctagtacgcgtggacagcctaaggccaatcctaccgtgacactgttccctccaagcagcgaagaactccaggccaacaaggccacacttgtgtgcctgatctccgacttctaccctggggctgtgacagtggcttggaaggccgatggatctcctgtgaaagccggcgtggaaaccaccaagccatccaagcagagcaacaacaaatacgccgccagctcctacctgagcctgacacctgagcagtggaagtcccacagatcctacagctgccaagtgacccacgaaggcagcaccgtggaaaagacagtggcccctacagagtgcagcggcagagccgattgcggctttaccagcgagagctaccagcagggcgtgctgagcgccaccatcctgtacgagatcctgctgggcaaggccaccctgtacgccgtgctggtgtctgccctggtgctgatggctatggtcaagcggaaggacagccggggacgcgccaagagaagcggatctggcgtgaagcagaccctgaatttcgacctgctgaagctggctggcgacgtggaatccaacccaggcccttctagaggccatatgaccgagtacaagcccacggtgcgcctcgccacccgcgacgacgtccccagggccgtacgcaccctcgccgccgcgttcgccgactaccccgccacgcgccacaccgtcgatccggaccgccacatcgagcgggtcaccgagctgcaagaactcttcctcacgcgcgtcgggctcgacatcggcaaggtgtgggtcgcggacgacggcgccgcggtggcggtctggaccacgccggagagcgtcgaagcgggggcggtgttcgccgagatcggcccgcgcatggccgagttgagcggttcccggctggccgcgcagcaacagatggaaggcctcctggcgccgcaccggcccaaggagcccgcgtggttcctggccaccgtcggcgtctcgcccgaccaccagggcaagggtctgggcagcgccgtcgtgctccccggagtggaggcggccgagcgcgccggggtgcccgccttcctggagacctccgcgccccgcaacctccccttctacgagcggctcggcttcaccgtcaccgccgacgtcgaggtgcccgaaggaccgcgcacctggtgcatgacccgcaagcccggtgcctga

SEQ ID NO: 33992 - DNA, 1866 bp, synthetic construct
  source 1..1866: mol_type = other DNA
atggccttaccagtgaccgccttgctcctgccgctggccttgctgctccacgccgccaggccggacatccagatgacacagagccctagcagcctgtctgccagcgtgggagacagagtgaccatcacatgcaaggccagcgaccacatcaacaactggctggcctggtatcagcagaagcctggacaggcccctaagctgctgatctacggcgctaccacactggaaacaggcgtgcccagcagattttctggcagcggctctggcaccgactacaccctgacaatatccagcctccagcctgaggacttcgccacctactactgtcagcagagctggaacaccccttggacattcggccagggcaccaagctggaaatcaagagactcgaggacctgaagaacgtgttcccacctgaggtggccgtgttcgagcctagcgaggccgagatcagccacacccagaaagccaccctcgtgtgcctggctaccggcttctaccccgaccatgtggaactgtcttggtgggtcaacggcaaagaggtgcacagcggcgtgtgtaccgacccccagccactgaaagaacagcccgccctgaacgacagccggtactgcctgagcagcagactgagagtgtccgccaccttctggcagaacccccggaaccacttcagatgccaggtgcagttctacggcctgagcgagaacgacgagtggacccaggacagagccaagcccgtgacccagatcgtgtctgccgaagcctggggcagagccgatagcggctttaccagcgagagctaccagcagggcgtgctgagcgccaccatcctgtacgagatcctgctgggcaaggccaccctgtacgccgtgctggtgtctgccctggtgctgatggctatggtcaagcggaaggacagccggggaagggccaagcgatctggatctggagcaacaaacttctcactactcaaacaagcaggtgacgtggaggagaatcccgggcctactagtatggactggatttggcgcatccttttccttgtcggcgctgctaccggcgcgcattccttcgaacaagttcagcttcaacagcctggcgctgagctggtcaaacctggcgcttctgtgaagatgagctgcaaagccagcggctacaccttcagcagctactggatcaactggatgaagcagaaacccggccagggactcgaatggatcggccaaatctatcccggcgacggcgacaccaactacaacggcaagttcaagggcagagccacactgaccgccgatacctctagcagcacagcctacatgcagctgagcagcctgaccagcgaagatagcgccgtgtacttctgtgcccggtccatcacaacagtcgtgggctgcgctatggactattggggccagggaacaagcgtgaccgtgtctagtacgcgtatccagaaccctgatcctgccgtgtaccagctgcgggatagcaagagcagcgacaagagcgtgtgtctgttcaccgacttcgacagccagaccaacgtgtcccagagcaaggactccgacgtgtacatcaccgataagtgcgtgctggacatgcggagcatggacttcaagagcaactccgccgtggcctggtccaacaagtccgatttcgcctgcgccaacgccttcaacaacagcattatccccgaggacacattcttcccaagccccgagagcagcagcgacgtgaagctggtggaaaagagcttcgagacagacaccaacctgaacttccagaacctgagcgtgatcggcttcagaatcctgctgctgaaagtggccggctttaacctgctgatgaccctgcggctgtggtccagc

SEQ ID NO: 33993 - DNA, 2706 bp, synthetic construct
  source 1..2706: mol_type = other DNA
atggccttaccagtgaccgccttgctcctgccgctggccttgctgctccacgccgccaggccggaggttcagctgcttgagtctggcggaggactggttcaacctggcggaagcctgagactgtcttgtgccgcctctggcagaaccttcagcatgggctggtatagacaggcccctggcaagggcctcgaatttgtgtctgccatcacatacagcggcggcagcccttactacgccgattctgtgaagggcagattcaccatcagccgggacaacagcaagaacaccgtgtacctccagatgaacagcctgagagccgaggacaccgccgtgtactactgtgccgccaatccaacctacggcagcgactggaatgccgagaattggggccagggcacactggtcacagtgtctagtggtaccggcggaggcggatctggcggcggaggtagcggtggcggaggatctgaattcgacatccagatgacacagagccctagcagcctgtctgccagcgtgggagacagagtgaccatcacatgcaaggccagcgaccacatcaacaactggctggcctggtatcagcagaagcctggacaggcccctaagctgctgatctacggcgctaccacactggaaacaggcgtgcccagcagattttctggcagcggctctggcaccgactacaccctgacaatatccagcctccagcctgaggacttcgccacctactactgtcagcagagctggaacaccccttggacattcggccagggcaccaagctggaaatcaagagactcgagatccagaaccctgatcctgccgtgtaccagctgcgggatagcaagagcagcgacaagagcgtgtgtctgttcaccgacttcgacagccagaccaacgtgtcccagagcaaggactccgacgtgtacatcaccgataagtgcgtgctggacatgcggagcatggacttcaagagcaactccgccgtggcctggtccaacaagtccgatttcgcctgcgccaacgccttcaacaacagcattatccccgaggacacattcttcccaagcagcgacgtgccctgcgacgtgaagctggtggaaaagagcttcgagacagacaccaacctgaacttccagaacctgagcgtgatcggcttcagaatcctgctgctgaaagtggccggctttaacctgctgatgaccctgcggctgtggtccagccgcgccaagagaagcggatctggcgtgaagcagaccctgaatttcgacctgctgaagctggctggcgacgtggaatccaacccaggccctactagtaccatggactggatttggcgcatccttttccttgtcggcgctgctaccggcacccattccgggcccgaagtgcaactggttgaatccggtggcggcctggtgcaacccggcggatctctcagacttagctgtgccgcctccggcagaaccttcacaatgggatggtacaggcaggctccagggaaagagagagagttcgtcgccgccatctctctgtctcccacactggcctactacgccgactctgtgaaaggccggttcaccatctccagagataatagcaagaacaccgtggtgctgcaaatgaactctctgagagccgaggatacagccctgtactattgtgccgctgaccggaagtccgtgatgagcatcagacccgattactggggacagggcacactggtcacagtgtctagtggatccggcggcggaggatctggcggaggcggatctgggggcggaggctctttcgaacaagttcagcttcaacagcctggcgctgagctggtcaaacctggcgcttctgtgaagatgagctgcaaagccagcggctacaccttcagcagctactggatcaactggatgaagcagaaacccggccagggactcgaatggatcggccaaatctatcccggcgacggcgacaccaactacaacggcaagttcaagggcagagccacactgaccgccgatacctctagcagcacagcctacatgcagctgagcagcctgaccagcgaagatagcgccgtgtacttctgtgcccggtccatcacaacagtcgtgggctgcgctatggactattggggccagggaacaagcgtgaccgtgtctagtacgcgtgaggacctgaagaacgtgttcccacctgaggtggccgtgttcgagcctagcaaggccgagatcgcccacacccagaaagccaccctcgtgtgcctggctaccggcttctaccccgaccatgtggaactgtcttggtgggtcaacggcaaagaggtgcacagcggcgtgtgtaccgacccccagccactgaaagaacagcccgccctgaacgacagccggtactgcctgagcagcagactgagagtgtccgccaccttctggcagaacccccggaaccacttcagatgccaggtgcagttctacggcctgagcgagaacgacgagtggacccaggacagagccaagcccgtgacccagatcgtgtctgccgaagcctggggcagagccgattgcggcatcaccagcgccagctaccaccagggcgtgctgagcgccaccatcctgtacgagatcctgctgggcaaggccaccctgtacgccgtgctggtgtctgccctggtgctgatggctatggtcaagcggaaggacagccggggataa

SEQ ID NO: 33994 - DNA, 2706 bp, synthetic construct
  source 1..2706: mol_type = other DNA
atggccttaccagtgaccgccttgctcctgccgctggccttgctgctccacgccgccaggccggaagtgcagctggttgaatctggcggaggactggttcaggctggcggatctctgagactgtcttgtgccgccagcggcagaacctttagcatgggctggtttagacaggcccctggcaaagagagagagttcgtcgccgccatcacatactctggcggcagcccttactacgccgactctgtgaagggcagattcaccatcagccgggacaacgccaagaacaccgtgtacctccagatgaacagcctgaagcctgaggacaccgccgtgtactactgcgccgccaatccaacatacggcagcgactggaacgccgagaattggggccagggaacccaagtgacagtgtctagcggtaccggcggaggcggatctggcggcggaggtagcggtggcggaggatctgaattcgacatccagatgacacagagccctagcagcctgtctgccagcgtgggagacagagtgaccatcacatgcaaggccagcgaccacatcaacaactggctggcctggtatcagcagaagcctggacaggcccctaagctgctgatctacggcgctaccacactggaaacaggcgtgcccagcagattttctggcagcggctctggcaccgactacaccctgacaatatccagcctccagcctgaggacttcgccacctactactgtcagcagagctggaacaccccttggacattcggccagggcaccaagctggaaatcaagagactcgagatccagaaccctgatcctgccgtgtaccagctgcgggatagcaagagcagcgacaagagcgtgtgtctgttcaccgacttcgacagccagaccaacgtgtcccagagcaaggactccgacgtgtacatcaccgataagtgcgtgctggacatgcggagcatggacttcaagagcaactccgccgtggcctggtccaacaagtccgatttcgcctgcgccaacgccttcaacaacagcattatccccgaggacacattcttcccaagcagcgacgtgccctgcgacgtgaagctggtggaaaagagcttcgagacagacaccaacctgaacttccagaacctgagcgtgatcggcttcagaatcctgctgctgaaagtggccggctttaacctgctgatgaccctgcggctgtggtccagccgcgccaagagaagcggatctggcgtgaagcagaccctgaatttcgacctgctgaagctggctggcgacgtggaatccaacccaggccctactagtaccatggactggatttggcgcatccttttccttgtcggcgctgctaccggcgcccattccgggcccgaagtgcaactggttgaatccggtggcggcctggtgcaacccggcggatctctcagacttagctgtgccgcctccggcagaaccttcacaatgggatggtacaggcaggctccagggaaagagagagagttcgtcgccgccatctctctgtctcccacactggcctactacgccgactctgtgaaaggccggttcaccatctccagagataatagcaagaacaccgtggtgctgcaaatgaactctctgagagccgaggatacagccctgtactattgtgccgctgaccggaagtccgtgatgagcatcagacccgattactggggacagggcacactggtcacagtgtctagtggatccggcggcggaggatctggcggaggcggatctgggggcggaggctctttcgaacaagttcagcttcaacagcctggcgctgagctggtcaaacctggcgcttctgtgaagatgagctgcaaagccagcggctacaccttcagcagctactggatcaactggatgaagcagaaacccggccagggactcgaatggatcggccaaatctatcccggcgacggcgacaccaactacaacggcaagttcaagggcagagccacactgaccgccgatacctctagcagcacagcctacatgcagctgagcagcctgaccagcgaagatagcgccgtgtacttctgtgcccggtccatcacaacagtcgtgggctgcgctatggactattggggccagggaacaagcgtgaccgtgtctagtacgcgtgaggacctgaagaacgtgttcccacctgaggtggccgtgttcgagcctagcaaggccgagatcgcccacacccagaaagccaccctcgtgtgcctggctaccggcttctaccccgaccatgtggaactgtcttggtgggtcaacggcaaagaggtgcacagcggcgtgtgtaccgacccccagccactgaaagaacagcccgccctgaacgacagccggtactgcctgagcagcagactgagagtgtccgccaccttctggcagaacccccggaaccacttcagatgccaggtgcagttctacggcctgagcgagaacgacgagtggacccaggacagagccaagcccgtgacccagatcgtgtctgccgaagcctggggcagagccgattgcggcatcaccagcgccagctaccaccagggcgtgctgagcgccaccatcctgtacgagatcctgctgggcaaggccaccctgtacgccgtgctggtgtctgccctggtgctgatggctatggtcaagcggaaggacagccggggataa

SEQ ID NO: 33995 - DNA, 2697 bp, synthetic construct
  source 1..2697: mol_type = other DNA
atggccttaccagtgaccgccttgctcctgccgctggccttgctgctccacgccgccaggccggaagtgcagctggttgaatctggcggaggactggttcaggctggcggatctctgagactgtcttgtgccgccagcggcagaacctttagcatgggctggtttagacaggcccctggcaaagagagagagttcgtcgccgccatcacatactctggcggcagcccttactacgccgactctgtgaagggcagattcaccatcagccgggacaacgccaagaacaccgtgtacctccagatgaacagcctgaagcctgaggacaccgccgtgtactactgcgccgccaatccaacatacggcagcgactggaacgccgagaattggggccagggaacccaagtgacagtgtctagcggtaccggcggaggcggatctggcggcggaggtagcggtggcggaggatctgaattcgacatccagatgacacagagccctagcagcctgtctgccagcgtgggagacagagtgaccatcacatgcaaggccagcgaccacatcaacaactggctggcctggtatcagcagaagcctggacaggcccctaagctgctgatctacggcgctaccacactggaaacaggcgtgcccagcagattttctggcagcggctctggcaccgactacaccctgacaatatccagcctccagcctgaggacttcgccacctactactgtcagcagagctggaacaccccttggacattcggccagggcaccaagctggaaatcaagagactcgaggacctgaagaacgtgttcccacctgaggtggccgtgttcgagcctagcgaggccgagatcagccacacccagaaagccaccctcgtgtgcctggctaccggcttctaccccgaccatgtggaactgtcttggtgggtcaacggcaaagaggtgcacagcggcgtgtgtaccgacccccagccactgaaagaacagcccgccctgaacgacagccggtactgcctgagcagcagactgagagtgtccgccaccttctggcagaacccccggaaccacttcagatgccaggtgcagttctacggcctgagcgagaacgacgagtggacccaggacagagccaagcccgtgacccagatcgtgtctgccgaagcctggggcagagccgattgcggctttaccagcgagagctaccagcagggcgtgctgagcgccaccatcctgtacgagatcctgctgggcaaggccaccctgtacgccgtgctggtgtctgccctggtgctgatggctatggtcaagcggaaggacagccggggaagggccaagcgatctggatctggagcaacaaacttctcactactcaaacaagcaggtgacgtggaggagaatcccgggcctactagtgccaccatggactggatttggcgcatccttttccttgtcggcgctgctaccggcgcccattccgggcccgaagtgcaactggttgaatccggtggcggcctggtgcaagcaggcggatctctcagacttagctgtgccgcctccggcagaaccttcacaatgggatggtttaggcaggctccagggaaagagagagagttcgtcgccgccatctctctgtctcccacactggcctactacgccgactctgtgaaaggccggttcaccatctccagagataatgccaagaacaccgtggtgctgcaaatgaactctctgaaacccgaggatacagccctgtactattgtgccgctgaccggaagtccgtgatgagcatcagacccgattactggggacagggcacacaagtcacagtgtcctctggatccggcggcggaggatctggcggaggcggatctgggggcggaggctctttcgaacaagttcagcttcaacagcctggcgctgagctggtcaaacctggcgcttctgtgaagatgagctgcaaagccagcggctacaccttcagcagctactggatcaactggatgaagcagaaacccggccagggactcgaatggatcggccaaatctatcccggcgacggcgacaccaactacaacggcaagttcaagggcagagccacactgaccgccgatacctctagcagcacagcctacatgcagctgagcagcctgaccagcgaagatagcgccgtgtacttctgtgcccggtccatcacaacagtcgtgggctgcgctatggactattggggccagggaacaagcgtgaccgtgtctagtacgcgtatccagaaccctgatcctgccgtgtaccagctgcgggatagcaagagcagcgacaagagcgtgtgtctgttcaccgacttcgacagccagaccaacgtgtcccagagcaaggactccgacgtgtacatcaccgataagtgcgtgctggacatgcggagcatggacttcaagagcaactccgccgtggcctggtccaacaagtccgatttcgcctgcgccaacgccttcaacaacagcattatccccgaggacacattcttcccaagccccgagagcagctgcgacgtgaagctggtggaaaagagcttcgagacagacaccaacctgaacttccagaacctgagcgtgatcggcttcagaatcctgctgctgaaagtggccggctttaacctgctgatgaccctgcggctgtggtccagctaa

SEQ ID NO: 33996 - DNA, 2310 bp, synthetic construct
  source 1..2310: mol_type = other DNA
atggccttaccagtgaccgccttgctcctgccgctggccttgctgctccacgccgccaggccggaagtgcagctggttgaatctggcggaggactggttcagcctggcggatctctgagactgagctgtgaagccagcggcttcgccagcgacgattacatcatcggctggttcagacaggcccctggcaaagagagagagggcgtcagctgcatcagctctaagtacgccaacaccgtgtacaccgacagcgtgaagggcagattcagactgagcagaggcaccgccaagaataccgtgtacctccagatgagcgccctgaagcctgaggataccgccgtgtactactgcgctatggacagccgcagagtgacatgccctgagatcagcaccatgcaccggaacttcgattcttggggccagggcacactggtcacagtgtcatctggtaccggcggaggcggatctggcggcggaggtagcggtggcggaggatctgaattcgacatccagatgacacagagccctagcagcctgtctgccagcgtgggagacagagtgaccatcacatgcaaggccagcgaccacatcaacaactggctggcctggtatcagcagaagcctggacaggcccctaagctgctgatctacggcgctaccacactggaaacaggcgtgcccagcagattttctggcagcggctctggcaccgactacaccctgacaatatccagcctccagcctgaggacttcgccacctactactgtcagcagagctggaacaccccttggacattcggccagggcaccaagctggaaatcaagagactcgaggacctgaagaacgtgttcccacctgaggtggccgtgttcgagcctagcaaggccgagatcgcccacacccagaaagccaccctcgtgtgcctggctaccggcttctaccccgaccatgtggaactgtcttggtgggtcaacggcaaagaggtgcacagcggcgtgtgtaccgacccccagccactgaaagaacagcccgccctgaacgacagccggtactgcctgagcagcagactgagagtgtccgccaccttctggcagaacccccggaaccacttcagatgccaggtgcagttctacggcctgagcgagaacgacgagtggacccaggacagagccaagcccgtgacccagatcgtgtctgccgaagcctggggcagagccgattgcggcatcaccagcgccagctaccaccagggcgtgctgagcgccaccatcctgtacgagatcctgctgggcaaggccaccctgtacgccgtgctggtgtctgccctggtgctgatggctatggtcaagcggaaggacagccggggaagggccaagcgatctggatctggagcaacaaacttctcactactcaaacaagcaggtgacgtggaggagaatcccgggcctactagtatggactggatttggcgcatccttttccttgtcggcgctgctaccggcgcgcattccttcgaacaagttcagcttcaacagcctggcgctgagctggtcaaacctggcgcttctgtgaagatgagctgcaaagccagcggctacaccttcagcagctactggatcaactggatgaagcagaaacccggccagggactcgaatggatcggccaaatctatcccggcgacggcgacaccaactacaacggcaagttcaagggcagagccacactgaccgccgatacctctagcagcacagcctacatgcagctgagcagcctgaccagcgaagatagcgccgtgtacttctgtgcccggtccatcacaacagtcgtgggctgcgctatggactattggggccagggaacaagcgtgaccgtgtctagtacgcgtatccagaaccctgatcctgccgtgtaccagctgcgggatagcaagagcagcgacaagagcgtgtgtctgttcaccgacttcgacagccagaccaacgtgtcccagagcaaggactccgacgtgtacatcaccgataagtgcgtgctggacatgcggagcatggacttcaagagcaactccgccgtggcctggtccaacaagtccgatttcgcctgcgccaacgccttcaacaacagcattatccccgaggacacattcttcccaagcagcgacgtgccctgcgacgtgaagctggtggaaaagagcttcgagacagacaccaacctgaacttccagaacctgagcgtgatcggcttcagaatcctgctgctgaaagtggccggctttaacctgctgatgaccctgcggctgtggtccagctaa

SEQ ID NO: 33997 - DNA, 2283 bp, synthetic construct
  source 1..2283: mol_type = other DNA
atggccttaccagtgaccgccttgctcctgccgctggccttgctgctccacgccgccaggccggacatccagatgacacagagccctagcagcctgtctgccagcgtgggagacagagtgaccatcacatgcaaggccagcgaccacatcaacaactggctggcctggtatcagcagaagcctggacaggcccctaagctgctgatctacggcgctaccacactggaaacaggcgtgcccagcagattttctggcagcggctctggcaccgactacaccctgacaatatccagcctccagcctgaggacttcgccacctactactgtcagcagagctggaacaccccttggacattcggccagggcaccaagctggaaatcaagagactcgaggacctgaagaacgtgttcccacctgaggtggccgtgttcgagcctagcgaggccgagatcagccacacccagaaagccaccctcgtgtgcctggctaccggcttctaccccgaccatgtggaactgtcttggtgggtcaacggcaaagaggtgcacagcggcgtgtgtaccgacccccagccactgaaagaacagcccgccctgaacgacagccggtactgcctgagcagcagactgagagtgtccgccaccttctggcagaacccccggaaccacttcagatgccaggtgcagttctacggcctgagcgagaacgacgagtggacccaggacagagccaagcccgtgacccagatcgtgtctgccgaagcctggggcagagccgattgcggctttaccagcgagagctaccagcagggcgtgctgagcgccaccatcctgtacgagatcctgctgggcaaggccaccctgtacgccgtgctggtgtctgccctggtgctgatggctatggtcaagcggaaggacagccggggaagggccaagcgatctggatctggagcaacaaacttctcactactcaaacaagcaggtgacgtggaggagaatcccgggcctactagtaccatggactggatttggcgcatccttttccttgtcggcgctgctaccggcgcccattccgggcccgaagtgcaactggttgaatccggtggcggcctggtgcaacccggcggatctctcagacttagctgtgccgcctccggcagaaccttcacaatgggatggtacaggcaggctccagggaaagagagagagttcgtcgccgccatctctctgtctcccacactggcctactacgccgactctgtgaaaggccggttcaccatctccagagataatagcaagaacaccgtggtgctgcaaatgaactctctgagagccgaggatacagccctgtactattgtgccgctgaccggaagtccgtgatgagcatcagacccgattactggggacagggcacactggtcacagtgtctagtggatccggcggcggaggatctggcggaggcggatctgggggcggaggctctttcgaacaagttcagcttcaacagcctggcgctgagctggtcaaacctggcgcttctgtgaagatgagctgcaaagccagcggctacaccttcagcagctactggatcaactggatgaagcagaaacccggccagggactcgaatggatcggccaaatctatcccggcgacggcgacaccaactacaacggcaagttcaagggcagagccacactgaccgccgatacctctagcagcacagcctacatgcagctgagcagcctgaccagcgaagatagcgccgtgtacttctgtgcccggtccatcacaacagtcgtgggctgcgctatggactattggggccagggaacaagcgtgaccgtgtctagtacgcgtatccagaaccctgatcctgccgtgtaccagctgcgggatagcaagagcagcgacaagagcgtgtgtctgttcaccgacttcgacagccagaccaacgtgtcccagagcaaggactccgacgtgtacatcaccgataagtgcgtgctggacatgcggagcatggacttcaagagcaactccgccgtggcctggtccaacaagtccgatttcgcctgcgccaacgccttcaacaacagcattatccccgaggacacattcttcccaagccccgagagcagctgcgacgtgaagctggtggaaaagagcttcgagacagacaccaacctgaacttccagaacctgagcgtgatcggcttcagaatcctgctgctgaaagtggccggctttaacctgctgatgaccctgcggctgtggtccagctaa

SEQ ID NO: 33998 - DNA, 2301 bp, synthetic construct
  source 1..2301: mol_type = other DNA
atggccttaccagtgaccgccttgctcctgccgctggccttgctgctccacgccgccaggccggacatccagatgacacagagccctagcagcctgtctgccagcgtgggagacagagtgaccatcacatgcaaggccagcgaccacatcaacaactggctggcctggtatcagcagaagcctggacaggcccctaagctgctgatctacggcgctaccacactggaaacaggcgtgcccagcagattttctggcagcggctctggcaccgactacaccctgacaatatccagcctccagcctgaggacttcgccacctactactgtcagcagagctggaacaccccttggacattcggccagggcaccaagctggaaatcaagagactcgaggacctgaagaacgtgttcccacctgaggtggccgtgttcgagcctagcgaggccgagatcagccacacccagaaagccaccctcgtgtgcctggctaccggcttctaccccgaccatgtggaactgtcttggtgggtcaacggcaaagaggtgcacagcggcgtgtgtaccgacccccagccactgaaagaacagcccgccctgaacgacagccggtactgcctgagcagcagactgagagtgtccgccaccttctggcagaacccccggaaccacttcagatgccaggtgcagttctacggcctgagcgagaacgacgagtggacccaggacagagccaagcccgtgacccagatcgtgtctgccgaagcctggggcagagccgattgcggctttaccagcgagagctaccagcagggcgtgctgagcgccaccatcctgtacgagatcctgctgggcaaggccaccctgtacgccgtgctggtgtctgccctggtgctgatggctatggtcaagcggaaggacagccggggaagggccaagcgatctggatctggagcaacaaacttctcactactcaaacaagcaggtgacgtggaggagaatcccgggcctactagtaccatggactggatttggcgcatccttttccttgtcggcgctgctaccggcgcccattccgggccccaggtgcagctggttgaatctggcggaggactggttcagcctggcggatctctgagactgtcttgtgccgccagcggcaacatcaacagcagaaactgcatgggctggttcagacaggcccctggcaagggaagagaaggcgtggcagctatcggccaagtgaccggcagaacctactacgtggacagcgtgaagggcagattcaccatcagcctggacaacagcaagaacaccctgtacctccagatgaacagcctgagagccgaggacaccgccgtgtactattgtgctgctgcccctggctgtctgctgtctgcacttagaagcgccgactacagaaactggggccagggcacactggtcaccgtttcttctggatccggcggcggaggatctggcggaggcggatctgggggcggaggctctttcgaacaagttcagcttcaacagcctggcgctgagctggtcaaacctggcgcttctgtgaagatgagctgcaaagccagcggctacaccttcagcagctactggatcaactggatgaagcagaaacccggccagggactcgaatggatcggccaaatctatcccggcgacggcgacaccaactacaacggcaagttcaagggcagagccacactgaccgccgatacctctagcagcacagcctacatgcagctgagcagcctgaccagcgaagatagcgccgtgtacttctgtgcccggtccatcacaacagtcgtgggctgcgctatggactattggggccagggaacaagcgtgaccgtgtctagtacgcgtatccagaaccctgatcctgccgtgtaccagctgcgggatagcaagagcagcgacaagagcgtgtgtctgttcaccgacttcgacagccagaccaacgtgtcccagagcaaggactccgacgtgtacatcaccgataagtgcgtgctggacatgcggagcatggacttcaagagcaactccgccgtggcctggtccaacaagtccgatttcgcctgcgccaacgccttcaacaacagcattatccccgaggacacattcttcccaagccccgagagcagctgcgacgtgaagctggtggaaaagagcttcgagacagacaccaacctgaacttccagaacctgagcgtgatcggcttcagaatcctgctgctgaaagtggccggctttaacctgctgatgaccctgcggctgtggtccagc

SEQ ID NO: 33999 - DNA, 2304 bp, synthetic construct
  source 1..2304: mol_type = other DNA
atggccttaccagtgaccgccttgctcctgccgctggccttgctgctccacgccgccaggccggacatccagatgacacagagccctagcagcctgtctgccagcgtgggagacagagtgaccatcacatgcaaggccagcgaccacatcaacaactggctggcctggtatcagcagaagcctggacaggcccctaagctgctgatctacggcgctaccacactggaaacaggcgtgcccagcagattttctggcagcggctctggcaccgactacaccctgacaatatccagcctccagcctgaggacttcgccacctactactgtcagcagagctggaacaccccttggacattcggccagggcaccaagctggaaatcaagagactcgaggacctgaagaacgtgttcccacctgaggtggccgtgttcgagcctagcgaggccgagatcagccacacccagaaagccaccctcgtgtgcctggctaccggcttctaccccgaccatgtggaactgtcttggtgggtcaacggcaaagaggtgcacagcggcgtgtgtaccgacccccagccactgaaagaacagcccgccctgaacgacagccggtactgcctgagcagcagactgagagtgtccgccaccttctggcagaacccccggaaccacttcagatgccaggtgcagttctacggcctgagcgagaacgacgagtggacccaggacagagccaagcccgtgacccagatcgtgtctgccgaagcctggggcagagccgattgcggctttaccagcgagagctaccagcagggcgtgctgagcgccaccatcctgtacgagatcctgctgggcaaggccaccctgtacgccgtgctggtgtctgccctggtgctgatggctatggtcaagcggaaggacagccggggaagggccaagcgatctggatctggagcaacaaacttctcactactcaaacaagcaggtgacgtggaggagaatcccgggcctactagtaccatggactggatttggcgcatccttttccttgtcggcgctgctaccggcgcccattccgggccccaggtgcagctggttgaatctggcggaggatctgttcaggctggcggctctctgagactgtcttgtggcgcttccggcaacatcagcagcagaaactgcatgggctggttcagacaggcccctggcaaagagagagaaggcgttgccgccatcggacaagtgaccggcagatcctactacgtggacagcgtgaagggcagattcaccatcagcctggacaacgccaagaacaccctgtacctccagatgaacacactgaagcccgaggacaccgccatgtactactgtgctgctgcccctggctgtctgctgtctgcacttagaagcgccgactacagaaactggggccagggaacccaagtgacagtgtctagtggatccggcggcggaggatctggcggaggcggatctgggggcggaggctctttcgaacaagttcagcttcaacagcctggcgctgagctggtcaaacctggcgcttctgtgaagatgagctgcaaagccagcggctacaccttcagcagctactggatcaactggatgaagcagaaacccggccagggactcgaatggatcggccaaatctatcccggcgacggcgacaccaactacaacggcaagttcaagggcagagccacactgaccgccgatacctctagcagcacagcctacatgcagctgagcagcctgaccagcgaagatagcgccgtgtacttctgtgcccggtccatcacaacagtcgtgggctgcgctatggactattggggccagggaacaagcgtgaccgtgtctagtacgcgtatccagaaccctgatcctgccgtgtaccagctgcgggatagcaagagcagcgacaagagcgtgtgtctgttcaccgacttcgacagccagaccaacgtgtcccagagcaaggactccgacgtgtacatcaccgataagtgcgtgctggacatgcggagcatggacttcaagagcaactccgccgtggcctggtccaacaagtccgatttcgcctgcgccaacgccttcaacaacagcattatccccgaggacacattcttcccaagccccgagagcagctgcgacgtgaagctggtggaaaagagcttcgagacagacaccaacctgaacttccagaacctgagcgtgatcggcttcagaatcctgctgctgaaagtggccggctttaacctgctgatgaccctgcggctgtggtccagctaa

SEQ ID NO: 34000 - DNA, 2727 bp, synthetic construct
  source 1..2727: mol_type = other DNA
atggccttaccagtgaccgccttgctcctgccgctggccttgctgctccacgccgccaggccggaagtgcagctggttgaatctggcggaggactggttcaggctggcggatctctgagactgtcttgtgccgccagcggcagaacctttagcatgggctggtttagacaggcccctggcaaagagagagagttcgtcgccgccatcacatactctggcggcagcccttactacgccgactctgtgaagggcagattcaccatcagccgggacaacgccaagaacaccgtgtacctccagatgaacagcctgaagcctgaggacaccgccgtgtactactgcgccgccaatccaacatacggcagcgactggaacgccgagaattggggccagggaacccaagtgacagtgtctagcggtaccggcggaggcggatctggcggcggaggtagcggtggcggaggatctgaattcgacatccagatgacacagagccctagcagcctgtctgccagcgtgggagacagagtgaccatcacatgcaaggccagcgaccacatcaacaactggctggcctggtatcagcagaagcctggacaggcccctaagctgctgatctacggcgctaccacactggaaacaggcgtgcccagcagattttctggcagcggctctggcaccgactacaccctgacaatatccagcctccagcctgaggacttcgccacctactactgtcagcagagctggaacaccccttggacattcggccagggcaccaagctggaaatcaagagactcgagatccagaaccctgatcctgccgtgtaccagctgcgggatagcaagagcagcgacaagagcgtgtgtctgttcaccgacttcgacagccagaccaacgtgtcccagagcaaggactccgacgtgtacatcaccgataagtgcgtgctggacatgcggagcatggacttcaagagcaactccgccgtggcctggtccaacaagtccgatttcgcctgcgccaacgccttcaacaacagcattatccccgaggacacattcttcccaagcagcgacgtgccctgcgacgtgaagctggtggaaaagagcttcgagacagacaccaacctgaacttccagaacctgagcgtgatcggcttcagaatcctgctgctgaaagtggccggctttaacctgctgatgaccctgcggctgtggtccagccgcgccaagagaagcggatctggcgtgaagcagaccctgaatttcgacctgctgaagctggctggcgacgtggaatccaacccaggccctactagtaccatggactggatttggcgcatccttttccttgtcggcgctgctaccggcgcccattccgggccccaggtgcagctggttgaatctggcggaggatctgttcaggctggcggctctctgagactgtcttgtggcgcttccggcaacatcagcagcagaaactgcatgggctggttcagacaggcccctggcaaagagagagaaggcgttgccgccatcggacaagtgaccggcagatcctactacgtggacagcgtgaagggcagattcaccatcagcctggacaacgccaagaacaccctgtacctccagatgaacacactgaagcccgaggacaccgccatgtactactgtgctgctgcccctggctgtctgctgtctgcacttagaagcgccgactacagaaactggggccagggaacccaagtgacagtgtctagtggatccggcggcggaggatctggcggaggcggatctgggggcggaggctctttcgaacaagttcagcttcaacagcctggcgctgagctggtcaaacctggcgcttctgtgaagatgagctgcaaagccagcggctacaccttcagcagctactggatcaactggatgaagcagaaacccggccagggactcgaatggatcggccaaatctatcccggcgacggcgacaccaactacaacggcaagttcaagggcagagccacactgaccgccgatacctctagcagcacagcctacatgcagctgagcagcctgaccagcgaagatagcgccgtgtacttctgtgcccggtccatcacaacagtcgtgggctgcgctatggactattggggccagggaacaagcgtgaccgtgtctagtacgcgtgaggacctgaagaacgtgttcccacctgaggtggccgtgttcgagcctagcaaggccgagatcgcccacacccagaaagccaccctcgtgtgcctggctaccggcttctaccccgaccatgtggaactgtcttggtgggtcaacggcaaagaggtgcacagcggcgtgtgtaccgacccccagccactgaaagaacagcccgccctgaacgacagccggtactgcctgagcagcagactgagagtgtccgccaccttctggcagaacccccggaaccacttcagatgccaggtgcagttctacggcctgagcgagaacgacgagtggacccaggacagagccaagcccgtgacccagatcgtgtctgccgaagcctggggcagagccgattgcggcatcaccagcgccagctaccaccagggcgtgctgagcgccaccatcctgtacgagatcctgctgggcaaggccaccctgtacgccgtgctggtgtctgccctggtgctgatggctatggtcaagcggaaggacagccggggataa

SEQ ID NO: 34001 - DNA, 2718 bp, synthetic construct
  source 1..2718: mol_type = other DNA
atggccttaccagtgaccgccttgctcctgccgctggccttgctgctccacgccgccaggccgcaggtgcagctggttgaatctggcggaggatctgttcaggctggcggctctctgagactgtcttgtggcgcttccggcaacatcagcagcagaaactgcatgggctggttcagacaggcccctggcaaagagagagaaggcgttgccgccatcggacaagtgaccggcagatcctactacgtggacagcgtgaagggcagattcaccatcagcctggacaacgccaagaacaccctgtacctccagatgaacacactgaagcccgaggacaccgccatgtactactgtgctgctgcccctggctgtctgctgtctgcacttagaagcgccgactacagaaactggggccagggaacccaagtgacagtgtctagtggtaccggcggaggcggatctggcggcggaggtagcggtggcggaggatctgaattcgacatccagatgacacagagccctagcagcctgtctgccagcgtgggagacagagtgaccatcacatgcaaggccagcgaccacatcaacaactggctggcctggtatcagcagaagcctggacaggcccctaagctgctgatctacggcgctaccacactggaaacaggcgtgcccagcagattttctggcagcggctctggcaccgactacaccctgacaatatccagcctccagcctgaggacttcgccacctactactgtcagcagagctggaacaccccttggacattcggccagggcaccaagctggaaatcaagagactcgaggacctgaagaacgtgttcccacctgaggtggccgtgttcgagcctagcgaggccgagatcagccacacccagaaagccaccctcgtgtgcctggctaccggcttctaccccgaccatgtggaactgtcttggtgggtcaacggcaaagaggtgcacagcggcgtgtgtaccgacccccagccactgaaagaacagcccgccctgaacgacagccggtactgcctgagcagcagactgagagtgtccgccaccttctggcagaacccccggaaccacttcagatgccaggtgcagttctacggcctgagcgagaacgacgagtggacccaggacagagccaagcccgtgacccagatcgtgtctgccgaagcctggggcagagccgattgcggctttaccagcgagagctaccagcagggcgtgctgagcgccaccatcctgtacgagatcctgctgggcaaggccaccctgtacgccgtgctggtgtctgccctggtgctgatggctatggtcaagcggaaggacagccggggaagggccaagcgatctggatctggagcaacaaacttctcactactcaaacaagcaggtgacgtggaggagaatcccgggcctactagtgccaccatggactggatttggcgcatccttttccttgtcggcgctgctaccggcgcccattccgggcccgaagtgcaactggttgaatccggtggcggcctggtgcaagcaggcggatctctcagacttagctgtgccgcctccggcagaaccttcacaatgggatggtttaggcaggctccagggaaagagagagagttcgtcgccgccatctctctgtctcccacactggcctactacgccgactctgtgaaaggccggttcaccatctccagagataatgccaagaacaccgtggtgctgcaaatgaactctctgaaacccgaggatacagccctgtactattgtgccgctgaccggaagtccgtgatgagcatcagacccgattactggggacagggcacacaagtcacagtgtcctctggatccggcggcggaggatctggcggaggcggatctgggggcggaggctctttcgaacaagttcagcttcaacagcctggcgctgagctggtcaaacctggcgcttctgtgaagatgagctgcaaagccagcggctacaccttcagcagctactggatcaactggatgaagcagaaacccggccagggactcgaatggatcggccaaatctatcccggcgacggcgacaccaactacaacggcaagttcaagggcagagccacactgaccgccgatacctctagcagcacagcctacatgcagctgagcagcctgaccagcgaagatagcgccgtgtacttctgtgcccggtccatcacaacagtcgtgggctgcgctatggactattggggccagggaacaagcgtgaccgtgtctagtacgcgtatccagaaccctgatcctgccgtgtaccagctgcgggatagcaagagcagcgacaagagcgtgtgtctgttcaccgacttcgacagccagaccaacgtgtcccagagcaaggactccgacgtgtacatcaccgataagtgcgtgctggacatgcggagcatggacttcaagagcaactccgccgtggcctggtccaacaagtccgatttcgcctgcgccaacgccttcaacaacagcattatccccgaggacacattcttcccaagccccgagagcagctgcgacgtgaagctggtggaaaagagcttcgagacagacaccaacctgaacttccagaacctgagcgtgatcggcttcagaatcctgctgctgaaagtggccggctttaacctgctgatgaccctgcggctgtggtccagctaa

SEQ ID NO: 34002 - DNA, 2307 bp, synthetic construct
  source 1..2307: mol_type = other DNA
atggccttaccagtgaccgccttgctcctgccgctggccttgctgctccacgccgccaggccgcaggtgcagctggttgaatctggcggaggatctgttcaggctggcggctctctgagactgtcttgtggcgcttccggcaacatcagcagcagaaactgcatgggctggttcagacaggcccctggcaaagagagagaaggcgttgccgccatcggacaagtgaccggcagatcctactacgtggacagcgtgaagggcagattcaccatcagcctggacaacgccaagaacaccctgtacctccagatgaacacactgaagcccgaggacaccgccatgtactactgtgctgctgcccctggctgtctgctgtctgcacttagaagcgccgactacagaaactggggccagggaacccaagtgacagtgtctagtggtaccggcggaggcggatctggcggcggaggtagcggtggcggaggatctgaattcgacatccagatgacacagagccctagcagcctgtctgccagcgtgggagacagagtgaccatcacatgcaaggccagcgaccacatcaacaactggctggcctggtatcagcagaagcctggacaggcccctaagctgctgatctacggcgctaccacactggaaacaggcgtgcccagcagattttctggcagcggctctggcaccgactacaccctgacaatatccagcctccagcctgaggacttcgccacctactactgtcagcagagctggaacaccccttggacattcggccagggcaccaagctggaaatcaagagactcgaggacctgaagaacgtgttcccacctgaggtggccgtgttcgagcctagcgaggccgagatcagccacacccagaaagccaccctcgtgtgcctggctaccggcttctaccccgaccatgtggaactgtcttggtgggtcaacggcaaagaggtgcacagcggcgtgtgtaccgacccccagccactgaaagaacagcccgccctgaacgacagccggtactgcctgagcagcagactgagagtgtccgccaccttctggcagaacccccggaaccacttcagatgccaggtgcagttctacggcctgagcgagaacgacgagtggacccaggacagagccaagcccgtgacccagatcgtgtctgccgaagcctggggcagagccgattgcggctttaccagcgagagctaccagcagggcgtgctgagcgccaccatcctgtacgagatcctgctgggcaaggccaccctgtacgccgtgctggtgtctgccctggtgctgatggctatggtcaagcggaaggacagccggggaagggccaagcgatctggatctggagcaacaaacttctcactactcaaacaagcaggtgacgtggaggagaatcccgggcctactagtgccaccatggactggatttggcgcatccttttccttgtcggcgctgctaccggcgcccattccttcgaacaagttcagcttcaacagcctggcgctgagctggtcaaacctggcgcttctgtgaagatgagctgcaaagccagcggctacaccttcagcagctactggatcaactggatgaagcagaaacccggccagggactcgaatggatcggccaaatctatcccggcgacggcgacaccaactacaacggcaagttcaagggcagagccacactgaccgccgatacctctagcagcacagcctacatgcagctgagcagcctgaccagcgaagatagcgccgtgtacttctgtgcccggtccatcacaacagtcgtgggctgcgctatggactattggggccagggaacaagcgtgaccgtgtctagtacgcgtatccagaaccctgatcctgccgtgtaccagctgcgggatagcaagagcagcgacaagagcgtgtgtctgttcaccgacttcgacagccagaccaacgtgtcccagagcaaggactccgacgtgtacatcaccgataagtgcgtgctggacatgcggagcatggacttcaagagcaactccgccgtggcctggtccaacaagtccgatttcgcctgcgccaacgccttcaacaacagcattatccccgaggacacattcttcccaagccccgagagcagctgcgacgtgaagctggtggaaaagagcttcgagacagacaccaacctgaacttccagaacctgagcgtgatcggcttcagaatcctgctgctgaaagtggccggctttaacctgctgatgaccctgcggctgtggtccagctaa

SEQ ID NO: 34003 - DNA, 2307 bp, synthetic construct
  source 1..2307: mol_type = other DNA
atggccttaccagtgaccgccttgctcctgccgctggccttgctgctccacgccgccaggccgcaagttcagctggtggaaagcggtggtggcgttgtgcaacctggtggaagtctgaggctgagctgtgccgcttctggcctgagctttagcacctacactgtggcctggttcaggcaggctcccggaaagggtcttgaaggcgtggccgccattccttacaccagccagcacatggtgtacacagacagcgtcagaggccggttcaccatcagcagagacaactccaagaatacgctctatctccagatgaactctctgcgcgccgaagatacagccgtgtattactgcgccaccgacagacggcctggcacctctatgctggctatcaacggctacaacagatggggacagggaaccaccgtgaccgtgtcatctggtaccggcggaggcggatctggcggcggaggtagcggtggcggaggatctgaattcgacatccagatgacacagagccctagcagcctgtctgccagcgtgggagacagagtgaccatcacatgcaaggccagcgaccacatcaacaactggctggcctggtatcagcagaagcctggacaggcccctaagctgctgatctacggcgctaccacactggaaacaggcgtgcccagcagattttctggcagcggctctggcaccgactacaccctgacaatatccagcctccagcctgaggacttcgccacctactactgtcagcagagctggaacaccccttggacattcggccagggcaccaagctggaaatcaagagactcgaggacctgaagaacgtgttcccacctgaggtggccgtgttcgagcctagcgaggccgagatcagccacacccagaaagccaccctcgtgtgcctggctaccggcttctaccccgaccatgtggaactgtcttggtgggtcaacggcaaagaggtgcacagcggcgtgtgtaccgacccccagccactgaaagaacagcccgccctgaacgacagccggtactgcctgagcagcagactgagagtgtccgccaccttctggcagaacccccggaaccacttcagatgccaggtgcagttctacggcctgagcgagaacgacgagtggacccaggacagagccaagcccgtgacccagatcgtgtctgccgaagcctggggcagagccgattgcggctttaccagcgagagctaccagcagggcgtgctgagcgccaccatcctgtacgagatcctgctgggcaaggccaccctgtacgccgtgctggtgtctgccctggtgctgatggctatggtcaagcggaaggacagccggggaagggccaagcgatctggatctggagcaacaaacttctcactactcaaacaagcaggtgacgtggaggagaatcccgggcctactagtgccaccatggactggatttggcgcatccttttccttgtcggcgctgctaccggcgcccattccttcgaacaagttcagcttcaacagcctggcgctgagctggtcaaacctggcgcttctgtgaagatgagctgcaaagccagcggctacaccttcagcagctactggatcaactggatgaagcagaaacccggccagggactcgaatggatcggccaaatctatcccggcgacggcgacaccaactacaacggcaagttcaagggcagagccacactgaccgccgatacctctagcagcacagcctacatgcagctgagcagcctgaccagcgaagatagcgccgtgtacttctgtgcccggtccatcacaacagtcgtgggctgcgctatggactattggggccagggaacaagcgtgaccgtgtctagtacgcgtatccagaaccctgatcctgccgtgtaccagctgcgggatagcaagagcagcgacaagagcgtgtgtctgttcaccgacttcgacagccagaccaacgtgtcccagagcaaggactccgacgtgtacatcaccgataagtgcgtgctggacatgcggagcatggacttcaagagcaactccgccgtggcctggtccaacaagtccgatttcgcctgcgccaacgccttcaacaacagcattatccccgaggacacattcttcccaagccccgagagcagctgcgacgtgaagctggtggaaaagagcttcgagacagacaccaacctgaacttccagaacctgagcgtgatcggcttcagaatcctgctgctgaaagtggccggctttaacctgctgatgaccctgcggctgtggtccagctaa

SEQ ID NO: 34004 - DNA, 2304 bp, synthetic construct
  source 1..2304: mol_type = other DNA
atggccttaccagtgaccgccttgctcctgccgctggccttgctgctccacgccgccaggccggacatccagatgacacagagccctagcagcctgtctgccagcgtgggagacagagtgaccatcacatgcaaggccagcgaccacatcaacaactggctggcctggtatcagcagaagcctggacaggcccctaagctgctgatctacggcgctaccacactggaaacaggcgtgcccagcagattttctggcagcggctctggcaccgactacaccctgacaatatccagcctccagcctgaggacttcgccacctactactgtcagcagagctggaacaccccttggacattcggccagggcaccaagctggaaatcaagagactcgaggacctgaagaacgtgttcccacctgaggtggccgtgttcgagcctagcgaggccgagatcagccacacccagaaagccaccctcgtgtgcctggctaccggcttctaccccgaccatgtggaactgtcttggtgggtcaacggcaaagaggtgcacagcggcgtgtgtaccgacccccagccactgaaagaacagcccgccctgaacgacagccggtactgcctgagcagcagactgagagtgtccgccaccttctggcagaacccccggaaccacttcagatgccaggtgcagttctacggcctgagcgagaacgacgagtggacccaggacagagccaagcccgtgacccagatcgtgtctgccgaagcctggggcagagccgattgcggctttaccagcgagagctaccagcagggcgtgctgagcgccaccatcctgtacgagatcctgctgggcaaggccaccctgtacgccgtgctggtgtctgccctggtgctgatggctatggtcaagcggaaggacagccggggaagggccaagcgatctggatctggagcaacaaacttctcactactcaaacaagcaggtgacgtggaggagaatcccgggcctactagtaccatggactggatttggcgcatccttttccttgtcggcgctgctaccggcgcccattccgggccccaagttcagctggtggaaagcggtggtggcgttgtgcaacctggtggaagtctgaggctgagctgtgccgcttctggcctgagctttagcacctacactgtggcctggttcaggcaggctcccggaaagggtcttgaaggcgtggccgccattccttacaccagccagcacatggtgtacacagacagcgtcagaggccggttcaccatcagcagagacaactccaagaatacgctctatctccagatgaactctctgcgcgccgaagatacagccgtgtattactgcgccaccgacagacggcctggcacctctatgctggctatcaacggctacaacagatggggacagggaaccaccgtgaccgtgtcatctggatccggcggcggaggatctggcggaggcggatctgggggcggaggctctttcgaacaagttcagcttcaacagcctggcgctgagctggtcaaacctggcgcttctgtgaagatgagctgcaaagccagcggctacaccttcagcagctactggatcaactggatgaagcagaaacccggccagggactcgaatggatcggccaaatctatcccggcgacggcgacaccaactacaacggcaagttcaagggcagagccacactgaccgccgatacctctagcagcacagcctacatgcagctgagcagcctgaccagcgaagatagcgccgtgtacttctgtgcccggtccatcacaacagtcgtgggctgcgctatggactattggggccagggaacaagcgtgaccgtgtctagtacgcgtatccagaaccctgatcctgccgtgtaccagctgcgggatagcaagagcagcgacaagagcgtgtgtctgttcaccgacttcgacagccagaccaacgtgtcccagagcaaggactccgacgtgtacatcaccgataagtgcgtgctggacatgcggagcatggacttcaagagcaactccgccgtggcctggtccaacaagtccgatttcgcctgcgccaacgccttcaacaacagcattatccccgaggacacattcttcccaagccccgagagcagctgcgacgtgaagctggtggaaaagagcttcgagacagacaccaacctgaacttccagaacctgagcgtgatcggcttcagaatcctgctgctgaaagtggccggctttaacctgctgatgaccctgcggctgtggtccagctaa

SEQ ID NO: 34005 - DNA, 2310 bp, synthetic construct
  source 1..2310: mol_type = other DNA
atggccttaccagtgaccgccttgctcctgccgctggccttgctgctccacgccgccaggccggacatccagatgacacagagccctagcagcctgtctgccagcgtgggagacagagtgaccatcacatgcaaggccagcgaccacatcaacaactggctggcctggtatcagcagaagcctggacaggcccctaagctgctgatctacggcgctaccacactggaaacaggcgtgcccagcagattttctggcagcggctctggcaccgactacaccctgacaatatccagcctccagcctgaggacttcgccacctactactgtcagcagagctggaacaccccttggacattcggccagggcaccaagctggaaatcaagagactcgaggacctgaagaacgtgttcccacctgaggtggccgtgttcgagcctagcgaggccgagatcagccacacccagaaagccaccctcgtgtgcctggctaccggcttctaccccgaccatgtggaactgtcttggtgggtcaacggcaaagaggtgcacagcggcgtgtgtaccgacccccagccactgaaagaacagcccgccctgaacgacagccggtactgcctgagcagcagactgagagtgtccgccaccttctggcagaacccccggaaccacttcagatgccaggtgcagttctacggcctgagcgagaacgacgagtggacccaggacagagccaagcccgtgacccagatcgtgtctgccgaagcctggggcagagccgattgcggctttaccagcgagagctaccagcagggcgtgctgagcgccaccatcctgtacgagatcctgctgggcaaggccaccctgtacgccgtgctggtgtctgccctggtgctgatggctatggtcaagcggaaggacagccggggaagggccaagcgatctggatctggagcaacaaacttctcactactcaaacaagcaggtgacgtggaggagaatcccgggcctactagtaccatggactggatttggcgcatccttttccttgtcggcgctgctaccggcgcccattccgggcccgaggtgcagctggttgaatctggcggaggatctgttcaggctggcggctctctgagactgtcttgtgccgccagcggctacacctacagcatcaactgcatgggctggttcagacaggcccctggcaaagagagagaaggcgttgccgccatctctaccggcggaggcagaaccgattaccgggattctgtgaagggcagattcaccatcagccaggacaacgccaagaacaccgtgtacctccagatgaacagcctgaagcctgaggacaccgccatgtactactgtgccggcaagaccacctatcctggctacggatgtggcctgggcagaagcgcctacaattattggggccagggcacccaagtgaccgtgtcatctggatccggcggcggaggatctggcggaggcggatctgggggcggaggctctttcgaacaagttcagcttcaacagcctggcgctgagctggtcaaacctggcgcttctgtgaagatgagctgcaaagccagcggctacaccttcagcagctactggatcaactggatgaagcagaaacccggccagggactcgaatggatcggccaaatctatcccggcgacggcgacaccaactacaacggcaagttcaagggcagagccacactgaccgccgatacctctagcagcacagcctacatgcagctgagcagcctgaccagcgaagatagcgccgtgtacttctgtgcccggtccatcacaacagtcgtgggctgcgctatggactattggggccagggaacaagcgtgaccgtgtctagtacgcgtatccagaaccctgatcctgccgtgtaccagctgcgggatagcaagagcagcgacaagagcgtgtgtctgttcaccgacttcgacagccagaccaacgtgtcccagagcaaggactccgacgtgtacatcaccgataagtgcgtgctggacatgcggagcatggacttcaagagcaactccgccgtggcctggtccaacaagtccgatttcgcctgcgccaacgccttcaacaacagcattatccccgaggacacattcttcccaagccccgagagcagctgcgacgtgaagctggtggaaaagagcttcgagacagacaccaacctgaacttccagaacctgagcgtgatcggcttcagaatcctgctgctgaaagtggccggctttaacctgctgatgaccctgcggctgtggtccagctaa

SEQ ID NO: 34006 - DNA, 1866 bp, synthetic construct
  source 1..1866: mol_type = other DNA
atggccttaccagtgaccgccttgctcctgccgctggccttgctgctccacgccgccaggccggacatccagatgacacagagccctagcagcctgtctgccagcgtgggagacagagtgaccatcacatgcaaggccagcgaccacatcaacaactggctggcctggtatcagcagaagcctggacaggcccctaagctgctgatctacggcgctaccacactggaaacaggcgtgcccagcagattttctggcagcggctctggcaccgactacaccctgacaatatccagcctccagcctgaggacttcgccacctactactgtcagcagagctggaacaccccttggacattcggccagggcaccaagctggaaatcaagagactcgaggacctgaagcacgtgttcccacctgaggtggccgtgttcgagcctagcgacgccgagatctggcacacccagaaagccaccctcgtgtgcctggctaccggcttctaccccgaccatgtggaactgtcttggtgggtcaacggcaaagaggtgcacagcggcgtgtctaccgacccccagccactgaaagaacagcccgccctgaacgacagccggtactgcctgagcagcagactgagagtgtccgccaccttctggcagaacccccggaaccacttcagatgccaggtgcagttctacggcctgagcgagaacgacgagtggacccaggacagagccaagcccgtgacccagatcgtgtctgccgaagcctggggcagagccgattgcggctttaccagcgagagctaccagcagggcgtgctgagcgccaccatcctgtacgagatcctgctgggcaaggccaccctgtacgccgtgctggtgtctgccctggtgctgatggctatggtcaagcggaaggacagccggggaagggccaagcgatctggatctggagcaacaaacttctcactactcaaacaagcaggtgacgtggaggagaatcccgggcctactagtatggactggatttggcgcatccttttccttgtcggcgctgctaccggcgcgcattccttcgaacaagttcagcttcaacagcctggcgctgagctggtcaaacctggcgcttctgtgaagatgagctgcaaagccagcggctacaccttcagcagctactggatcaactggatgaagcagaaacccggccagggactcgaatggatcggccaaatctatcccggcgacggcgacaccaactacaacggcaagttcaagggcagagccacactgaccgccgatacctctagcagcacagcctacatgcagctgagcagcctgaccagcgaagatagcgccgtgtacttctgtgcccggtccatcacaacagtcgtgggctgcgctatggactattggggccagggaacaagcgtgaccgtgtctagtacgcgtatccagaaccctgatcctgccgtgtaccagctgcgggatagcaagagcagcgacaagagcgtgtgtctgttcaccgacttcgacagccagaccaacgtgtcccagagcaaggactccgacgtgtacatcaccgataagaccgtgctggacatgcggagcatggacttcaagagcaactccgccgtggcctggtccagcaagtccgatttcgcctgcgccaacgccttcaacaacagcattatccccgaggacacattcttcccaagccccgagatggcctgcgacgtgaagctggtggaaaagagcttcgagacagacaccaacctgaacttccagaacctgctcgtgatctggctgagaatcctgctgctgaaagtggccggctttaacctgctgatgaccctgcggctgtggtccagc

SEQ ID NO: 34007 - DNA, 1866 bp, synthetic construct
  source 1..1866: mol_type = other DNA
atggccttaccagtgaccgccttgctcctgccgctggccttgctgctccacgccgccaggccggacatccagatgacacagagccctagcagcctgtctgccagcgtgggagacagagtgaccatcacatgcaaggccagcgaccacatcaacaactggctggcctggtatcagcagaagcctggacaggcccctaagctgctgatctacggcgctaccacactggaaacaggcgtgcccagcagattttctggcagcggctctggcaccgactacaccctgacaatatccagcctccagcctgaggacttcgccacctactactgtcagcagagctggaacaccccttggacattcggccagggcaccaagctggaaatcaagagactcgaggacctgaagcacgtgttcccacctgaggtggccgtgttcgagcctagcgacgccgagatctggcacacccagaaagccaccctcgtgtgcctggctaccggcttctaccccgaccatgtggaactgtcttggtgggtcaacggcaaagaggtgcacagcggcgtgtctaccgacccccagccactgaaagaacagcccgccctgaacgacagccggtactgcctgagcagcagactgagagtgtccgccaccttctggcagaacccccggaaccacttcagatgccaggtgcagttctacggcctgagcgagaacgacgagtggacccaggacagagccaagcccgtgacccagatcgtgtctgccgaagcctggggcagagccgattgcggctttaccagcgagagctaccagcagggcgtgctgagcgccaccatcctgtacgagatcctgctgggcaaggccaccctgtacgccgtgctggtgtctgccctggtgctgatggctatggtcaagcggaaggacagccggggaagggccaagcgatctggatctggagcaacaaacttctcactactcaaacaagcaggtgacgtggaggagaatcccgggcctactagtatggactggatttggcgcatccttttccttgtcggcgctgctaccggcgcgcattccttcgaacaagttcagcttcaacagcctggcgctgagctggtcaaacctggcgcttctgtgaagatgagctgcaaagccagcggctacaccttcagcagctactggatcaactggatgaagcagaaacccggccagggactcgaatggatcggccaaatctatcccggcgacggcgacaccaactacaacggcaagttcaagggcagagccacactgaccgccgatacctctagcagcacagcctacatgcagctgagcagcctgaccagcgaagatagcgccgtgtacttctgtgcccggtccatcacaacagtcgtgggctgcgctatggactattggggccagggaacaagcgtgaccgtgtctagtacgcgtatccagaaccctgatcctgccgtgtaccagctgcgggatagcaagagcagcgacaagagcgtgtgtctgttcaccgacttcgacagccagaccaacgtgtcccagagcaaggactccgacgtgtacatcaccgataagaccgtgctggacatgcggagcatggacttcaagagcaactccgccgtggcctggtccaccaagtccgatttcgcctgcgccaacgccttcaacaacagcattatccccgaggacacattcttcccaagccccgaggtggtgtgcgacgtgaagctggtggaaaagagcttcgagacagacaccaacctgaacttccagaacctggtggtgatcggcgccagaatcctgctgctgaaagtggccggctttaacctgctgatgaccctgcggctgtggtccagc

SEQ ID NO: 34008 - DNA, 1866 bp, synthetic construct
  source 1..1866: mol_type = other DNA
atggccttaccagtgaccgccttgctcctgccgctggccttgctgctccacgccgccaggccggacatccagatgacacagagccctagcagcctgtctgccagcgtgggagacagagtgaccatcacatgcaaggccagcgaccacatcaacaactggctggcctggtatcagcagaagcctggacaggcccctaagctgctgatctacggcgctaccacactggaaacaggcgtgcccagcagattttctggcagcggctctggcaccgactacaccctgacaatatccagcctccagcctgaggacttcgccacctactactgtcagcagagctggaacaccccttggacattcggccagggcaccaagctggaaatcaagagactcgaggacctgaagaacgtgttcccacctgaggtggccgtgttcgagcctagcaaggccgagatcagcagaacccagaaagccaccctcgtgtgcctggctaccggcttctaccctcctcatgtggaactgtcttggtgggtcaacggcaaagaggtgcacgacggcgtgtgtaccgacccccagccactgaaagaacagcccgccctgaacgacagccggtactgcctgagcagcagactgagagtgtccgccaccttctggcagaacccccggaaccacttcagatgccaggtgcagttctacggcctgagcgagaacgacgagtggacccaggacagagccaagcccgtgacccagatcgtgtctgccgaagcctggggcagagccgattgcggctttaccagcgagagctaccagcagggcgtgctgagcgccaccatcctgtacgagatcctgctgggcaaggccaccctgtacgccgtgctggtgtctgccctggtgctgatggctatggtcaagcggaaggacagccggggaagggccaagcgatctggatctggagcaacaaacttctcactactcaaacaagcaggtgacgtggaggagaatcccgggcctactagtatggactggatttggcgcatccttttccttgtcggcgctgctaccggcgcgcattccttcgaacaagttcagcttcaacagcctggcgctgagctggtcaaacctggcgcttctgtgaagatgagctgcaaagccagcggctacaccttcagcagctactggatcaactggatgaagcagaaacccggccagggactcgaatggatcggccaaatctatcccggcgacggcgacaccaactacaacggcaagttcaagggcagagccacactgaccgccgatacctctagcagcacagcctacatgcagctgagcagcctgaccagcgaagatagcgccgtgtacttctgtgcccggtccatcacaacagtcgtgggctgcgctatggactattggggccagggaacaagcgtgaccgtgtctagtacgcgtatccagaaccctgatcctgccgtgtaccagctgcgggatagcaagagcagcgacaagttcgtgtgtctgttcaccgacttcgacagccagatcaacgtgtcccagagcaaggactccgacgtgtacatcaccgataagtgcgtgctggacatgcggagcatggacttcaagagcaactccgccgtggcctggtccaacaagtccgatttcacctgcgccaacgccttcaacaacagcattatccccgaggacacattcttcccaagccccgagagcagctgcgacgtgaagctggtggaaaagagcttcgagacagacaccaacctgaacttccagaacctgagcgtgatcggcttcagaatcctgctgctgaaagtggccggctttaacctgctgatgaccctgcggctgtggtccagc

SEQ ID NO: 34009 - DNA, 2292 bp, synthetic construct
  source 1..2292: mol_type = other DNA
atggccttaccagtgaccgccttgctcctgccgctggccttgctgctccacgccgccaggccggacatccagatgacacagagccctagcagcctgtctgccagcgtgggagacagagtgaccatcacatgcaaggccagcgaccacatcaacaactggctggcctggtatcagcagaagcctggacaggcccctaagctgctgatctacggcgctaccacactggaaacaggcgtgcccagcagattttctggcagcggctctggcaccgactacaccctgacaatatccagcctccagcctgaggacttcgccacctactactgtcagcagagctggaacaccccttggacattcggccagggcaccaagctggaaatcaagagactcgaggacctgaagaacgtgttcccacctgaggtggccgtgttcgagcctagcgaggccgagatcagccacacccagaaagccaccctcgtgtgcctggctaccggcttctaccccgaccatgtggaactgtcttggtgggtcaacggcaaagaggtgcacagcggcgtgtgtaccgacccccagccactgaaagaacagcccgccctgaacgacagccggtactgcctgagcagcagactgagagtgtccgccaccttctggcagaacccccggaaccacttcagatgccaggtgcagttctacggcctgagcgagaacgacgagtggacccaggacagagccaagcccgtgacccagatcgtgtctgccgaagcctggggcagagccgattgcggctttaccagcgagagctaccagcagggcgtgctgagcgccaccatcctgtacgagatcctgctgggcaaggccaccctgtacgccgtgctggtgtctgccctggtgctgatggctatggtcaagcggaaggacagccggggaagggccaagcgatctggatctggagcaacaaacttctcactactcaaacaagcaggtgacgtggaggagaatcccgggcctactagtaccatggactggatttggcgcatccttttccttgtcggcgctgctaccggcgcccattccgggccccaggtgcagctccaagaaagcggacccggactggttaagccctctcagaccctgtctctgacctgcacagttagcggagccagcattaccacaggcgagtattattggaattggtttcggcagccaccaggcaaggggcttgagtggatgggtgctattgctgcctctggcagcaccacctactctcccagctttgagagcagaacctccatcagccgggacacctccaaaaaccagttctctctgaagctgtcctccgtgaccgctgctgacaccgccgtctattattgtggccggtctttcggcgtggcagctgtgaccacaggacagaacagaggccagggaacacttgtgaccgtgtcctctggatccggcggcggaggatctggcggaggcggatctgggggcggaggctctttcgaacaagttcagcttcaacagcctggcgctgagctggtcaaacctggcgcttctgtgaagatgagctgcaaagccagcggctacaccttcagcagctactggatcaactggatgaagcagaaacccggccagggactcgaatggatcggccaaatctatcccggcgacggcgacaccaactacaacggcaagttcaagggcagagccacactgaccgccgatacctctagcagcacagcctacatgcagctgagcagcctgaccagcgaagatagcgccgtgtacttctgtgcccggtccatcacaacagtcgtgggctgcgctatggactattggggccagggaacaagcgtgaccgtgtctagtacgcgtatccagaaccctgatcctgccgtgtaccagctgcgggatagcaagagcagcgacaagagcgtgtgtctgttcaccgacttcgacagccagaccaacgtgtcccagagcaaggactccgacgtgtacatcaccgataagtgcgtgctggacatgcggagcatggacttcaagagcaactccgccgtggcctggtccaacaagtccgatttcgcctgcgccaacgccttcaacaacagcattatccccgaggacacattcttcccaagccccgagagcagctgcgacgtgaagctggtggaaaagagcttcgagacagacaccaacctgaacttccagaacctgagcgtgatcggcttcagaatcctgctgctgaaagtggccggctttaacctgctgatgaccctgcggctgtggtccagc

SEQ ID NO: 34010 - DNA, 2715 bp, synthetic construct
  source 1..2715: mol_type = other DNA
atggccttaccagtgaccgccttgctcctgccgctggccttgctgctccacgccgccaggccgcaggttcagctgcaagagtctggccctggcctggtcaagcctagccaaacactgagcctgacctgtaccgtgtctggcggctctatcaccaccggcgagttctactggaactggttcagacagcctcctggcaaaggactggaatggatgggagccattgccgccagcggcagcacaacatacagccctagcttcgagagccggaccagcatcagcagagacaccagcaagaatcagttcagcctgaagctgagcagcgtgacagccgccgatacagccgtgtattactgcggcagatcctttggagtggccgccgtgacaaccggccagaatagaggacagggcaccctggtcacagtgtctagcggtaccggcggaggcggatctggcggcggaggtagcggtggcggaggatctgaattcgacatccagatgacacagagccctagcagcctgtctgccagcgtgggagacagagtgaccatcacatgcaaggccagcgaccacatcaacaactggctggcctggtatcagcagaagcctggacaggcccctaagctgctgatctacggcgctaccacactggaaacaggcgtgcccagcagattttctggcagcggctctggcaccgactacaccctgacaatatccagcctccagcctgaggacttcgccacctactactgtcagcagagctggaacaccccttggacattcggccagggcaccaagctggaaatcaagagactcgagatccagaaccctgatcctgccgtgtaccagctgcgggatagcaagagcagcgacaagagcgtgtgtctgttcaccgacttcgacagccagaccaacgtgtcccagagcaaggactccgacgtgtacatcaccgataagtgcgtgctggacatgcggagcatggacttcaagagcaactccgccgtggcctggtccaacaagtccgatttcgcctgcgccaacgccttcaacaacagcattatccccgaggacacattcttcccaagcagcgacgtgccctgcgacgtgaagctggtggaaaagagcttcgagacagacaccaacctgaacttccagaacctgagcgtgatcggcttcagaatcctgctgctgaaagtggccggctttaacctgctgatgaccctgcggctgtggtccagccgcgccaagagaagcggatctggcgtgaagcagaccctgaatttcgacctgctgaagctggctggcgacgtggaatccaacccaggccctactagtaccatggactggatttggcgcatccttttccttgtcggcgctgctaccggcgcccattccgggcccgaagtgcaactggttgaatccggtggcggcctggtgcaacccggcggatctctcagacttagctgtgccgcctccggcagaaccttcacaatgggatggtacaggcaggctccagggaaagagagagagttcgtcgccgccatctctctgtctcccacactggcctactacgccgactctgtgaaaggccggttcaccatctccagagataatagcaagaacaccgtggtgctgcaaatgaactctctgagagccgaggatacagccctgtactattgtgccgctgaccggaagtccgtgatgagcatcagacccgattactggggacagggcacactggtcacagtgtctagtggatccggcggcggaggatctggcggaggcggatctgggggcggaggctctttcgaacaagttcagcttcaacagcctggcgctgagctggtcaaacctggcgcttctgtgaagatgagctgcaaagccagcggctacaccttcagcagctactggatcaactggatgaagcagaaacccggccagggactcgaatggatcggccaaatctatcccggcgacggcgacaccaactacaacggcaagttcaagggcagagccacactgaccgccgatacctctagcagcacagcctacatgcagctgagcagcctgaccagcgaagatagcgccgtgtacttctgtgcccggtccatcacaacagtcgtgggctgcgctatggactattggggccagggaacaagcgtgaccgtgtctagtacgcgtgaggacctgaagaacgtgttcccacctgaggtggccgtgttcgagcctagcaaggccgagatcgcccacacccagaaagccaccctcgtgtgcctggctaccggcttctaccccgaccatgtggaactgtcttggtgggtcaacggcaaagaggtgcacagcggcgtgtgtaccgacccccagccactgaaagaacagcccgccctgaacgacagccggtactgcctgagcagcagactgagagtgtccgccaccttctggcagaacccccggaaccacttcagatgccaggtgcagttctacggcctgagcgagaacgacgagtggacccaggacagagccaagcccgtgacccagatcgtgtctgccgaagcctggggcagagccgattgcggcatcaccagcgccagctaccaccagggcgtgctgagcgccaccatcctgtacgagatcctgctgggcaaggccaccctgtacgccgtgctggtgtctgccctggtgctgatggctatggtcaagcggaaggacagccgggga

SEQ ID NO: 34011 - DNA, 2304 bp, synthetic construct
  source 1..2304: mol_type = other DNA
atggccttaccagtgaccgccttgctcctgccgctggccttgctgctccacgccgccaggccgcaggttcagctgcaagagtctggccctggcctggtcaagcctagccaaacactgagcctgacctgtaccgtgtctggcggctctatcaccaccggcgagttctactggaactggttcagacagcctcctggcaaaggactggaatggatgggagccattgccgccagcggcagcacaacatacagccctagcttcgagagccggaccagcatcagcagagacaccagcaagaatcagttcagcctgaagctgagcagcgtgacagccgccgatacagccgtgtattactgcggcagatcctttggagtggccgccgtgacaaccggccagaatagaggacagggcaccctggtcacagtgtctagcggtaccggcggaggcggatctggcggcggaggtagcggtggcggaggatctgaattcgacatccagatgacacagagccctagcagcctgtctgccagcgtgggagacagagtgaccatcacatgcaaggccagcgaccacatcaacaactggctggcctggtatcagcagaagcctggacaggcccctaagctgctgatctacggcgctaccacactggaaacaggcgtgcccagcagattttctggcagcggctctggcaccgactacaccctgacaatatccagcctccagcctgaggacttcgccacctactactgtcagcagagctggaacaccccttggacattcggccagggcaccaagctggaaatcaagagactcgagatccagaaccctgatcctgccgtgtaccagctgcgggatagcaagagcagcgacaagagcgtgtgtctgttcaccgacttcgacagccagaccaacgtgtcccagagcaaggactccgacgtgtacatcaccgataagtgcgtgctggacatgcggagcatggacttcaagagcaactccgccgtggcctggtccaacaagtccgatttcgcctgcgccaacgccttcaacaacagcattatccccgaggacacattcttcccaagcagcgacgtgccctgcgacgtgaagctggtggaaaagagcttcgagacagacaccaacctgaacttccagaacctgagcgtgatcggcttcagaatcctgctgctgaaagtggccggctttaacctgctgatgaccctgcggctgtggtccagccgcgccaagagaagcggatctggcgtgaagcagaccctgaatttcgacctgctgaagctggctggcgacgtggaatccaacccaggccctactagtaccatggactggatttggcgcatccttttccttgtcggcgctgctaccggcgcccattccttcgaacaagttcagcttcaacagcctggcgctgagctggtcaaacctggcgcttctgtgaagatgagctgcaaagccagcggctacaccttcagcagctactggatcaactggatgaagcagaaacccggccagggactcgaatggatcggccaaatctatcccggcgacggcgacaccaactacaacggcaagttcaagggcagagccacactgaccgccgatacctctagcagcacagcctacatgcagctgagcagcctgaccagcgaagatagcgccgtgtacttctgtgcccggtccatcacaacagtcgtgggctgcgctatggactattggggccagggaacaagcgtgaccgtgtctagtacgcgtgaggacctgaagaacgtgttcccacctgaggtggccgtgttcgagcctagcaaggccgagatcgcccacacccagaaagccaccctcgtgtgcctggctaccggcttctaccccgaccatgtggaactgtcttggtgggtcaacggcaaagaggtgcacagcggcgtgtgtaccgacccccagccactgaaagaacagcccgccctgaacgacagccggtactgcctgagcagcagactgagagtgtccgccaccttctggcagaacccccggaaccacttcagatgccaggtgcagttctacggcctgagcgagaacgacgagtggacccaggacagagccaagcccgtgacccagatcgtgtctgccgaagcctggggcagagccgattgcggcatcaccagcgccagctaccaccagggcgtgctgagcgccaccatcctgtacgagatcctgctgggcaaggccaccctgtacgccgtgctggtgtctgccctggtgctgatggctatggtcaagcggaaggacagccgggga

SEQ ID NO: 34012 - DNA, 2703 bp, synthetic construct
  source 1..2703: mol_type = other DNA
atggccttaccagtgaccgccttgctcctgccgctggccttgctgctccacgccgccaggccggaagtgcagctggttgaatctggcggaggactggttcaggctggcggatctctgagactgtcttgtgccgccagcggcagaacctttagcatgggctggtttagacaggcccctggcaaagagagagagttcgtcgccgccatcacatactctggcggcagcccttactacgccgactctgtgaagggcagattcaccatcagccgggacaacgccaagaacaccgtgtacctccagatgaacagcctgaagcctgaggacaccgccgtgtactactgcgccgccaatccaacatacggcagcgactggaacgccgagaattggggccagggaacccaagtgacagtgtctagcggtaccggcggaggcggatctggcggcggaggtagcggtggcggaggatctgaattcgacatccagatgacacagagccctagcagcctgtctgccagcgtgggagacagagtgaccatcacatgcaaggccagcgaccacatcaacaactggctggcctggtatcagcagaagcctggacaggcccctaagctgctgatctacggcgctaccacactggaaacaggcgtgcccagcagattttctggcagcggctctggcaccgactacaccctgacaatatccagcctccagcctgaggacttcgccacctactactgtcagcagagctggaacaccccttggacattcggccagggcaccaagctggaaatcaagagactcgaggacctgaagaacgtgttcccacctgaggtggccgtgttcgagcctagcgaggccgagatcagccacacccagaaagccaccctcgtgtgcctggctaccggcttctaccccgaccatgtggaactgtcttggtgggtcaacggcaaagaggtgcacagcggcgtgtgtaccgacccccagccactgaaagaacagcccgccctgaacgacagccggtactgcctgagcagcagactgagagtgtccgccaccttctggcagaacccccggaaccacttcagatgccaggtgcagttctacggcctgagcgagaacgacgagtggacccaggacagagccaagcccgtgacccagatcgtgtctgccgaagcctggggcagagccgattgcggctttaccagcgagagctaccagcagggcgtgctgagcgccaccatcctgtacgagatcctgctgggcaaggccaccctgtacgccgtgctggtgtctgccctggtgctgatggctatggtcaagcggaaggacagccggggaagggccaagcgatctggatctggagcaacaaacttctcactactcaaacaagcaggtgacgtggaggagaatcccgggcctactagtaccatggactggatttggcgcatccttttccttgtcggcgctgctaccggcgcccattccgggccccaggtgcagctccaagaaagcggacccggactggttaagccctctcagaccctgtctctgacctgcacagttagcggagccagcattaccacaggcgagtattattggaattggtttcggcagccaccaggcaaggggcttgagtggatgggtgctattgctgcctctggcagcaccacctactctcccagctttgagagcagaacctccatcagccgggacacctccaaaaaccagttctctctgaagctgtcctccgtgaccgctgctgacaccgccgtctattattgtggccggtctttcggcgtggcagctgtgaccacaggacagaacagaggccagggaacacttgtgaccgtgtcctctggatccggcggcggaggatctggcggaggcggatctgggggcggaggctctttcgaacaagttcagcttcaacagcctggcgctgagctggtcaaacctggcgcttctgtgaagatgagctgcaaagccagcggctacaccttcagcagctactggatcaactggatgaagcagaaacccggccagggactcgaatggatcggccaaatctatcccggcgacggcgacaccaactacaacggcaagttcaagggcagagccacactgaccgccgatacctctagcagcacagcctacatgcagctgagcagcctgaccagcgaagatagcgccgtgtacttctgtgcccggtccatcacaacagtcgtgggctgcgctatggactattggggccagggaacaagcgtgaccgtgtctagtacgcgtatccagaaccctgatcctgccgtgtaccagctgcgggatagcaagagcagcgacaagagcgtgtgtctgttcaccgacttcgacagccagaccaacgtgtcccagagcaaggactccgacgtgtacatcaccgataagtgcgtgctggacatgcggagcatggacttcaagagcaactccgccgtggcctggtccaacaagtccgatttcgcctgcgccaacgccttcaacaacagcattatccccgaggacacattcttcccaagccccgagagcagctgcgacgtgaagctggtggaaaagagcttcgagacagacaccaacctgaacttccagaacctgagcgtgatcggcttcagaatcctgctgctgaaagtggccggctttaacctgctgatgaccctgcggctgtggtccagc

SEQ ID NO: 34013 - DNA, 2724 bp, synthetic construct
  source 1..2724: mol_type = other DNA
atggccttaccagtgaccgccttgctcctgccgctggccttgctgctccacgccgccaggccggaagtgcagctggttgaatctggcggaggactggttcaggctggcggatctctgagactgtcttgtgccgccagcggcagaacctttagcatgggctggtttagacaggcccctggcaaagagagagagttcgtcgccgccatcacatactctggcggcagcccttactacgccgactctgtgaagggcagattcaccatcagccgggacaacgccaagaacaccgtgtacctccagatgaacagcctgaagcctgaggacaccgccgtgtactactgcgccgccaatccaacatacggcagcgactggaacgccgagaattggggccagggaacccaagtgacagtgtctagcggtaccggcggaggcggatctggcggcggaggtagcggtggcggaggatctgaattcgacatccagatgacacagagccctagcagcctgtctgccagcgtgggagacagagtgaccatcacatgcaaggccagcgaccacatcaacaactggctggcctggtatcagcagaagcctggacaggcccctaagctgctgatctacggcgctaccacactggaaacaggcgtgcccagcagattttctggcagcggctctggcaccgactacaccctgacaatatccagcctccagcctgaggacttcgccacctactactgtcagcagagctggaacaccccttggacattcggccagggcaccaagctggaaatcaagagactcgagatccagaaccctgatcctgccgtgtaccagctgcgggatagcaagagcagcgacaagagcgtgtgtctgttcaccgacttcgacagccagaccaacgtgtcccagagcaaggactccgacgtgtacatcaccgataagtgcgtgctggacatgcggagcatggacttcaagagcaactccgccgtggcctggtccaacaagtccgatttcgcctgcgccaacgccttcaacaacagcattatccccgaggacacattcttcccaagcagcgacgtgccctgcgacgtgaagctggtggaaaagagcttcgagacagacaccaacctgaacttccagaacctgagcgtgatcggcttcagaatcctgctgctgaaagtggccggctttaacctgctgatgaccctgcggctgtggtccagccgcgccaagagaagcggatctggcgtgaagcagaccctgaatttcgacctgctgaagctggctggcgacgtggaatccaacccaggccctactagtaccatggactggatttggcgcatccttttccttgtcggcgctgctaccggcgcccattccgggccccaggtgcagctggttgaatctggcggaggactggttcagcctggcggatctctgagactgtcttgtgccgccagcggcaacatcaacagcagaaactgcatgggctggttcagacaggcccctggcaagggaagagaaggcgtggcagctatcggccaagtgaccggcagaacctactacgtggacagcgtgaagggcagattcaccatcagcctggacaacagcaagaacaccctgtacctccagatgaacagcctgagagccgaggacaccgccgtgtactattgtgctgctgcccctggctgtctgctgtctgcacttagaagcgccgactacagaaactggggccagggcacactggtcaccgtttcttctggatccggcggcggaggatctggcggaggcggatctgggggcggaggctctttcgaacaagttcagcttcaacagcctggcgctgagctggtcaaacctggcgcttctgtgaagatgagctgcaaagccagcggctacaccttcagcagctactggatcaactggatgaagcagaaacccggccagggactcgaatggatcggccaaatctatcccggcgacggcgacaccaactacaacggcaagttcaagggcagagccacactgaccgccgatacctctagcagcacagcctacatgcagctgagcagcctgaccagcgaagatagcgccgtgtacttctgtgcccggtccatcacaacagtcgtgggctgcgctatggactattggggccagggaacaagcgtgaccgtgtctagtacgcgtgaggacctgaagaacgtgttcccacctgaggtggccgtgttcgagcctagcaaggccgagatcgcccacacccagaaagccaccctcgtgtgcctggctaccggcttctaccccgaccatgtggaactgtcttggtgggtcaacggcaaagaggtgcacagcggcgtgtgtaccgacccccagccactgaaagaacagcccgccctgaacgacagccggtactgcctgagcagcagactgagagtgtccgccaccttctggcagaacccccggaaccacttcagatgccaggtgcagttctacggcctgagcgagaacgacgagtggacccaggacagagccaagcccgtgacccagatcgtgtctgccgaagcctggggcagagccgattgcggcatcaccagcgccagctaccaccagggcgtgctgagcgccaccatcctgtacgagatcctgctgggcaaggccaccctgtacgccgtgctggtgtctgccctggtgctgatggctatggtcaagcggaaggacagccgggga

SEQ ID NO: 34014 - DNA, 2712 bp, synthetic construct
  source 1..2712: mol_type = other DNA
atggccttaccagtgaccgccttgctcctgccgctggccttgctgctccacgccgccaggccggaagtgcagctggttgaatctggcggaggactggttcaggctggcggatctctgagactgtcttgtgccgccagcggcagaacctttagcatgggctggtttagacaggcccctggcaaagagagagagttcgtcgccgccatcacatactctggcggcagcccttactacgccgactctgtgaagggcagattcaccatcagccgggacaacgccaagaacaccgtgtacctccagatgaacagcctgaagcctgaggacaccgccgtgtactactgcgccgccaatccaacatacggcagcgactggaacgccgagaattggggccagggaacccaagtgacagtgtctagcggtaccggcggaggcggatctggcggcggaggtagcggtggcggaggatctgaattcgacatccagatgacacagagccctagcagcctgtctgccagcgtgggagacagagtgaccatcacatgcaaggccagcgaccacatcaacaactggctggcctggtatcagcagaagcctggacaggcccctaagctgctgatctacggcgctaccacactggaaacaggcgtgcccagcagattttctggcagcggctctggcaccgactacaccctgacaatatccagcctccagcctgaggacttcgccacctactactgtcagcagagctggaacaccccttggacattcggccagggcaccaagctggaaatcaagagactcgaggacctgaagaacgtgttcccacctgaggtggccgtgttcgagcctagcgaggccgagatcagccacacccagaaagccaccctcgtgtgcctggctaccggcttctaccccgaccatgtggaactgtcttggtgggtcaacggcaaagaggtgcacagcggcgtgtgtaccgacccccagccactgaaagaacagcccgccctgaacgacagccggtactgcctgagcagcagactgagagtgtccgccaccttctggcagaacccccggaaccacttcagatgccaggtgcagttctacggcctgagcgagaacgacgagtggacccaggacagagccaagcccgtgacccagatcgtgtctgccgaagcctggggcagagccgattgcggctttaccagcgagagctaccagcagggcgtgctgagcgccaccatcctgtacgagatcctgctgggcaaggccaccctgtacgccgtgctggtgtctgccctggtgctgatggctatggtcaagcggaaggacagccggggaagggccaagcgatctggatctggagcaacaaacttctcactactcaaacaagcaggtgacgtggaggagaatcccgggcctactagtaccatggactggatttggcgcatccttttccttgtcggcgctgctaccggcgcccattccgggccccaggtgcagctggttgaatctggcggaggactggttcagcctggcggatctctgagactgtcttgtgccgccagcggcaacatcaacagcagaaactgcatgggctggttcagacaggcccctggcaagggaagagaaggcgtggcagctatcggccaagtgaccggcagaacctactacgtggacagcgtgaagggcagattcaccatcagcctggacaacagcaagaacaccctgtacctccagatgaacagcctgagagccgaggacaccgccgtgtactattgtgctgctgcccctggctgtctgctgtctgcacttagaagcgccgactacagaaactggggccagggcacactggtcaccgtttcttctggatccggcggcggaggatctggcggaggcggatctgggggcggaggctctttcgaacaagttcagcttcaacagcctggcgctgagctggtcaaacctggcgcttctgtgaagatgagctgcaaagccagcggctacaccttcagcagctactggatcaactggatgaagcagaaacccggccagggactcgaatggatcggccaaatctatcccggcgacggcgacaccaactacaacggcaagttcaagggcagagccacactgaccgccgatacctctagcagcacagcctacatgcagctgagcagcctgaccagcgaagatagcgccgtgtacttctgtgcccggtccatcacaacagtcgtgggctgcgctatggactattggggccagggaacaagcgtgaccgtgtctagtacgcgtatccagaaccctgatcctgccgtgtaccagctgcgggatagcaagagcagcgacaagagcgtgtgtctgttcaccgacttcgacagccagaccaacgtgtcccagagcaaggactccgacgtgtacatcaccgataagtgcgtgctggacatgcggagcatggacttcaagagcaactccgccgtggcctggtccaacaagtccgatttcgcctgcgccaacgccttcaacaacagcattatccccgaggacacattcttcccaagccccgagagcagctgcgacgtgaagctggtggaaaagagcttcgagacagacaccaacctgaacttccagaacctgagcgtgatcggcttcagaatcctgctgctgaaagtggccggctttaacctgctgatgaccctgcggctgtggtccagc

SEQ ID NO: 34015 - DNA, 2712 bp, synthetic construct
  source 1..2712: mol_type = other DNA
atggccttaccagtgaccgccttgctcctgccgctggccttgctgctccacgccgccaggccggaagtgcaactggttgaatccggtggcggcctggtgcaagcaggcggatctctcagacttagctgtgccgcctccggcagaaccttcacaatgggatggtttaggcaggctccagggaaagagagagagttcgtcgccgccatctctctgtctcccacactggcctactacgccgactctgtgaaaggccggttcaccatctccagagataatgccaagaacaccgtggtgctgcaaatgaactctctgaaacccgaggatacagccctgtactattgtgccgctgaccggaagtccgtgatgagcatcagacccgattactggggacagggcacacaagtcacagtgtcctctggtaccggcggaggcggatctggcggcggaggtagcggtggcggaggatctgaattcgacatccagatgacacagagccctagcagcctgtctgccagcgtgggagacagagtgaccatcacatgcaaggccagcgaccacatcaacaactggctggcctggtatcagcagaagcctggacaggcccctaagctgctgatctacggcgctaccacactggaaacaggcgtgcccagcagattttctggcagcggctctggcaccgactacaccctgacaatatccagcctccagcctgaggacttcgccacctactactgtcagcagagctggaacaccccttggacattcggccagggcaccaagctggaaatcaagagactcgaggacctgaagaacgtgttcccacctgaggtggccgtgttcgagcctagcgaggccgagatcagccacacccagaaagccaccctcgtgtgcctggctaccggcttctaccccgaccatgtggaactgtcttggtgggtcaacggcaaagaggtgcacagcggcgtgtgtaccgacccccagccactgaaagaacagcccgccctgaacgacagccggtactgcctgagcagcagactgagagtgtccgccaccttctggcagaacccccggaaccacttcagatgccaggtgcagttctacggcctgagcgagaacgacgagtggacccaggacagagccaagcccgtgacccagatcgtgtctgccgaagcctggggcagagccgattgcggctttaccagcgagagctaccagcagggcgtgctgagcgccaccatcctgtacgagatcctgctgggcaaggccaccctgtacgccgtgctggtgtctgccctggtgctgatggctatggtcaagcggaaggacagccggggaagggccaagcgatctggatctggagcaacaaacttctcactactcaaacaagcaggtgacgtggaggagaatcccgggcctactagtaccatggactggatttggcgcatccttttccttgtcggcgctgctaccggcgcccattccgggccccaggtgcagctggttgaatctggcggaggactggttcagcctggcggatctctgagactgtcttgtgccgccagcggcaacatcaacagcagaaactgcatgggctggttcagacaggcccctggcaagggaagagaaggcgtggcagctatcggccaagtgaccggcagaacctactacgtggacagcgtgaagggcagattcaccatcagcctggacaacagcaagaacaccctgtacctccagatgaacagcctgagagccgaggacaccgccgtgtactattgtgctgctgcccctggctgtctgctgtctgcacttagaagcgccgactacagaaactggggccagggcacactggtcaccgtttcttctggatccggcggcggaggatctggcggaggcggatctgggggcggaggctctttcgaacaagttcagcttcaacagcctggcgctgagctggtcaaacctggcgcttctgtgaagatgagctgcaaagccagcggctacaccttcagcagctactggatcaactggatgaagcagaaacccggccagggactcgaatggatcggccaaatctatcccggcgacggcgacaccaactacaacggcaagttcaagggcagagccacactgaccgccgatacctctagcagcacagcctacatgcagctgagcagcctgaccagcgaagatagcgccgtgtacttctgtgcccggtccatcacaacagtcgtgggctgcgctatggactattggggccagggaacaagcgtgaccgtgtctagtacgcgtatccagaaccctgatcctgccgtgtaccagctgcgggatagcaagagcagcgacaagagcgtgtgtctgttcaccgacttcgacagccagaccaacgtgtcccagagcaaggactccgacgtgtacatcaccgataagtgcgtgctggacatgcggagcatggacttcaagagcaactccgccgtggcctggtccaacaagtccgatttcgcctgcgccaacgccttcaacaacagcattatccccgaggacacattcttcccaagccccgagagcagctgcgacgtgaagctggtggaaaagagcttcgagacagacaccaacctgaacttccagaacctgagcgtgatcggcttcagaatcctgctgctgaaagtggccggctttaacctgctgatgaccctgcggctgtggtccagc

SEQ ID NO: 34016 - DNA, 2724 bp, synthetic construct
  source 1..2724: mol_type = other DNA
atggccttaccagtgaccgccttgctcctgccgctggccttgctgctccacgccgccaggccgcaggttcagctgcaagagtctggccctggcctggtcaagcctagccaaacactgagcctgacctgtaccgtgtctggcggctctatcaccaccggcgagttctactggaactggttcagacagcctcctggcaaaggactggaatggatgggagccattgccgccagcggcagcacaacatacagccctagcttcgagagccggaccagcatcagcagagacaccagcaagaatcagttcagcctgaagctgagcagcgtgacagccgccgatacagccgtgtattactgcggcagatcctttggagtggccgccgtgacaaccggccagaatagaggacagggcaccctggtcacagtgtctagcggtaccggcggaggcggatctggcggcggaggtagcggtggcggaggatctgaattcgacatccagatgacacagagccctagcagcctgtctgccagcgtgggagacagagtgaccatcacatgcaaggccagcgaccacatcaacaactggctggcctggtatcagcagaagcctggacaggcccctaagctgctgatctacggcgctaccacactggaaacaggcgtgcccagcagattttctggcagcggctctggcaccgactacaccctgacaatatccagcctccagcctgaggacttcgccacctactactgtcagcagagctggaacaccccttggacattcggccagggcaccaagctggaaatcaagagactcgaggacctgaagaacgtgttcccacctgaggtggccgtgttcgagcctagcgaggccgagatcagccacacccagaaagccaccctcgtgtgcctggctaccggcttctaccccgaccatgtggaactgtcttggtgggtcaacggcaaagaggtgcacagcggcgtgtgtaccgacccccagccactgaaagaacagcccgccctgaacgacagccggtactgcctgagcagcagactgagagtgtccgccaccttctggcagaacccccggaaccacttcagatgccaggtgcagttctacggcctgagcgagaacgacgagtggacccaggacagagccaagcccgtgacccagatcgtgtctgccgaagcctggggcagagccgattgcggctttaccagcgagagctaccagcagggcgtgctgagcgccaccatcctgtacgagatcctgctgggcaaggccaccctgtacgccgtgctggtgtctgccctggtgctgatggctatggtcaagcggaaggacagccggggaagggccaagcgatctggatctggagcaacaaacttctcactactcaaacaagcaggtgacgtggaggagaatcccgggcctactagtaccatggactggatttggcgcatccttttccttgtcggcgctgctaccggcgcccattccgggccccaggtgcagctggttgaatctggcggaggactggttcagcctggcggatctctgagactgtcttgtgccgccagcggcaacatcaacagcagaaactgcatgggctggttcagacaggcccctggcaagggaagagaaggcgtggcagctatcggccaagtgaccggcagaacctactacgtggacagcgtgaagggcagattcaccatcagcctggacaacagcaagaacaccctgtacctccagatgaacagcctgagagccgaggacaccgccgtgtactattgtgctgctgcccctggctgtctgctgtctgcacttagaagcgccgactacagaaactggggccagggcacactggtcaccgtttcttctggatccggcggcggaggatctggcggaggcggatctgggggcggaggctctttcgaacaagttcagcttcaacagcctggcgctgagctggtcaaacctggcgcttctgtgaagatgagctgcaaagccagcggctacaccttcagcagctactggatcaactggatgaagcagaaacccggccagggactcgaatggatcggccaaatctatcccggcgacggcgacaccaactacaacggcaagttcaagggcagagccacactgaccgccgatacctctagcagcacagcctacatgcagctgagcagcctgaccagcgaagatagcgccgtgtacttctgtgcccggtccatcacaacagtcgtgggctgcgctatggactattggggccagggaacaagcgtgaccgtgtctagtacgcgtatccagaaccctgatcctgccgtgtaccagctgcgggatagcaagagcagcgacaagagcgtgtgtctgttcaccgacttcgacagccagaccaacgtgtcccagagcaaggactccgacgtgtacatcaccgataagtgcgtgctggacatgcggagcatggacttcaagagcaactccgccgtggcctggtccaacaagtccgatttcgcctgcgccaacgccttcaacaacagcattatccccgaggacacattcttcccaagccccgagagcagctgcgacgtgaagctggtggaaaagagcttcgagacagacaccaacctgaacttccagaacctgagcgtgatcggcttcagaatcctgctgctgaaagtggccggctttaacctgctgatgaccctgcggctgtggtccagc

SEQ ID NO: 34017 - DNA, 1461 bp, synthetic construct
  source 1..1461: mol_type = other DNA
atggccttaccagtgaccgccttgctcctgccgctggccttgctgctccacgccgccaggccggacatccagatgacacagagccctagcagcctgtctgccagcgtgggagacagagtgaccatcacatgcaaggccagcgaccacatcaacaactggctggcctggtatcagcagaagcctggacaggcccctaagctgctgatctacggcgctaccacactggaaacaggcgtgcccagcagattttctggcagcggctctggcaccgactacaccctgacaatatccagcctccagcctgaggacttcgccacctactactgtcagcagagctggaacaccccttggacattcggccagggcaccaagctggaaatcaagagaggcggaggcggaagtggaggcggaggatctggcggcggaggctctcaagttcagcttcaacagcctggcgctgagctggtcaaacctggcgcttctgtgaagatgagctgcaaagccagcggctacgccttcagcagctcttggatcaactggatgaagcagaaacccggccagggactcgaatggatcggccaaatctatcccggcgacggcgacaccaactacaacggcaagttcaagggcagagccacactgaccgccgatacctctagcagcacagcctacatgcagctgagcagcctgaccagcgaagatagcgccgtgtacttctgtgcccggtccatcacaacagtcgtgggctgcgctatggactattggggccagggaacaagcgtgaccgtgtctagtacgcgtaaaattgaagttatgtatcctcctccttacctagacaatgagaagagcaatggaaccattatccatgtgaaagggaaacacctttgtccaagtcccctatttcccggaccttctaagcccttttgggtgctggtggtggttgggggagtcctggcttgctatagcttgctagtaacagtggcctttattattttctgggtgaggagtaagaggagcaggctcctgcacagtgactacatgaacatgactccacgccgccccggacccacccgcaagcattaccagccctatgccccaccacgcgacttcgcagcctatcgctccagagtgaagttcagcaggagcgcagacgcccccgcgtaccagcagggccagaaccagctctataacgagctcaatctaggacgaagagaggagtacgatgttttggacaagagacgtggccgggaccctgagatggggggaaagccgagaaggaagaaccctcaggaaggcctgtacaatgaactgcagaaagataagatggcggaggcctacagtgagattgggatgaaaggcgagcgccggaggggcaaggggcacgatggcctttaccagggtctcagtacagccaccaaggacacctacgacgcccttcacatgcaggccctgccccctcgc

SEQ ID NO: 34018 - DNA, 1479 bp, synthetic construct
  source 1..1479: mol_type = other DNA
atggccttaccagtgaccgccttgctcctgccgctggccttgctgctccacgccgccaggccggacatccagatgacacagagccctagcagcctgtctgccagcgtgggagacagagtgaccatcacatgcaaggccagcgaccacatcaacaactggctggcctggtatcagcagaagcctggacaggcccctaagctgctgatctacggcgctaccacactggaaacaggcgtgcccagcagattttctggcagcggctctggcaccgactacaccctgacaatatccagcctccagcctgaggacttcgccacctactactgtcagcagagctggaacaccccttggacattcggccagggcaccaagctggaaatcaagagaggcggaggcggaagtggaggcggaggatctggcggcggaggctctcaagttcagcttcaacagcctggcgctgagctggtcaaacctggcgcttctgtgaagatgagctgcaaagccagcggctacgccttcagcagctcttggatcaactggatgaagcagaaacccggccagggactcgaatggatcggccaaatctatcccggcgacggcgacaccaactacaacggcaagttcaagggcagagccacactgaccgccgatacctctagcagcacagcctacatgcagctgagcagcctgaccagcgaagatagcgccgtgtacttctgtgcccggtccatcacaacagtcgtgggctgcgctatggactattggggccagggaacaagcgtgaccgtgtctagtacgcgtgcgaagcccaccacgacgccagcgccgcgaccaccaacaccggcgcccaccatcgcgtcgcagcccctgtccctgcgcccagaggcgtgccggccagcggcggggggcgcagtgcacacgagggggctggacttcgcctgtgacatctacatctgggcgcccttggccgggacttgtggggtccttctcctgtcactggttatcaccctttactgcaaacggggcagaaagaaactcctgtatatattcaaacaaccatttatgagaccagtacaaactactcaagaggaagatggctgtagctgccgatttccagaagaagaagaaggaggatgtgaactgagagtgaagttcagcaggagcgcagacgcccccgcgtaccagcagggccagaaccagctctataacgagctgaatctaggacgaagagaggagtacgatgttttggacaagagacgtggccgggaccctgagatggggggaaagccgagaaggaagaaccctcaggaaggcctgtacaatgaactgcagaaagataagatggcggaggcctacagtgagattgggatgaaaggcgagcgccggaggggcaaggggcacgatggcctttaccagggtctcagtacagccaccaaggacacctacgacgcccttcacatgcaggccctgccccctcgc

SEQ ID NO: 34019 - DNA, 1479 bp, synthetic construct
  source 1..1479: mol_type = other DNA
atggccttaccagtgaccgccttgctcctgccgctggccttgctgctccacgccgccaggccgcaagttcagcttcaacagcctggcgctgagctggtcaaacctggcgcttctgtgaagatgagctgcaaagccagcggctacgccttcagcagctcttggatcaactggatgaagcagaaacccggccagggactcgaatggatcggccaaatctatcccggcgacggcgacaccaactacaacggcaagttcaagggcagagccacactgaccgccgatacctctagcagcacagcctacatgcagctgagcagcctgaccagcgaagatagcgccgtgtacttctgtgcccggtccatcacaacagtcgtgggctgcgctatggactattggggccagggaacaagcgtgaccgtgtctagtggcggaggcggaagtggaggcggaggatctggcggcggaggctctgacatccagatgacacagagccctagcagcctgtctgccagcgtgggagacagagtgaccatcacatgcaaggccagcgaccacatcaacaactggctggcctggtatcagcagaagcctggacaggcccctaagctgctgatctacggcgctaccacactggaaacaggcgtgcccagcagattttctggcagcggctctggcaccgactacaccctgacaatatccagcctccagcctgaggacttcgccacctactactgtcagcagagctggaacaccccttggacattcggccagggcaccaagctggaaatcaagagaacgcgtgcgaagcccaccacgacgccagcgccgcgaccaccaacaccggcgcccaccatcgcgtcgcagcccctgtccctgcgcccagaggcgtgccggccagcggcggggggcgcagtgcacacgagggggctggacttcgcctgtgacatctacatctgggcgcccttggccgggacttgtggggtccttctcctgtcactggttatcaccctttactgcaaacggggcagaaagaaactcctgtatatattcaaacaaccatttatgagaccagtacaaactactcaagaggaagatggctgtagctgccgatttccagaagaagaagaaggaggatgtgaactgagagtgaagttcagcaggagcgcagacgcccccgcgtaccagcagggccagaaccagctctataacgagctgaatctaggacgaagagaggagtacgatgttttggacaagagacgtggccgggaccctgagatggggggaaagccgagaaggaagaaccctcaggaaggcctgtacaatgaactgcagaaagataagatggcggaggcctacagtgagattgggatgaaaggcgagcgccggaggggcaaggggcacgatggcctttaccagggtctcagtacagccaccaaggacacctacgacgcccttcacatgcaggccctgccccctcgc

SEQ ID NO: 34020 - DNA, 1878 bp, synthetic construct
  source 1..1878: mol_type = other DNA
atggccttaccagtgaccgccttgctcctgccgctggccttgctgctccacgccgccaggccggacatccagatgacacagagccctagcagcctgtctgccagcgtgggagacagagtgaccatcacatgcaaggccagcgaccacatcaacaactggctggcctggtatcagcagaagcctggacaggcccctaagctgctgatctacggcgctaccacactggaaacaggcgtgcccagcagattttctggcagcggctctggcaccgactacaccctgacaatatccagcctccagcctgaggacttcgccacctactactgtcagcagagctggaacaccccttggacattcggccagggcaccaagctggaaatcaagagactcgagatccagaaccctgatcctgccgtgtaccagctgcgggatagcaagagcagcgacaagagcgtgtgtctgttcaccgacttcgacagccagaccaacgtgtcccagagcaaggactccgacgtgtacatcaccgataagtgcgtgctggacatgcggagcatggacttcaagagcaactccgccgtggcctggtccaacaagtccgatttcgcctgcgccaacgccttcaacaacagcattatccccgaggacacattcttcccaagcagcgacgtgccctgcgacgtgaagctggtggaaaagagcttcgagacagacaccaacctgaacttccagaacctgagcgtgatcggcttcagaatcctgctgctgaaagtggccggctttaacctgctgatgaccctgcggctgtggtccagccgcgccaagagaagcggatctggcgtgaagcagaccctgaatttcgacctgctgaagctggctggcgacgtggaatccaacccaggccctactagtatggactggatttggcgcatccttttccttgtcggcgctgctaccggcgcgcattccttcgaacaagttcagcttcaacagcctggcgctgagctggtcaaacctggcgcttctgtgaagatgagctgcaaagccagcggctacgccttcagcagctcttggatcaactggatgaagcagaaacccggccagggactcgaatggatcggccaaatctatcccggcgacggcgacaccaactacaacggcaagttcaagggcagagccacactgaccgccgatacctctagcagcacagcctacatgcagctgagcagcctgaccagcgaagatagcgccgtgtacttctgtgcccggtccatcacaacagtcgtgggctgcgctatggactattggggccagggaacaagcgtgaccgtgtctagtacgcgtgaggacctgaagaacgtgttcccacctgaggtggccgtgttcgagcctagcaaggccgagatcgcccacacccagaaagccaccctcgtgtgcctggctaccggcttctaccccgaccatgtggaactgtcttggtgggtcaacggcaaagaggtgcacagcggcgtgtgtaccgacccccagccactgaaagaacagcccgccctgaacgacagccggtactgcctgagcagcagactgagagtgtccgccaccttctggcagaacccccggaaccacttcagatgccaggtgcagttctacggcctgagcgagaacgacgagtggacccaggacagagccaagcccgtgacccagatcgtgtctgccgaagcctggggcagagccgattgcggcatcaccagcgccagctaccaccagggcgtgctgagcgccaccatcctgtacgagatcctgctgggcaaggccaccctgtacgccgtgctggtgtctgccctggtgctgatggctatggtcaagcggaaggacagccgggga

SEQ ID NO: 34021 - DNA, 1866 bp, synthetic construct
  source 1..1866: mol_type = other DNA
atggccttaccagtgaccgccttgctcctgccgctggccttgctgctccacgccgccaggccggacatccagatgacacagagccctagcagcctgtctgccagcgtgggagacagagtgaccatcacatgcaaggccagcgaccacatcaacaactggctggcctggtatcagcagaagcctggacaggcccctaagctgctgatctacggcgctaccacactggaaacaggcgtgcccagcagattttctggcagcggctctggcaccgactacaccctgacaatatccagcctccagcctgaggacttcgccacctactactgtcagcagagctggaacaccccttggacattcggccagggcaccaagctggaaatcaagagactcgaggacctgaagaacgtgttcccacctgaggtggccgtgttcgagcctagcaaggccgagatcgcccacacccagaaagccaccctcgtgtgcctggctaccggcttctaccccgaccatgtggaactgtcttggtgggtcaacggcaaagaggtgcacagcggcgtgtgtaccgacccccagccactgaaagaacagcccgccctgaacgacagccggtactgcctgagcagcagactgagagtgtccgccaccttctggcagaacccccggaaccacttcagatgccaggtgcagttctacggcctgagcgagaacgacgagtggacccaggacagagccaagcccgtgacccagatcgtgtctgccgaagcctggggcagagccgattgcggcatcaccagcgccagctaccaccagggcgtgctgagcgccaccatcctgtacgagatcctgctgggcaaggccaccctgtacgccgtgctggtgtctgccctggtgctgatggctatggtcaagcggaaggacagccggggaagggccaagcgatctggatctggagcaacaaacttctcactactcaaacaagcaggtgacgtggaggagaatcccgggcctactagtatggactggatttggcgcatccttttccttgtcggcgctgctaccggcgcgcattccttcgaacaagttcagcttcaacagcctggcgctgagctggtcaaacctggcgcttctgtgaagatgagctgcaaagccagcggctacgccttcagcagctcttggatcaactggatgaagcagaaacccggccagggactcgaatggatcggccaaatctatcccggcgacggcgacaccaactacaacggcaagttcaagggcagagccacactgaccgccgatacctctagcagcacagcctacatgcagctgagcagcctgaccagcgaagatagcgccgtgtacttctgtgcccggtccatcacaacagtcgtgggctgcgctatggactattggggccagggaacaagcgtgaccgtgtctagtacgcgtatccagaaccctgatcctgccgtgtaccagctgcgggatagcaagagcagcgacaagagcgtgtgtctgttcaccgacttcgacagccagaccaacgtgtcccagagcaaggactccgacgtgtacatcaccgataagtgcgtgctggacatgcggagcatggacttcaagagcaactccgccgtggcctggtccaacaagtccgatttcgcctgcgccaacgccttcaacaacagcattatccccgaggacacattcttcccaagcagcgacgtgccctgcgacgtgaagctggtggaaaagagcttcgagacagacaccaacctgaacttccagaacctgagcgtgatcggcttcagaatcctgctgctgaaagtggccggctttaacctgctgatgaccctgcggctgtggtccagc

SEQ ID NO: 34022 - DNA, 1866 bp, synthetic construct
  source 1..1866: mol_type = other DNA
atggccttaccagtgaccgccttgctcctgccgctggccttgctgctccacgccgccaggccggacatccagatgacacagagccctagcagcctgtctgccagcgtgggagacagagtgaccatcacatgcaaggccagcgaccacatcaacaactggctggcctggtatcagcagaagcctggacaggcccctaagctgctgatctacggcgctaccacactggaaacaggcgtgcccagcagattttctggcagcggctctggcaccgactacaccctgacaatatccagcctccagcctgaggacttcgccacctactactgtcagcagagctggaacaccccttggacattcggccagggcaccaagctggaaatcaagagactcgaggacctgaagaacgtgttcccacctgaggtggccgtgttcgagcctagcgaggccgagatcagccacacccagaaagccaccctcgtgtgcctggctaccggcttctaccccgaccatgtggaactgtcttggtgggtcaacggcaaagaggtgcacagcggcgtgtgtaccgacccccagccactgaaagaacagcccgccctgaacgacagccggtactgcctgagcagcagactgagagtgtccgccaccttctggcagaacccccggaaccacttcagatgccaggtgcagttctacggcctgagcgagaacgacgagtggacccaggacagagccaagcccgtgacccagatcgtgtctgccgaagcctggggcagagccgattgcggctttaccagcgagagctaccagcagggcgtgctgagcgccaccatcctgtacgagatcctgctgggcaaggccaccctgtacgccgtgctggtgtctgccctggtgctgatggctatggtcaagcggaaggacagccggggaagggccaagcgatctggatctggagcaacaaacttctcactactcaaacaagcaggtgacgtggaggagaatcccgggcctactagtatggactggatttggcgcatccttttccttgtcggcgctgctaccggcgcgcattccttcgaacaagttcagcttcaacagcctggcgctgagctggtcaaacctggcgcttctgtgaagatgagctgcaaagccagcggctacgccttcagcagctcttggatcaactggatgaagcagaaacccggccagggactcgaatggatcggccaaatctatcccggcgacggcgacaccaactacaacggcaagttcaagggcagagccacactgaccgccgatacctctagcagcacagcctacatgcagctgagcagcctgaccagcgaagatagcgccgtgtacttctgtgcccggtccatcacaacagtcgtgggctgcgctatggactattggggccagggaacaagcgtgaccgtgtctagtacgcgtatccagaaccctgatcctgccgtgtaccagctgcgggatagcaagagcagcgacaagagcgtgtgtctgttcaccgacttcgacagccagaccaacgtgtcccagagcaaggactccgacgtgtacatcaccgataagtgcgtgctggacatgcggagcatggacttcaagagcaactccgccgtggcctggtccaacaagtccgatttcgcctgcgccaacgccttcaacaacagcattatccccgaggacacattcttcccaagccccgagagcagctgcgacgtgaagctggtggaaaagagcttcgagacagacaccaacctgaacttccagaacctgagcgtgatcggcttcagaatcctgctgctgaaagtggccggctttaacctgctgatgaccctgcggctgtggtccagc

SEQ ID NO: 34023 - DNA, 1878 bp, synthetic construct
  source 1..1878: mol_type = other DNA
atggccttaccagtgaccgccttgctcctgccgctggccttgctgctccacgccgccaggccggacatccagatgacacagagccctagcagcctgtctgccagcgtgggagacagagtgaccatcacatgcaaggccagcgaccacatcaacaactggctggcctggtatcagcagaagcctggacaggcccctaagctgctgatctacggcgctaccacactggaaacaggcgtgcccagcagattttctggcagcggctctggcaccgactacaccctgacaatatccagcctccagcctgaggacttcgccacctactactgtcagcagagctggaacaccccttggacattcggccagggcaccaagctggaaatcaagagactcgagatccagaaccctgatcctgccgtgtaccagctgcgggatagcaagagcagcgacaagagcgtgtgtctgttcaccgacttcgacagccagaccaacgtgtcccagagcaaggactccgacgtgtacatcaccgataagtgcgtgctggacatgcggagcatggacttcaagagcaactccgccgtggcctggtccaacaagtccgatttcgcctgcgccaacgccttcaacaacagcattatccccgaggacacattcttcccaagccccgagagcagctgcgacgtgaagctggtggaaaagagcttcgagacagacaccaacctgaacttccagaacctgagcgtgatcggcttcagaatcctgctgctgaaagtggccggctttaacctgctgatgaccctgcggctgtggtccagccgcgccaagagaagcggatctggcgtgaagcagaccctgaatttcgacctgctgaagctggctggcgacgtggaatccaacccaggccctactagtatggactggatttggcgcatccttttccttgtcggcgctgctaccggcgcgcattccttcgaacaagttcagcttcaacagcctggcgctgagctggtcaaacctggcgcttctgtgaagatgagctgcaaagccagcggctacgccttcagcagctcttggatcaactggatgaagcagaaacccggccagggactcgaatggatcggccaaatctatcccggcgacggcgacaccaactacaacggcaagttcaagggcagagccacactgaccgccgatacctctagcagcacagcctacatgcagctgagcagcctgaccagcgaagatagcgccgtgtacttctgtgcccggtccatcacaacagtcgtgggctgcgctatggactattggggccagggaacaagcgtgaccgtgtctagtacgcgtgaggacctgaagaacgtgttcccacctgaggtggccgtgttcgagcctagcgaggccgagatcagccacacccagaaagccaccctcgtgtgcctggctaccggcttctaccccgaccatgtggaactgtcttggtgggtcaacggcaaagaggtgcacagcggcgtgtgtaccgacccccagccactgaaagaacagcccgccctgaacgacagccggtactgcctgagcagcagactgagagtgtccgccaccttctggcagaacccccggaaccacttcagatgccaggtgcagttctacggcctgagcgagaacgacgagtggacccaggacagagccaagcccgtgacccagatcgtgtctgccgaagcctggggcagagccgattgcggctttaccagcgagagctaccagcagggcgtgctgagcgccaccatcctgtacgagatcctgctgggcaaggccaccctgtacgccgtgctggtgtctgccctggtgctgatggctatggtcaagcggaaggacagccgggga

SEQ ID NO: 34024 - DNA, 1914 bp, synthetic construct
  source 1..1914: mol_type = other DNA
atggccttaccagtgaccgccttgctcctgccgctggccttgctgctccacgccgccaggccgctcgaggaggacctgaagaacgtgttcccacctgaggtggccgtgttcgagcctagcaaggccgagatcgcccacacccagaaagccaccctcgtgtgcctggctaccggcttctaccccgaccatgtggaactgtcttggtgggtcaacggcaaagaggtgcacagcggcgtgtgtaccgacccccagccactgaaagaacagcccgccctgaacgacagccggtactgcctgagcagcagactgagagtgtccgccaccttctggcagaacccccggaaccacttcagatgccaggtgcagttctacggcctgagcgagaacgacgagtggacccaggacagagccaagcccgtgacccagatcgtgtctgccgaagcctggggcagagccgattgcggcatcaccagcgccagctaccaccagggcgtgctgagcgccaccatcctgtacgagatcctgctgggcaaggccaccctgtacgccgtgctggtgtctgccctggtgctgatggctatggtcaagcggaaggacagccggggaagggccaagcgatctggatctggagcaacaaacttctcactactcaaacaagcaggtgacgtggaggagaatcccgggcctactagcatggccttaccagtgaccgccttgctcctgccgctggccttgctgctccacgccgccaggccggacatccagatgacacagagccctagcagcctgtctgccagcgtgggagacagagtgaccatcacatgcaaggccagcgaccacatcaacaactggctggcctggtatcagcagaagcctggacaggcccctaagctgctgatctacggcgctaccacactggaaacaggcgtgcccagcagattttctggcagcggctctggcaccgactacaccctgacaatatccagcctccagcctgaggacttcgccacctactactgtcagcagagctggaacaccccttggacattcggccagggcaccaagctggaaatcaagagaggcggaggcggaagtggaggcggaggatctggcggcggaggctctcaagttcagcttcaacagcctggcgctgagctggtcaaacctggcgcttctgtgaagatgagctgcaaagccagcggctacgccttcagcagctcttggatcaactggatgaagcagaaacccggccagggactcgaatggatcggccaaatctatcccggcgacggcgacaccaactacaacggcaagttcaagggcagagccacactgaccgccgatacctctagcagcacagcctacatgcagctgagcagcctgaccagcgaagatagcgccgtgtacttctgtgcccggtccatcacaacagtcgtgggctgcgctatggactattggggccagggaacaagcgtgaccgtgtctagtacgcgtatccagaaccctgatcctgccgtgtaccagctgcgggatagcaagagcagcgacaagagcgtgtgtctgttcaccgacttcgacagccagaccaacgtgtcccagagcaaggactccgacgtgtacatcaccgataagtgcgtgctggacatgcggagcatggacttcaagagcaactccgccgtggcctggtccaacaagtccgatttcgcctgcgccaacgccttcaacaacagcattatccccgaggacacattcttcccaagcagcgacgtgccctgcgacgtgaagctggtggaaaagagcttcgagacagacaccaacctgaacttccagaacctgagcgtgatcggcttcagaatcctgctgctgaaagtggccggctttaacctgctgatgaccctgcggctgtggtccagc

SEQ ID NO: 34025 - DNA, 1935 bp, synthetic construct
  source 1..1935: mol_type = other DNA
atggccttaccagtgaccgccttgctcctgccgctggccttgctgctccacgccgccaggccgctcgagggctccggcgatcgccctgatcctgccgtgtaccagctgcgggatagcaagagcagcgacaagagcgtgtgtctgttcaccgacttcgacagccagaccaacgtgtcccagagcaaggactccgacgtgtacatcaccgataagtgcgtgctggacatgcggagcatggacttcaagagcaactccgccgtggcctggtccaacaagtccgatttcgcctgcgccaacgccttcaacaacagcattatccccgaggacacattcttcccaagccccgagagcagctgcgacgtgaagctggtggaaaagagcttcgagacagacaccaacctgaacttccagaacctgagcgtgatcggcttcagaatcctgctgctgaaagtggccggctttaacctgctgatgaccctgcggctgtggtccagctctagtcgcgccaagagaagcggatctggcgtgaagcagaccctgaatttcgacctgctgaagctggctggcgacgtggaatccaacccaggccccactagcatggccttaccagtgaccgccttgctcctgccgctggccttgctgctccacgccgccaggccggacatccagatgacacagagccctagcagcctgtctgccagcgtgggagacagagtgaccatcacatgcaaggccagcgaccacatcaacaactggctggcctggtatcagcagaagcctggacaggcccctaagctgctgatctacggcgctaccacactggaaacaggcgtgcccagcagattttctggcagcggctctggcaccgactacaccctgacaatatccagcctccagcctgaggacttcgccacctactactgtcagcagagctggaacaccccttggacattcggccagggcaccaagctggaaatcaagagaggcggaggcggaagtggaggcggaggatctggcggcggaggctctcaagttcagcttcaacagcctggcgctgagctggtcaaacctggcgcttctgtgaagatgagctgcaaagccagcggctacgccttcagcagctcttggatcaactggatgaagcagaaacccggccagggactcgaatggatcggccaaatctatcccggcgacggcgacaccaactacaacggcaagttcaagggcagagccacactgaccgccgatacctctagcagcacagcctacatgcagctgagcagcctgaccagcgaagatagcgccgtgtacttctgtgcccggtccatcacaacagtcgtgggctgcgctatggactattggggccagggaacaagcgtgaccgtgtctagtacgcgtgaggacctgaagaacgtgttcccacctgaggtggccgtgttcgagcctagcgaggccgagatcagccacacccagaaagccaccctcgtgtgcctggctaccggcttctaccccgaccatgtggaactgtcttggtgggtcaacggcaaagaggtgcacagcggcgtgtgtaccgacccccagccactgaaagaacagcccgccctgaacgacagccggtactgcctgagcagcagactgagagtgtccgccaccttctggcagaacccccggaaccacttcagatgccaggtgcagttctacggcctgagcgagaacgacgagtggacccaggacagagccaagcccgtgacccagatcgtgtctgccgaagcctggggcagagccgattgcggctttaccagcgagagctaccagcagggcgtgctgagcgccaccatcctgtacgagatcctgctgggcaaggccaccctgtacgccgtgctggtgtctgccctggtgctgatggctatggtcaagcggaaggacagccgggga

SEQ ID NO: 34026 - DNA, 1866 bp, synthetic construct
  source 1..1866: mol_type = other DNA
atggccttaccagtgaccgccttgctcctgccgctggccttgctgctccacgccgccaggccggacatccagatgacacagagccctagcagcctgtctgccagcgtgggagacagagtgaccatcacatgcaaggccagcgaccacatcaacaactggctggcctggtatcagcagaagcctggacaggcccctaagctgctgatctacggcgctaccacactggaaacaggcgtgcccagcagattttctggcagcggctctggcaccgactacaccctgacaatatccagcctccagcctgaggacttcgccacctactactgtcagcagagctggaacaccccttggacattcggccagggcaccaagctggaaatcaagagactcgaggacctgaagaacgtgttcccacctgaggtggccgtgttcgagcctagcgaggccgagatcagccacacccagaaagccaccctcgtgtgcctggctaccggcttctaccccgaccatgtggaactgtcttggtgggtcaacggcaaagaggtgcacagcggcgtgtctaccgacccccagccactgaaagaacagcccgccctgaacgacagccggtactgcctgagcagcagactgagagtgtccgccaccttctggcagaacccccggaaccacttcagatgccaggtgcagttctacggcctgagcgagaacgacgagtggacccaggacagagccaagcccgtgacccagatcgtgtctgccgaagcctggggcagagccgattgcggctttaccagcgagagctaccagcagggcgtgctgagcgccaccatcctgtacgagatcctgctgggcaaggccaccctgtacgccgtgctggtgtctgccctggtgctgatggctatggtcaagcggaaggacagccggggaagggccaagcgatctggatctggagcaacaaacttctcactactcaaacaagcaggtgacgtggaggagaatcccgggcctactagtatggactggatttggcgcatccttttccttgtcggcgctgctaccggcgcgcattccttcgaacaagttcagcttcaacagcctggcgctgagctggtcaaacctggcgcttctgtgaagatgagctgcaaagccagcggctacgccttcagcagctcttggatcaactggatgaagcagaaacccggccagggactcgaatggatcggccaaatctatcccggcgacggcgacaccaactacaacggcaagttcaagggcagagccacactgaccgccgatacctctagcagcacagcctacatgcagctgagcagcctgaccagcgaagatagcgccgtgtacttctgtgcccggtccatcacaacagtcgtgggctgcgctatggactattggggccagggaacaagcgtgaccgtgtctagtacgcgtatccagaaccctgatcctgccgtgtaccagctgcgggatagcaagagcagcgacaagagcgtgtgtctgttcaccgacttcgacagccagaccaacgtgtcccagagcaaggactccgacgtgtacatcaccgataagaccgtgctggacatgcggagcatggacttcaagagcaactccgccgtggcctggtccaacaagtccgatttcgcctgcgccaacgccttcaacaacagcattatccccgaggacacattcttcccaagccccgagagcagctgcgacgtgaagctggtggaaaagagcttcgagacagacaccaacctgaacttccagaacctgagcgtgatcggcttcagaatcctgctgctgaaagtggccggctttaacctgctgatgaccctgcggctgtggtccagc

SEQ ID NO: 34027 - DNA, 1890 bp, synthetic construct
  source 1..1890: mol_type = other DNA
atggccttaccagtgaccgccttgctcctgccgctggccttgctgctccacgccgccaggccggacatccagatgacacagagccctagcagcctgtctgccagcgtgggagacagagtgaccatcacatgcaaggccagcgaccacatcaacaactggctggcctggtatcagcagaagcctggacaggcccctaagctgctgatctacggcgctaccacactggaaacaggcgtgcccagcagattttctggcagcggctctggcaccgactacaccctgacaatatccagcctccagcctgaggacttcgccacctactactgtcagcagagctggaacaccccttggacattcggccagggcaccaagctggaaatcaagagactcgaggacaagcagctggacgccgacgtgtcccccaagcctaccatcttcctgccctctatcgccgagacaaagctccagaaggccggcacctacctgtgcctgctggaaaagttcttcccagatgtgattaagatccactggcaggaaaagaagtccaacaccatcctgggcagccaggaaggcaacaccatgaagaccaacgacacctacatgaagttcagctggctgaccgtgcccgagaagtccctggacaaagaacacagatgcatcgtgcggcacgaaaacaacaagaacggcgtggaccaggaaatcatcttcccacccatcaagaccgatgtgattacaatggaccccaaggacaactgctccaaggacgccaacgataccctgctgctccagctgaccaacaccagcgcctactacatgtacttgttgctgctgctgaagtccgtggtgtacttcgccatcatcacatgctgcctgctgcggagaaccgccttctgctgcaacggcgagaagtctagggccaagcgatctggatctggagcaacaaacttctcactactcaaacaagcaggtgacgtggaggagaatcccgggcctactagtatggactggatttggcgcatccttttccttgtcggcgctgctaccggcgcgcattccttcgaacaagttcagcttcaacagcctggcgctgagctggtcaaacctggcgcttctgtgaagatgagctgcaaagccagcggctacgccttcagcagctcttggatcaactggatgaagcagaaacccggccagggactcgaatggatcggccaaatctatcccggcgacggcgacaccaactacaacggcaagttcaagggcagagccacactgaccgccgatacctctagcagcacagcctacatgcagctgagcagcctgaccagcgaagatagcgccgtgtacttctgtgcccggtccatcacaacagtcgtgggctgcgctatggactattggggccagggaacaagcgtgaccgtgtctagtacgcgtagccagcctcacaccaagcccagcgtgttcgtgatgaagaacggcaccaacgtggcctgcctcgtgaaagagttctaccccaaggacatcaggatcaacctggtgtccagcaagaagatcaccgagttcgaccccgccatcgtgatctcccccagcggcaagtacaacgccgtgaagctggggaagtacgaggacagcaacagcgtgacctgctccgtgcagcacgacaacaagaccgtgcacagcaccgactttgaagtgaaaaccgactccaccgaccacgtgaagcccaaagagacagagaacaccaagcagcccagcaagagctgccacaagcccaaggccatcgtgcacaccgagaaagtgaacatgatgagcctgaccgtgctgggcctgcggatgctgttcgccaaaaccgtggccgtgaacttcctgctgaccgccaagctgttcttcctc

SEQ ID NO: 34028 - DNA, 1890 bp, synthetic construct
  source 1..1890: mol_type = other DNA
atggccttaccagtgaccgccttgctcctgccgctggccttgctgctccacgccgccaggccggacatccagatgacacagagccctagcagcctgtctgccagcgtgggagacagagtgaccatcacatgcaaggccagcgaccacatcaacaactggctggcctggtatcagcagaagcctggacaggcccctaagctgctgatctacggcgctaccacactggaaacaggcgtgcccagcagattttctggcagcggctctggcaccgactacaccctgacaatatccagcctccagcctgaggacttcgccacctactactgtcagcagagctggaacaccccttggacattcggccagggcaccaagctggaaatcaagagactcgagagccagcctcacaccaagcccagcgtgttcgtgatgaagaacggcaccaacgtggcctgcctcgtgaaagagttctaccccaaggacatcaggatcaacctggtgtccagcaagaagatcaccgagttcgaccccgccatcgtgatctcccccagcggcaagtacaacgccgtgaagctggggaagtacgaggacagcaacagcgtgacctgctccgtgcagcacgacaacaagaccgtgcacagcaccgactttgaagtgaaaaccgactccaccgaccacgtgaagcccaaagagacagagaacaccaagcagcccagcaagagctgccacaagcccaaggccatcgtgcacaccgagaaagtgaacatgatgagcctgaccgtgctgggcctgcggatgctgttcgccaaaaccgtggccgtgaacttcctgctgaccgccaagctgttcttcctcagggccaagcgatctggatctggagcaacaaacttctcactactcaaacaagcaggtgacgtggaggagaatcccgggcctactagtatggactggatttggcgcatccttttccttgtcggcgctgctaccggcgcgcattccttcgaacaagttcagcttcaacagcctggcgctgagctggtcaaacctggcgcttctgtgaagatgagctgcaaagccagcggctacgccttcagcagctcttggatcaactggatgaagcagaaacccggccagggactcgaatggatcggccaaatctatcccggcgacggcgacaccaactacaacggcaagttcaagggcagagccacactgaccgccgatacctctagcagcacagcctacatgcagctgagcagcctgaccagcgaagatagcgccgtgtacttctgtgcccggtccatcacaacagtcgtgggctgcgctatggactattggggccagggaacaagcgtgaccgtgtctagtacgcgtgacaagcagctggacgccgacgtgtcccccaagcctaccatcttcctgccctctatcgccgagacaaagctccagaaggccggcacctacctgtgcctgctggaaaagttcttcccagatgtgattaagatccactggcaggaaaagaagtccaacaccatcctgggcagccaggaaggcaacaccatgaagaccaacgacacctacatgaagttcagctggctgaccgtgcccgagaagtccctggacaaagaacacagatgcatcgtgcggcacgaaaacaacaagaacggcgtggaccaggaaatcatcttcccacccatcaagaccgatgtgattacaatggaccccaaggacaactgctccaaggacgccaacgataccctgctgctccagctgaccaacaccagcgcctactacatgtacttgttgctgctgctgaagtccgtggtgtacttcgccatcatcacatgctgcctgctgcggagaaccgccttctgctgcaacggcgagaagtct

SEQ ID NO: 34029 - DNA, 1935 bp, synthetic construct
  source 1..1935: mol_type = other DNA
atggccttaccagtgaccgccttgctcctgccgctggccttgctgctccacgccgccaggccgctcgaggacaagcagctggacgccgacgtgtcccccaagcctaccatcttcctgccctctatcgccgagacaaagctccagaaggccggcacctacctgtgcctgctggaaaagttcttcccagatgtgattaagatccactggcaggaaaagaagtccaacaccatcctgggcagccaggaaggcaacaccatgaagaccaacgacacctacatgaagttcagctggctgaccgtgcccgagaagtccctggacaaagaacacagatgcatcgtgcggcacgaaaacaacaagaacggcgtggaccaggaaatcatcttcccacccatcaagaccgatgtgattacaatggaccccaaggacaactgctccaaggacgccaacgataccctgctgctccagctgaccaacaccagcgcctactacatgtacttgttgctgctgctgaagtccgtggtgtacttcgccatcatcacatgctgcctgctgcggagaaccgccttctgctgcaacggcgagaagtctagggccaagcgatctggatctggagcaacaaacttctcactactcaaacaagcaggtgacgtggaggagaatcccgggcctactagcatggccttaccagtgaccgccttgctcctgccgctggccttgctgctccacgccgccaggccggacatccagatgacacagagccctagcagcctgtctgccagcgtgggagacagagtgaccatcacatgcaaggccagcgaccacatcaacaactggctggcctggtatcagcagaagcctggacaggcccctaagctgctgatctacggcgctaccacactggaaacaggcgtgcccagcagattttctggcagcggctctggcaccgactacaccctgacaatatccagcctccagcctgaggacttcgccacctactactgtcagcagagctggaacaccccttggacattcggccagggcaccaagctggaaatcaagagaggcggaggcggaagtggaggcggaggatctggcggcggaggctctcaagttcagcttcaacagcctggcgctgagctggtcaaacctggcgcttctgtgaagatgagctgcaaagccagcggctacgccttcagcagctcttggatcaactggatgaagcagaaacccggccagggactcgaatggatcggccaaatctatcccggcgacggcgacaccaactacaacggcaagttcaagggcagagccacactgaccgccgatacctctagcagcacagcctacatgcagctgagcagcctgaccagcgaagatagcgccgtgtacttctgtgcccggtccatcacaacagtcgtgggctgcgctatggactattggggccagggaacaagcgtgaccgtgtctagtacgcgtagccagcctcacaccaagcccagcgtgttcgtgatgaagaacggcaccaacgtggcctgcctcgtgaaagagttctaccccaaggacatcaggatcaacctggtgtccagcaagaagatcaccgagttcgaccccgccatcgtgatctcccccagcggcaagtacaacgccgtgaagctggggaagtacgaggacagcaacagcgtgacctgctccgtgcagcacgacaacaagaccgtgcacagcaccgactttgaagtgaaaaccgactccaccgaccacgtgaagcccaaagagacagagaacaccaagcagcccagcaagagctgccacaagcccaaggccatcgtgcacaccgagaaagtgaacatgatgagcctgaccgtgctgggcctgcggatgctgttcgccaaaaccgtggccgtgaacttcctgctgaccgccaagctgttcttcctc

SEQ ID NO: 34030 - DNA, 2397 bp, synthetic construct
  source 1..2397: mol_type = other DNA
atggccttaccagtgaccgccttgctcctgccgctggccttgctgctccacgccgccaggccggacatccagatgacacagagccctagcagcctgtctgccagcgtgggagacagagtgaccatcacatgcaaggccagcgaccacatcaacaactggctggcctggtatcagcagaagcctggacaggcccctaagctgctgatctacggcgctaccacactggaaacaggcgtgcccagcagattttctggcagcggctctggcaccgactacaccctgacaatatccagcctccagcctgaggacttcgccacctactactgtcagcagagctggaacaccccttggacattcggccagggcaccaagctggaaatcaagagaggacagcctaaggccaatcctaccgtgacactgttccctccaagcagcgaagaactccaggccaacaaggccacacttgtgtgcctgatctccgacttctaccctggggctgtgacagtggcttggaaggccgatggatctcctgtgaaagccggcgtggaaaccaccaagccatccaagcagagcaacaacaaatacgccgccagctcctacctgagcctgacacctgagcagtggaagtcccacagatcctacagctgccaagtgacccacgaaggcagcaccgtggaaaagacagtggcccctacagagtgcagcggatcccagagcttcggcctgctggaccccaagctgtgctacctgctggatggcatcctgttcatctacggcgtgatcctgaccgccctgttcctgagagtgaagttcagcagaagcgccgacgcccctgcctaccagcagggacagaaccaactgtacaacgagctgaacctgggcagacgggaagagtacgacgtgctggacaagcggagaggcagggaccctgagatgggcggaaagccccagcggagaaagaacccccaggaaggactgtataacgaactccagaaagacaagatggccgaagcctacagcgagatcggcatgaagggcgagcggagaagaggcaagggccacgatggcctgtaccagggcctgagcaccgccaccaaggacacctatgacgccctgcacatgcaggccctgcctccaagaagggccaagcgatctggatctggagcaacaaacttctcactactcaaacaagcaggtgacgtggaggagaatcccgggcctactagtatggactggatttggcgcatccttttccttgtcggcgctgctaccggcgcgcattccttcgaacaagttcagcttcaacagcctggcgctgagctggtcaaacctggcgcttctgtgaagatgagctgcaaagccagcggctacgccttcagcagctcttggatcaactggatgaagcagaaacccggccagggactcgaatggatcggccaaatctatcccggcgacggcgacaccaactacaacggcaagttcaagggcagagccacactgaccgccgatacctctagcagcacagcctacatgcagctgagcagcctgaccagcgaagatagcgccgtgtacttctgtgcccggtccatcacaacagtcgtgggctgcgctatggactattggggccagggaacaagcgtgaccgtgtctagtgcctctacaaagggaccctccgtgtttcctctggctcccagcagcaagtctacaagcggaggaacagccgctctgggctgcctggtcaaggattactttcccgagcctgtgaccgtgtcctggaatagcggagcactgacaagcggcgtgcacacctttccagccgtgctgcaaagcagcggcctgtactctctgagcagcgtggtcacagtgcctagctctagcctgggcacccagacctacatctgcaatgtgaaccacaagcctagcaacaccaaggtggacaagagagtggaacccaagagctgtggtacccagagttttgggttgttggaccctaaattgtgctatctgttggacggaatcctgttcatttacggagtgatcctgaccgcattgttcctgcgggttaagttttccagatccgcagacgcacccgcttaccaacaagggcagaaccaactctacaatgaacttaatttggggcggagggaagagtacgacgttctggacaaaaggaggggacgagatcccgagatgggcggaaagcctcagcgaaggaagaatccgcaagaggggctttataacgaactccagaaagataaaatggcagaagcctatagtgagattgggatgaagggagaaaggaggaggggtaaaggtcacgatgggttgtaccaaggattgagcacagccactaaagatacctatgatgcgctccacatgcaggccctgccgccaaga

SEQ ID NO: 34031 - DNA, 2454 bp, synthetic construct
  source 1..2454: mol_type = other DNA
atggccttaccagtgaccgccttgctcctgccgctggccttgctgctccacgccgccaggccggacatccagatgacacagagccctagcagcctgtctgccagcgtgggagacagagtgaccatcacatgcaaggccagcgaccacatcaacaactggctggcctggtatcagcagaagcctggacaggcccctaagctgctgatctacggcgctaccacactggaaacaggcgtgcccagcagattttctggcagcggctctggcaccgactacaccctgacaatatccagcctccagcctgaggacttcgccacctactactgtcagcagagctggaacaccccttggacattcggccagggcaccaagctggaaatcaagagactcgaggacctgaagaacgtgttcccacctgaggtggccgtgttcgagcctagcgaggccgagatcagccacacccagaaagccaccctcgtgtgcctggctaccggcttctaccccgaccatgtggaactgtcttggtgggtcaacggcaaagaggtgcacagcggcgtgtctaccgacccccagccactgaaagaacagcccgccctgaacgacagccggtactgcctgagcagcagactgagagtgtccgccaccttctggcagaacccccggaaccacttcagatgccaggtgcagttctacggcctgagcgagaacgacgagtggacccaggacagagccaagcccgtgacccagatcgtgtctgccgaagcctggggcagagccgattgcggatcccagagcttcggcctgctggaccccaagctgtgctacctgctggatggcatcctgttcatctacggcgtgatcctgaccgccctgttcctgagagtgaagttcagcagaagcgccgacgcccctgcctaccagcagggacagaaccaactgtacaacgagctgaacctgggcagacgggaagagtacgacgtgctggacaagcggagaggcagggaccctgagatgggcggaaagccccagcggagaaagaacccccaggaaggactgtataacgaactccagaaagacaagatggccgaagcctacagcgagatcggcatgaagggcgagcggagaagaggcaagggccacgatggcctgtaccagggcctgagcaccgccaccaaggacacctatgacgccctgcacatgcaggccctgcctccaagaagggccaagcgatctggatctggagcaacaaacttctcactactcaaacaagcaggtgacgtggaggagaatcccgggcctactagtatggactggatttggcgcatccttttccttgtcggcgctgctaccggcgcgcattccttcgaacaagttcagcttcaacagcctggcgctgagctggtcaaacctggcgcttctgtgaagatgagctgcaaagccagcggctacgccttcagcagctcttggatcaactggatgaagcagaaacccggccagggactcgaatggatcggccaaatctatcccggcgacggcgacaccaactacaacggcaagttcaagggcagagccacactgaccgccgatacctctagcagcacagcctacatgcagctgagcagcctgaccagcgaagatagcgccgtgtacttctgtgcccggtccatcacaacagtcgtgggctgcgctatggactattggggccagggaacaagcgtgaccgtgtctagtacgcgtatccagaaccctgatcctgccgtgtaccagctgcgggatagcaagagcagcgacaagagcgtgtgtctgttcaccgacttcgacagccagaccaacgtgtcccagagcaaggactccgacgtgtacatcaccgataagaccgtgctggacatgcggagcatggacttcaagagcaactccgccgtggcctggtccaacaagtccgatttcgcctgcgccaacgccttcaacaacagcattatccccgaggacacattcttcccaagccccgagagcagctgcggtacccagagttttgggttgttggaccctaaattgtgctatctgttggacggaatcctgttcatttacggagtgatcctgaccgcattgttcctgcgggttaagttttccagatccgcagacgcacccgcttaccaacaagggcagaaccaactctacaatgaacttaatttggggcggagggaagagtacgacgttctggacaaaaggaggggacgagatcccgagatgggcggaaagcctcagcgaaggaagaatccgcaagaggggctttataacgaactccagaaagataaaatggcagaagcctatagtgagattgggatgaagggagaaaggaggaggggtaaaggtcacgatgggttgtaccaaggattgagcacagccactaaagatacctatgatgcgctccacatgcaggccctgccgccaaga

SEQ ID NO: 34032 - DNA, 2580 bp, synthetic construct
  source 1..2580: mol_type = other DNA
atggccttaccagtgaccgccttgctcctgccgctggccttgctgctccacgccgccaggccggacatccagatgacacagagccctagcagcctgtctgccagcgtgggagacagagtgaccatcacatgcaaggccagcgaccacatcaacaactggctggcctggtatcagcagaagcctggacaggcccctaagctgctgatctacggcgctaccacactggaaacaggcgtgcccagcagattttctggcagcggctctggcaccgactacaccctgacaatatccagcctccagcctgaggacttcgccacctactactgtcagcagagctggaacaccccttggacattcggccagggcaccaagctggaaatcaagagactcgaggaggacctgaagaacgtgttcccacctgaggtggccgtgttcgagcctagcgaggccgagatcagccacacccagaaagccaccctcgtgtgcctggctaccggcttctaccccgaccatgtggaactgtcttggtgggtcaacggcaaagaggtgcacagcggcgtgtctaccgacccccagccactgaaagaacagcccgccctgaacgacagccggtactgcctgagcagcagactgagagtgtccgccaccttctggcagaacccccggaaccacttcagatgccaggtgcagttctacggcctgagcgagaacgacgagtggacccaggacagagccaagcccgtgacccagatcgtgtctgccgaagcctggggcagagccgattgcggatcccagagcttcggcctgctggaccccaagctgtgctacctgctggatggcatcctgttcatctacggcgtgatcctgaccgccctgttcctgagagtgaagttcagcagaagcgccgacgcccctgcctaccagcagggacagaaccaactgtacaacgagctgaacctgggcagacgggaagagtacgacgtgctggacaagcggagaggcagggaccctgagatgggcggaaagccccagcggagaaagaacccccaggaaggactgtataacgaactccagaaagacaagatggccgaagcctacagcgagatcggcatgaagggcgagcggagaagaggcaagggccacgatggcctgtaccagggcctgagcaccgccaccaaggacacctatgacgccctgcacatgcaggccctgcctccaagaagggccaagcgatctggatctggagcaacaaacttctcactactcaaacaagcaggtgacgtggaggagaatcccgggcctactagtatggactggatttggcgcatccttttccttgtcggcgctgctaccggcgcgcattccttcgaacaagttcagcttcaacagcctggcgctgagctggtcaaacctggcgcttctgtgaagatgagctgcaaagccagcggctacgccttcagcagctcttggatcaactggatgaagcagaaacccggccagggactcgaatggatcggccaaatctatcccggcgacggcgacaccaactacaacggcaagttcaagggcagagccacactgaccgccgatacctctagcagcacagcctacatgcagctgagcagcctgaccagcgaagatagcgccgtgtacttctgtgcccggtccatcacaacagtcgtgggctgcgctatggactattggggccagggaacaagcgtgaccgtgtctagtacgcgtatccagaaccctgatcctgccgtgtaccagctgcgggatagcaagagcagcgacaagagcgtgtgtctgttcaccgacttcgacagccagaccaacgtgtcccagagcaaggactccgacgtgtacatcaccgataagaccgtgctggacatgcggagcatggacttcaagagcaactccgccgtggcctggtccaacaagtccgatttcgcctgcgccaacgccttcaacaacagcattatccccgaggacacattcttcccaagccccgagagcagctgcggtacccagagttttgggttgttggaccctaaattgtgctatctgttggacggaatcctgttcatttacggagtgatcctgaccgcattgttcctgaggagcaagcggtcacggctgctccacagcgattacatgaatatgacaccacgaagaccgggtcctactcgcaaacactaccaaccctacgcacctccccgcgactttgcagcgtaccgatctcgggttaagttttccagatccgcagacgcacccgcttaccaacaagggcagaaccaactctacaatgaacttaatttggggcggagggaagagtacgacgttctggacaaaaggaggggacgagatcccgagatgggcggaaagcctcagcgaaggaagaatccgcaagaggggctttataacgaactccagaaagataaaatggcagaagcctatagtgagattgggatgaagggagaaaggaggaggggtaaaggtcacgatgggttgtaccaaggattgagcacagccactaaagatacctatgatgcgctccacatgcaggccctgccgccaaga

SEQ ID NO: 34033 - DNA, 2709 bp, synthetic construct
  source 1..2709: mol_type = other DNA
atggccttaccagtgaccgccttgctcctgccgctggccttgctgctccacgccgccaggccggacatccagatgacacagagccctagcagcctgtctgccagcgtgggagacagagtgaccatcacatgcaaggccagcgaccacatcaacaactggctggcctggtatcagcagaagcctggacaggcccctaagctgctgatctacggcgctaccacactggaaacaggcgtgcccagcagattttctggcagcggctctggcaccgactacaccctgacaatatccagcctccagcctgaggacttcgccacctactactgtcagcagagctggaacaccccttggacattcggccagggcaccaagctggaaatcaagagactcgaggaggacctgaagaacgtgttcccacctgaggtggccgtgttcgagcctagcgaggccgagatcagccacacccagaaagccaccctcgtgtgcctggctaccggcttctaccccgaccatgtggaactgtcttggtgggtcaacggcaaagaggtgcacagcggcgtgtctaccgacccccagccactgaaagaacagcccgccctgaacgacagccggtactgcctgagcagcagactgagagtgtccgccaccttctggcagaacccccggaaccacttcagatgccaggtgcagttctacggcctgagcgagaacgacgagtggacccaggacagagccaagcccgtgacccagatcgtgtctgccgaagcctggggcagagccgattgcggatcccagagcttcggcctgctggaccccaagctgtgctacctgctggatggcatcctgttcatctacggcgtgatcctgaccgccctgttcctgaaacggggcagaaagaaactcctgtatatattcaaacaaccatttatgagaccagtacaaactactcaagaggaagatggctgtagctgccgatttccagaagaagaagaaggaggatgtgaactgagagtgaagttcagcagaagcgccgacgcccctgcctaccagcagggacagaaccaactgtacaacgagctgaacctgggcagacgggaagagtacgacgtgctggacaagcggagaggcagggaccctgagatgggcggaaagccccagcggagaaagaacccccaggaaggactgtataacgaactccagaaagacaagatggccgaagcctacagcgagatcggcatgaagggcgagcggagaagaggcaagggccacgatggcctgtaccagggcctgagcaccgccaccaaggacacctatgacgccctgcacatgcaggccctgcctccaagaagggccaagcgatctggatctggagcaacaaacttctcactactcaaacaagcaggtgacgtggaggagaatcccgggcctactagtatggactggatttggcgcatccttttccttgtcggcgctgctaccggcgcgcattccttcgaacaagttcagcttcaacagcctggcgctgagctggtcaaacctggcgcttctgtgaagatgagctgcaaagccagcggctacgccttcagcagctcttggatcaactggatgaagcagaaacccggccagggactcgaatggatcggccaaatctatcccggcgacggcgacaccaactacaacggcaagttcaagggcagagccacactgaccgccgatacctctagcagcacagcctacatgcagctgagcagcctgaccagcgaagatagcgccgtgtacttctgtgcccggtccatcacaacagtcgtgggctgcgctatggactattggggccagggaacaagcgtgaccgtgtctagtacgcgtatccagaaccctgatcctgccgtgtaccagctgcgggatagcaagagcagcgacaagagcgtgtgtctgttcaccgacttcgacagccagaccaacgtgtcccagagcaaggactccgacgtgtacatcaccgataagaccgtgctggacatgcggagcatggacttcaagagcaactccgccgtggcctggtccaacaagtccgatttcgcctgcgccaacgccttcaacaacagcattatccccgaggacacattcttcccaagccccgagagcagctgcggtacccagagttttgggttgttggaccctaaattgtgctatctgttggacggaatcctgttcatttacggagtgatcctgaccgcattgttcctgaagagaggccggaagaagctgctgtacatcttcaagcagcctttcatgcggcccgtgcagaccacccaggaagaggacggctgctcctgccggttccccgaggaagaagaaggcggctgcgagctgcgggttaagttttccagatccgcagacgcacccgcttaccaacaagggcagaaccaactctacaatgaacttaatttggggcggagggaagagtacgacgttctggacaaaaggaggggacgagatcccgagatgggcggaaagcctcagcgaaggaagaatccgcaagaggggctttataacgaactccagaaagataaaatggcagaagcctatagtgagattgggatgaagggagaaaggaggaggggtaaaggtcacgatgggttgtaccaaggattgagcacagccactaaagatacctatgatgcgctccacatgcaggccctgccgccaaga

SEQ ID NO: 34034 - DNA, 1770 bp, synthetic construct
  source 1..1770: mol_type = other DNA
atggccttaccagtgaccgccttgctcctgccgctggccttgctgctccacgccgccaggccggacatccagatgacacagagccctagcagcctgtctgccagcgtgggagacagagtgaccatcacatgcaaggccagcgaccacatcaacaactggctggcctggtatcagcagaagcctggacaggcccctaagctgctgatctacggcgctaccacactggaaacaggcgtgcccagcagattttctggcagcggctctggcaccgactacaccctgacaatatccagcctccagcctgaggacttcgccacctactactgtcagcagagctggaacaccccttggacattcggccagggcaccaagctggaaatcaagagactcgagcagagcttcggcctgctggaccccaagctgtgctacctgctggatggcatcctgttcatctacggcgtgatcctgaccgccctgttcctgagagtgaagttcagcagaagcgccgacgcccctgcctaccagcagggacagaaccaactgtacaacgagctgaacctgggcagacgggaagagtacgacgtgctggacaagcggagaggcagggaccctgagatgggcggaaagccccagcggagaaagaacccccaggaaggactgtataacgaactccagaaagacaagatggccgaagcctacagcgagatcggcatgaagggcgagcggagaagaggcaagggccacgatggcctgtaccagggcctgagcaccgccaccaaggacacctatgacgccctgcacatgcaggccctgcctccaagaagggccaagcgatctggatctggagcaacaaacttctcactactcaaacaagcaggtgacgtggaggagaatcccgggcctactagtatggactggatttggcgcatccttttccttgtcggcgctgctaccggcgcgcattccttcgaacaagttcagcttcaacagcctggcgctgagctggtcaaacctggcgcttctgtgaagatgagctgcaaagccagcggctacgccttcagcagctcttggatcaactggatgaagcagaaacccggccagggactcgaatggatcggccaaatctatcccggcgacggcgacaccaactacaacggcaagttcaagggcagagccacactgaccgccgatacctctagcagcacagcctacatgcagctgagcagcctgaccagcgaagatagcgccgtgtacttctgtgcccggtccatcacaacagtcgtgggctgcgctatggactattggggccagggaacaagcgtgaccgtgtctagtacgcgtcagagttttgggttgttggaccctaaattgtgctatctgttggacggaatcctgttcatttacggagtgatcctgaccgcattgttcctgcgggttaagttttccagatccgcagacgcacccgcttaccaacaagggcagaaccaactctacaatgaacttaatttggggcggagggaagagtacgacgttctggacaaaaggaggggacgagatcccgagatgggcggaaagcctcagcgaaggaagaatccgcaagaggggctttataacgaactccagaaagataaaatggcagaagcctatagtgagattgggatgaagggagaaaggaggaggggtaaaggtcacgatgggttgtaccaaggattgagcacagccactaaagatacctatgatgcgctccacatgcaggccctgccgccaaga

SEQ ID NO: 34035 - DNA, 1944 bp, synthetic construct
  source 1..1944: mol_type = other DNA
atggccttaccagtgaccgccttgctcctgccgctggccttgctgctccacgccgccaggccggacatccagatgacacagagccctagcagcctgtctgccagcgtgggagacagagtgaccatcacatgcaaggccagcgaccacatcaacaactggctggcctggtatcagcagaagcctggacaggcccctaagctgctgatctacggcgctaccacactggaaacaggcgtgcccagcagattttctggcagcggctctggcaccgactacaccctgacaatatccagcctccagcctgaggacttcgccacctactactgtcagcagagctggaacaccccttggacattcggccagggcaccaagctggaaatcaagagactcgagggacagcctaaggccaatcctaccgtgacactgttccctccaagcagcgaagaactccaggccaacaaggccacacttgtgtgcctgatctccgacttctaccctggggctgtgacagtggcttggaaggccgatggatctcctgtgaaagccggcgtggaaaccaccaagccatccaagcagagcaacaacaaatacgccgccagctcctacctgagcctgacacctgagcagtggaagtcccacagatcctacagctgccaagtgacccacgaaggcagcaccgtggaaaagacagtggcccctacagagtgcagccccatcaagaccgatgtgattacaatggaccccaaggacaactgctccaaggacgccaacgataccctgctgctccagctgaccaacaccagcgcctactacatgtacttgttgctgctgctgaagtccgtggtgtacttcgccatcatcacatgctgcctgctgcggagaaccgccttctgctgcaacggcgagaagtctagggccaagcgatctggatctggagcaacaaacttctcactactcaaacaagcaggtgacgtggaggagaatcccgggcctactagtatggactggatttggcgcatccttttccttgtcggcgctgctaccggcgcgcattccttcgaacaagttcagcttcaacagcctggcgctgagctggtcaaacctggcgcttctgtgaagatgagctgcaaagccagcggctacgccttcagcagctcttggatcaactggatgaagcagaaacccggccagggactcgaatggatcggccaaatctatcccggcgacggcgacaccaactacaacggcaagttcaagggcagagccacactgaccgccgatacctctagcagcacagcctacatgcagctgagcagcctgaccagcgaagatagcgccgtgtacttctgtgcccggtccatcacaacagtcgtgggctgcgctatggactattggggccagggaacaagcgtgaccgtgtctagtacgcgtgcctctacaaagggaccctccgtgtttcctctggctcccagcagcaagtctacaagcggaggaacagccgctctgggctgcctggtcaaggattactttcccgagcctgtgaccgtgtcctggaatagcggagcactgacaagcggcgtgcacacctttccagccgtgctgcaaagcagcggcctgtactctctgagcagcgtggtcacagtgcctagctctagcctgggcacccagacctacatctgcaatgtgaaccacaagcctagcaacaccaaggtggacaagagagtggaacccaagagctgtgaagtgaaaaccgactccaccgaccacgtgaagcccaaagagacagagaacaccaagcagcccagcaagagctgccacaagcccaaggccatcgtgcacaccgagaaagtgaacatgatgagcctgaccgtgctgggcctgcggatgctgttcgccaaaaccgtggccgtgaacttcctgctgaccgccaagctgttcttcctc

SEQ ID NO: 34036 - DNA, 1878 bp, synthetic construct
  source 1..1878: mol_type = other DNA
atggccttaccagtgaccgccttgctcctgccgctggccttgctgctccacgccgccaggccggacatccagatgacacagagccctagcagcctgtctgccagcgtgggagacagagtgaccatcacatgcaaggccagcgaccacatcaacaactggctggcctggtatcagcagaagcctggacaggcccctaagctgctgatctacggcgctaccacactggaaacaggcgtgcccagcagattttctggcagcggctctggcaccgactacaccctgacaatatccagcctccagcctgaggacttcgccacctactactgtcagcagagctggaacaccccttggacattcggccagggcaccaagctggaaatcaagagactcgagggacagcctaaggccaatcctaccgtgacactgttccctccaagcagcgaagaactccaggccaacaaggccacacttgtgtgcctgatctccgacttctaccctggggctgtgacagtggcttggaaggccgatggatctcctgtgaaagccggcgtggaaaccaccaagccatccaagcagagcaacaacaaatacgccgccagctcctacctgagcctgacacctgagcagtggaagtcccacagatcctacagctgccaagtgacccacgaaggcagcaccgtggaaaagacagtggcccctacagagtgcagcggcagagccgattgcggcatcaccagcgccagctaccaccagggcgtgctgagcgccaccatcctgtacgagatcctgctgggcaaggccaccctgtacgccgtgctggtgtctgccctggtgctgatggctatggtcaagcggaaggacagccggggaagggccaagcgatctggatctggagcaacaaacttctcactactcaaacaagcaggtgacgtggaggagaatcccgggcctactagtatggactggatttggcgcatccttttccttgtcggcgctgctaccggcgcgcattccttcgaacaagttcagcttcaacagcctggcgctgagctggtcaaacctggcgcttctgtgaagatgagctgcaaagccagcggctacgccttcagcagctcttggatcaactggatgaagcagaaacccggccagggactcgaatggatcggccaaatctatcccggcgacggcgacaccaactacaacggcaagttcaagggcagagccacactgaccgccgatacctctagcagcacagcctacatgcagctgagcagcctgaccagcgaagatagcgccgtgtacttctgtgcccggtccatcacaacagtcgtgggctgcgctatggactattggggccagggaacaagcgtgaccgtgtctagtacgcgtgcctctacaaagggaccctccgtgtttcctctggctcccagcagcaagtctacaagcggaggaacagccgctctgggctgcctggtcaaggattactttcccgagcctgtgaccgtgtcctggaatagcggagcactgacaagcggcgtgcacacctttccagccgtgctgcaaagcagcggcctgtactctctgagcagcgtggtcacagtgcctagctctagcctgggcacccagacctacatctgcaatgtgaaccacaagcctagcaacaccaaggtggacaagagagtggaacccaagagctgtatccccgaggacacattcttcccaagcagcgacgtgccctgcgacgtgaagctggtggaaaagagcttcgagacagacaccaacctgaacttccagaacctgagcgtgatcggcttcagaatcctgctgctgaaagtggccggctttaacctgctgatgaccctgcggctgtggtccagc
